United States Patent Application Publication US 2020/0109395 A1 - sequence listing, part 14

SEQ ID NO: 52096 - DNA, 4368 bp, Butyrivibrio sp. CAG:318
atgccgcagattaacagaatcagggtaaacaatgtaaaatataatttcggtacacagttttatgatgattttatgatgcgtttctcatgcagaaacagtatatatgaccttgcaaacggtggtggcaagagcgtgcttatgcttttgctgctgcaaaatctgatacctaactgcacgcttgatgacaaacagccggtcgagaaacttttcaggacaccgggtgttaatacggtaattcattcattgatagaatggaaactggatgcgtgcgatgtaagggatggttaccgctatatgacaacaggtttctgcgcgcgtaaaggtaaggataattccgaggattcacaaagggagctcgcgagcattgagtattttaactattgtattttctataaggaattcggtgacaacgatattaagaacctgccgctttcaaacggaagtgaacgtgtgacatacaatggacttaaggcatatctgcgtgacctcgaaaaacatgattatggggttgaggtgcatatttttgaacgaaagggagattatcagaattttataagtaattacggacttcatgagagccagtgggagattatccgcggaattaataagacggagggacatgtccggacttattttgaaaacagttataaaacaacaaggaaagttgttgaggatcttcttattgaggagataatcgagaaatcctataataacagaatccgcaacggtgaggcagatgatgacgaaatggccaggacacttcttgacatcaaggacaaactcattgaactggcaaagcgacgtggcgaaattgccgggtatgacagacagatggagctgctggatgaatttgcgggcggacttgggacaattggagaattgtatgataggaaagagcgtacagcggacggacttgtcggatgtcttatggcatgccggagagaacttgcgggaaagaaagagcagctggagaatcttgaaaacacatacgcatcgctggatgaggaatatgatgtggcatccgccggtgcagcccgtgcggagatagaggaagagtataacgaactgaatgaattgaacagccttatagaggagactatagcggcaagaaatgcgatttcagaccgcagcgccggttttaaagaacagataaggcttaatgatattgcgctggagtacagggattatacggatgcgggtgcagagtatgataaattaaaagaattgattgccaaccgaagcaaggatgatgaagagataattgagtccatgcaccggctggctgctttgaaatacagattttataccgaaaaaagagcattaaatctggagggtcttaaccgggcagaggaaacggcagctgacattaaatccgaatatgaggcagagaaggagaaggtgcgcgctctttttgcggggatgagcagcgaaaagggaatatatgatgaggtcaactcaatctgcctttccaaagaaagcagcctgatggcaggccttaaggagtgttcgcttatagttgcggatgcgctcggccaggcatatgaagataacggaaatgatattgataagagccgggaaaatatcgcgtcacttgacgaaaataccgctaagtgtgccggaattatacgcgataatgagaagaaagcagctgttgcacggaacagatatgaacggatgaaggcggattatgacaaagcggcgacgcgttatgaagctgccgtaaagagaaccggacacatatcaacattgtgtaatatatataattgcagccgtgatgcgttgatacacacgatgcatcagatatatgacagcacattaaaacagcagatagagaaggaaaatgaaattaacagtcttcaggcatatcttggcaatatcaaagagcataaagtgcctgattatgacagcagatttgaagcggttctcgattacctcaggggtcgttatggaaatgctgtccgtgctggacgtgatgccggcgtggatatgataatggaatatccatacctgccttatgtgatcgttgccggtgatgcgtatgatgcgatagcggcggataaggttatttattcgatgaacaccggaacttatatggttccgatcatcagaaacgaaatggatttcccggatgcaggcagtatgaatgccgcatataagagaatggattttctgtgggatgaagcggcacttgcagccgagacagataatgtatcggaggaattaaagacggcaaaagagagtcttgtgagcatccgcgataaggccgaggttataagagatgatatcgtgaccgcaagaactgttttagaggatgaaccggcggaaataatcaaatcggagcttggtcagatcgaagaagatatggcacagctgcaggatgaaatcgagttgtgtgacaggacaatatctaacgaaactgtgagaaatgaggcattgaagaaggctcttgcagctgaaaaagaacatcttgatgaatgtatggcacgcagaaagatgcttgaagataatctagcgatttatgccgaacttatcgggctgcgtgaacgcagaaagaaagtccgtgctgagatggataaggccagggcggaatacgatattgctgcccggaacgaggaaaatctttccgtgaaacttgaaaatgcggtcaataatcgtgacagaataagagctgatattgatagggatgatgaagtctataatagtatttacagaccgtattaccgtgaaaatgatgatgccgccaaccctgagggtatgcttgaagaggcagtcgatgccaggtttgcggctttgcaggagcttataaccggccgcaacggtgatatagaggataagacaaggcttatgaataactgccgcgcggcaatggataaatctgagaggagcataaaacgcaacggtatgtcgcttgaggatgccaaagagaatcttgaaaagggactgcttgtaatacgcgatgaggcatatattgagaacctgcgtcgtgaaattaacgattcagaccgcaaagcggctgccaaagattccgaaatagatgcacagtcagcttccagaaacagaattgaaggaagcattgagcatgcgcgcagggtgtatgaggagaaatatggcacatttgaacgcataagcgatgataatccgaaggagagcatagctgtgttcaggcataagatgtctgaaattacatcaagacggagtgatattaaatcgcagataagacagcttgaaaatgataacagggatgcgatggtcatggaacgagacctggaaaggattgtcaccaatgcaggactttccggacgtgaaactgctaatggaatattgactgcggatgtgtcttcatatgatgaattacgtaaagaatataaccgtgttctcaaagaggaagacagactcaaaacagatttttataacagaaaacagaaacttataacttcactggaggaccttaaggcatatgagcttgcgcaggaaatcatggcatcggttgagcttccgcaatgtgtggcagatgtgacggcaatggtggatggacttaaacagaccaatgagtgtatagcacttgaacgtgacagaattgacaaaagtcttggtgagatggaacatattaaggacaggtttgaggacagatgtatacagatatgcagcaatatcagaaccgaacttgacagacttcctaagttatcgcgtattacattggatgatgaggttataccaataatcacattatcggttccgtatatcagggaagatatgtataaggacagaatgtcagtatatatcaatgagacggtgtcggcggcagaaaccttccattctccggaagacaaactcaaatacatcaagggacggctttcatggaagcggttgttctcagtcgtagtccaggatatgaacagtattaaactctcgctttacaagagggaacatattaaggatcagagccgttatctcaggtacgaggaggcggtcggtagtaccggccagtcgcagggtatatacatacagttccttatagcgattatcaattatattgcgtgtctgaattcagccaataaggattcacagataaccggtaatactatttttatagataacccattcggtgcggcgaaggatgtgtatatctgggaaccgattttcggtatgcttaagaccaaccatgtccagttaatcgttccggcaagaggcgccacaccggcaattaccagaatgtttgatgtgaattacattctcggacagaaacttgtggcaggcagacaacagacagttgttgtcgattacagaagtcaggttaaagccgatgagatggaatatgtgcagcttgattatgaacagtcaacaatcgaggatttttttaacacatga

SEQ ID NO: 52097 - DNA, 1527 bp, Eubacterium sp. CAG:603
atgtccgaggaatatacattagtcagggatatagtttacgaccataatgagcgtatgctgaatatcagaaaatattacccatttttcaaattagcagatatttctttaagtcaatataaagagggaaaatttgctgtacttgatatgggatatattgtgatggcagtattgcgcttttttattgaagaaaataattttcgagagaaaatggttacatataacgaatatatgacatttatgcaagatgtattaaaacgtgattttgaacttgtgatagaagaagacgaagaaaaggaactgattgcatatatatttgacaaattgaaaaatgatggtaaaccattttcttatgaatattttgatccggtatctaagcagcgtaagacagtaaggacgaagatacttgacaacaaaatagtagatgataatgtggtgtattatataacctctgatgcaatagaattctatcttgataccaaggagataaaagatgagagcaatataaccatagcacaagtcctgcttactaagatgatttcgacaagaaattttaagggtggtacagaggtggtatcacgaataaataacgaggtaagccggcttatttctaagaaaaatgagatattaggaatacttagctatgatatattcgagggaatcaaggcatacgaaagctttattaagacaaccgtaaagtggtttgatgaagagcagaagctattcgataagaataaacaattaatagagcaggcattaagggcaggcgaggaagataataaattctacgaggcaatggaggacatatatcacttagagagtgaattaaacagggcaatgaacaagcacagtgaacttttgaatgcctgcaccatattgcaggcaaaagctgatgaaatggttgttcaggcgaagttcaacagattaaaatcatcatttgattttagaaaagtgctaagtgatatgattaaaagtgataatacagacaaccttaatctgtttacaaagccattgcttaagctaaatgttaagaaaacattttcgcttacattacttgataatatgttaaatatgagaacggaagcaatggaagatggcgaaaagattaatgaaaataagtatgatgagaatttcaaatatgatgatgaaatagaagatgatagaatatctgaaaatcatagaatattcttaatgattttattcgatatgctgattgcaaatgaagagtttgatttaatgcaatataatgaagaactcgttaaaaaacttggtaaaaatgtacttaagaatggagactattattcgtttgtaacacatttgtgccagaaatcattatatgatatgagtgaagtaatagagaaaccagacacattcttagagggctttatgaagaaagtcataacagaagaaagtggtggcgcaaaatataaatatctgactttcaggatagatttcctggaggataatgaaatacttgagaatatgggaaatgaaattgtaaatgtacatttcagaaatggagcacagtga

SEQ ID NO: 52098 - DNA, 696 bp, Eubacterium sp. CAG:603
gtggaaaataggaatttatctaaggcgttagaaatagtgtcaaagctgatagtaggtgaagaaatcagcagggattctaaggaaacggcttctttatatgatgaatatatggataacagcgaagtctatgatattacaaatactatttgcaagaatatgaatctgtctttatatgaatatgagaactctatattcgcatctgcaggtgagaataacagggtatttggatattctaatgatgagcttaagaaagagataggtgttaaactgaacagggaattattcttatgttattttattatttataatgtaataacctggttttataatgatacaagaaatgtaactttcaatgagtatgttaaagttgatgatattattaactctgtagacagttcgttatctggggtgataaataatctgtcggttttatcactcaatgaagtcgaagagaacagctttaagacaattgcacttgtatgggaagacttgcctatcgtagcaaatgaagaaactaatgcaagagcagcaagaggttctaaggttggttttgtcaaaatgacgttgaacttcttattaaagcaggaattattaattgaaaataatgaaagatactaccctaagaagagattcaaagcacttgtaagtaattatttcgaagaatataaaggaagattatacgagataatgaaataa

SEQ ID NO: 52099 - DNA, 4446 bp, Eubacterium sp. CAG:603
atgccacacattaacagaatcagagtaaataatgtaaagtacaatttcggaacgcagttttatgacgattttatgatgcgtttttcatgtaaaaataccatttacgacttggcaaatggtggtggaaaaagtgtattaatgctattacttttgcagaatttaataccgaattgtactcttgatgataaacagcctatagagaaattattcagaacaaatgagggaagtacaaccatccattcaatgattgaatggagtcttagtgatgtacatattaaagatggttttaaatatatgcttaccggtttttgtgccagaaaggcaaaggagcagggagagtttgaagaaaatgcagatggaagcagaaacggaactgcgattgaatattttaattactgcattttctatagaaaatttaatgacaatgatataaagaatttcccacttacccagaatggtgagagaattacatattcaggactcaagaattatcttaaagatttacagcgtaaggattacaatcttgaagtcaaaatatttgaaaggaaaggtgattatcagagattcatagcggactatggcttatatgaaagtgaatgggagattatcaggggaattaataaaacagagggacacgtaagaacatattttgagacaaattacaagaacaccagaaaagtagtggaagatttattgattgaggagataatcgagaaatcgttcaggaataagtatgcaaatgattcagaggacggaaatcttgccgaaacacttcttaatatcaaggataaaatattagaattatctaataagaaagaggagataaataacttcgacagacagatagagattatcgatggttttgcaggaagaatttcatcaataagacaattatatgttggtattgagaatgcatttataaagattaagaaagcatataattctcttgaagtatcagagaataataataagtcagaattagaagcggcacttaacgagcgtaaaaatgtgttagcagagaagaataatctgtcggctaaagttgaaacagcgaaagtgcttgtggatatgggagaattagagaagttagaggccgagttaagcagagaaaatgaaaaacttgtgcagacagatgaggaagtcaaggcatttatagagagattaaatatcttagagggtggcaattattaccttgaatatatacagtgtaaaaaagaatatgataaacttaaacttgtaatgaataatattcttaaggataataagactctgcttgataatcttaaagagttagctgctatccgaaaaatgtctgatgatgagagaattaacgaacttacttctaagataaatgaagagaaaagcataaatgaaaatgaaacagaacttatagctgcactcaagacagagattaaagatttagataataagctagcggtattagattataaagtggcagattatgatagaaaatcggctctgattaataaagaaatcattgataagaagaatatgacttcactattattaccaacagatgcggataaaatgtgtgctgctgacagggataaattatccgctataaatgacaaggcagaggaattagaaagcaaatgcgagactaaatcaggagaagtcataacacttagacttaaattacgagaaaatgattataagttaaatgatttagagaagagaaagaacataatcgaagagaataataataagctattaaattcatctgagaagctttctaaattaaagcaggtatatgatgccgaagaattagaagaacttcttaagaaaatagaaaagacatataaaaatatgttaaatgcatcgtcagaagctgaaaagaaacttgtagaaattgacagacaacttaaggcactcgaacttggaagagtggttaatgaatcagctgctttatcagaggtgcttgaatacatcagaagatatcattctaatacagcggtttcaggagcacaatacctggcagaacttcctgaagaaacaaggtttgaattagtaaaatacaatcctgttttaccatatgcaatcattgtaaaggataatttcgagcagacgataatggatacacgccttaaggaaaacttagaaaatggatatacggttccaattattaatggtacgaaattagcagaagaaaatgtagaattaattaattctgaaaatgtattctttatcggagaaaatgcagaagaattttcatcagataagattaagcagaacattgaacgaatcaagttattacaggagaaactcaataaagagtatttaagaaaattagaaaatgaacaggtagtaaaagaggattatctgtttataaatcatatcgttaatgatgtaaatgatgaagaaatacttaatcctaagaaagccttagagaaagttaattcagaaattcttgagaaaatcgaggtatctaaaaatctcaaggaagagattgcatttacggagaacgatataagaaatgttaaagaagaactggcagacttaaggaaagagaaagaagaaacagaacaagagattaatgtactgtcagagattagtagacttataacagaatccaatgtagtcagtgatgagaaaacgaaagcctccacagaattagaacgacttaagaaagaagcaacagacagtagtaaaagacttgctgcaacagaaaatatgtctaagcagagacagataagaattaattctatggaagaagaattagataccataaagaaagactggtcagaaaaatattcttcatattatgatgaaacagtgtataaagaagtaagagacaatgaagcaaaatacaatggaagaagcagagatgatatagagacagaattaatggcattaattgagagccttaaaaaggaaaattatgccgtagcagataaagaaaaacttcttaataactatcaggtatcgatggagaagaatttacaacatatagattatatgggtgtagacatagaggtgcttaagaaccaatacgataataacgagttagttgttacatctcctaaagatttatcagatattaagagacaggctgacagacataaggcagttaagaaggagataagacaatctatacaggaaatgcgttctaatgctgacaagttaaagggtaaaataagtcacgcaattaatattattactgataaatatggtgaatttgacaaaaatttgataaaagagagtgaaatcgatacatttctaaatgaaaatgcaagacttcttagtgatttgacggataaaacagacagacttgcaggagcaatatcagaaatggaacgtaaggcagttacgattaatatgcttaaacgagatattaataaattaatgactaaatctgatattaagcctgatataaaggcaggtacatttgaagaaaatgcagatattgaagcagaatgtaaaaatgtcagtgaacagttagacaaattcatagatgagaaatacaagcgctctgaagaatttgaaagggaaatgtcacttcttaatgatactttgaagaaactgaatgcatttgaattagcatcggaaataagaatgaatgtaagtatgcctgcggatttagatgaaacagatgaattaataaaaatgcttaaagagactaatgagtatattaatcttgaaaagcagcgtatacttaaaggcattgaggatatgcaggttattaaggataattttgagaatcagtgtatacagacctgtactaatattaagacagagttagacagattatcgaagttatcgagaattacaatggaagatgaaacaattcctgtaattaacttaagaataccgtatgttaaagaagaagtgtataaagacaggatgtctgaatatatcgacagggttgcaaaaggcgcagattcatttgaaaagacagaggataaacttaaatatatcagaaataatttaagctggaagaagatgttctcggttatagtcactgatatgaattcgataaaacttaatctttataagagagaaagaattgcagaccagtcaagatttcttccgtatgaggaggcggtgggaagtacgggacagtcacagggtatatatatacagttccttatttcgataattaattatatttcaagcattaattctaaaaatgctgatgcatcaaaacttaaaaaagttattttcatcgataacccatttggtgctgctaaagatatatatatatgggagccgatatttaaacttcttaagactaacaatgtgcagttaatagttccggcaagaggggcaacacctgcaatcagcggacgatttgatgttaattatgtgttaggacagaagataagtaacggacgtcagcagacggttgtagtggattatttcagtaatgttaataatgatgagctggattacacaactttatcttatgaacagacagcattgttttga

SEQ ID NO: 52100 - DNA, 1638 bp, Clostridium sp. CAG:264
gtggcaaagcagtacgtgatgatcaatgacataatcgaagaacataatgcgagaatgtataacttaagaaaatactacccgttttttgtgttatcggaaactgcatttacacagtacaaggatggacgatataacagtctggatatgggatatatcaccatggcggtactgcgtttttttattgaggaaaacaacttcaacgagagggacatcacatatccccagtgtgaagcatttataaaagagctactgatccgtgatttcgatattgagattgaggacgaggatatggcagacctgatcttatatatatttgacaagatcagaaatgatggaaaagcatttgaatttacattttacgatccgggtaagaagcagaagaagaccgggcgtgtcagactgatcgacagccggatcacggatggaaaagtgctctattacataactgcggatgggatagaattctatcttgataccaaggagatcaaggacgagagcaagatcaatgtagaacaggttttgcttgagaagatgattaccggagagaatttcaagggaggtatcgaggttgtcaagcggatcaacagcgaagtgaaccggcttgtaagagaaaaagacgatatcgtagatctgctttcttacgatgtatttgccggggcagaagcttatgagaaatatatgaagacggttggcaaatggttttccgaggaacagaaattatttgcgaagaacaaggcactggtcgataaggcagttgcgaaagcgaactttgaccatctgacaaaaggttctacgttgttggatgagatcagtcagttggagctggaattgaagaagaccatattaaagcatggaaatctgatcaacagcaccatggaattacagaatatatcggacaacattattcagaaggcgaagttaaagcgtctgcgtccggtatttgattttgaaaaggaattacagaagatgatcagggaggatcgaccggataagatgggcttgattcttgctcctttatttgcaccggcgatcacgaagtcgttctcgatgacatcgatcgacaatcttcttacgctcaaatcagaggatgaggcgaagatggtgacagcaaagaaagaagatgtaaatgcgaacttccgttacgaggacgagattgaagaagaacgctccggtagaaactatggcaagttattctttgaactgatggatgtgcttgcccgctggaagaagctcagcctgaaagaattcaacggattccttgagatacgatttggaaaagaaatctatgagaatgccgattattacgcattccttacccatctggcacagaagaaggaatatgatatcagccggatgttaaagaagcaggataccatgcttgaaaagctggtagttgacagtattcgggaatatcagaaggtgcgggacagcatcggagagcagcagataccacaggctacagccgacagcatttcaaccgtaagcgtaccggatatttattcggaagatgcttatgctccggatatctcatttgagccatacaaagatatgcgcttcacgctgacctttgacagcactgaggagatcccggttggagcagatatgtatgttacgaacataatatttgaattgcaataa

SEQ ID NO: 52101 - DNA, 726 bp, Clostridium sp. CAG:264
atggacagcagaaatttggataaggcgattgagatctacgccagactgatacagggcgaaacgatcgcgaaagcaagcagagaaaacagtgctctgtacgaagattattatggaaatgcagaggtctacgagattgtaggcaatctgttaaagaaactgaatctgagtatttacgaatacaacgaagcactttatatcactccgggtgaaggcaaccgggtatttggttatacaaatgacgatatgaagcgcatacttggactgcggctgaataaagaattgttcctgtgctatttcctcatgtatgtgatcctgctgtatttttataaagattccggaagctatcagttccgtgaatttatcaagccggaaaaggtgatcgaagaggcggacaaatatctggcagatgtaacgaaacggttgtctgtattttcagcagaggatgtcggggcagagagctttaaagcggttgggctgctgtgggatgagcttccggcagtcagtcatgcagtctatgacggagaaaagacgaaggcgtcaaaggcatccaaatccggttatgtgaagctgacatttaactttatggtcagccagaaattatttgtcgagaacgaagaacgctactatccgaccgatcggttcaaggcgttatgtgagaattattttgaagaatacaggggacgtctgtatcagctgcttggaggtgaagaggatgccgtgcattaa

SEQ ID NO: 52102 - DNA, 4479 bp, Clostridium sp. CAG:264
atgccgtgcattaaccgaatacgagtaaataatgtaaaatacaactttggtacacagcagtacgatgatttttcgatgcgtatgtatggcaagaacacgctttatgaccttgcaaacggtggaggaaagagtgtgctgatgcttcttctgcttcagaatctgataccgaattgtacgttagatgataagcagccaatcgagaaattattccggaatggtggcggcaatacgactattcattccctgatcgaatggaaattagacgacgcggatatcaaggatggataccgctacatgacgaccggcttctgtgccaggaaagcaaaggaatccgacgaaggagcatcgcaggacggacagacggcggcaatcgagtatttcaattactgcattttctatcgggattataataagaacgatatcattaatcttccattgtcaaatggtaatgaaagaattacatacagtggtctaaaatcctacattaaggagcttggacataaggatatgagccttgaagtgcgcttatttgagcggaaaggggagtaccagcggttcatcagcgaatatggtctgcatgagagccactgggagatcatccgtggaatcaataagacagagggtcatgtccgtacttattttgagacgaattataagacgaccagaaaagtagtagaagatctgctgatcgaggagatcatagagaaagcatttctgacccgtaccggtagggatggggatgagagcacgatggcagaaacgctgcttgatattaaggataaattgaacgtgctggcacagaagaaacgggatattgcgaacttcgatcatcagatcgagctgatcaatgtcttgcaggcaaaggtcaattcctgtattaaccagtacgaggcacacgaagatatcacaaggcagcttgcggatatctatgtgacgggaaaagaactgacatcgagagaaaatgaacatctggaagaattgcttgtggcaaaacagactgcatttgaacagaaggaaagccagaagaagcggttggagaatctgaagatcaccagagatggtttccgtctgcaggagctcagggataagtcagaacagttaaatgcaaatcttgctgaaaatgaacgacaggtatcggcattaaagcaggatatgaatatgaaagaaagtatcaatgattatctgggttatctggaagacagaaaacagttatccgagaatcagaagatcatcgatcatatcttacagaataccggggcagaccgtgagaaaatgacggcctatgcctataacagaaagcttcgggatgatgcgcgtttgaaagagcttcttctggcaaaggaagaggtcgaacagtcgcatgagtatgcagtgaaagaggctgattactgcatgaaatgtatcaaagagggcgagatcgagctggctgtatccggggataatcggaaagcggcttcggacaaattacagtccttaaataacaagatatccgaactgacctcacaggttgccctgcttgttgtgtcggatgcggcaaacgtgatcgaagcatccgaagaaaaggcagcagaatttgaggcatccttacaggcacttgcagagagcatacgggaagatcaggagcaggtatttgaagaccgttaccggttgtcacttgcggaaaacagtctggaaacactggaaaaagaatatgagacaagccatctggatgcagaggaatatcgtcaggcagctaagaagttagaaagcattatggcggtatatagtgtagagaaagcagaagaaatcatagatgcgatcaatgcaaggatcacaggaacgctgaccgagacgatcaccagaaaacaggagattgaccgtttgctcgaaagacgcaaatatctggaatccggacgtttattcggaccgagtgcaggagcatcggcagttattgattatatcgtgaccagacatggacatatggcgatgcacggagctgattatctggcagcacttaagtcggagcagcggtcggagatcttgaagaaaaacagagcacttccgtatggagtagttgtgaagaattttgctgatattgcagaggatatcaatctggattcgattcagacagacaatgaaatggttttgatctacgatatggatgacctgtctgaaaaggcagttaccttaaacgaaaatgccgttatggtctgcagaaaaggcgaatatttcacagacgatgagattctgaaatcgttaaaagaagaactgacgatccagattcgtggccttgaggatgagatatccctgattgatgagaagcttgcaacctaccaggaagatctggcatttgtcagtcatctggcagatgagaggcacctggatgcggcagatatcgagcgaaagttgaatcaggatctgttaaataaaaaggatgaggtccgtgagcttcaggatcgtataacagaacggacaagccggatcacccagcagaaagaagatgaggcatccgtaaaagaaaagctgcatgagctggaggaagacaaatcaatcctgcttcgtattaaggagctttctgatctggcagttgaggaagaatcccgttatacggagaatgttcagaaagaacagcggatcaccggacagatcgagaaactgaagcgggatgcagtcagatggaatacaactgtgagcgagacggaggcacggatgcttgcgattgcaaacagtattcaggatatacaggataaatggcagaattattttaaaccttattacccggaggatggaaaagtagatgtgtcactggatccaaagcagaagattcaggtggcacttggacaggaaacggaagatgtatccagacgggatatcgagatccttacgatctctgatgaagtgctggagacagaatttatggcgatgtatgcagtagcaaataaaaatgcaccggatgtagaggataagaagaagttggttcaggcattgtcacagtcaatggatcgtatcctgcatacgatcgagaagcgtggcgtgaaactctcggatctggaagcacagacacagttatttgccacatctgaacagcagttacaggcactttctaatgaattgatgcgtctggaactggtatcagcatccatggcggaagaactgaagaatgtatcaaaggcttccggcagattggaaggaaatatcgaatatgcggttgccagtctgaaaaagacttatggtgaagatgcatatgcagaagaacagatttctctaagtgaagcagagcaggcgatcgcacagggcgatcagatccttgccgagctggaacagagttataagaagacagcagaggaatatgagacctgtaacaaagagcagggctatatgatcgagctttataaagatgtaaaacgtatcgtagatacaaatgacatcaatgtagaaaatggtaagctgttagaagccggaaaagaggagctgcgacaggcatttgagaccagtttgttacgatatgacagaagccgcaagaatttggaaaagacaagaaatgaactgatgcggttcaagggacagacagcggaagcactcagtgaaatgggtgtattcgagatggcagaaacgatccgcagagatgtcatcatacctgaaaactactacgatgcaaaggcgttacttgaaagcctgttacagatcatttcctatatcgatctggaaaaggaaagagtggaaaagggaatcgaagatatggttgcgatcaaggagaatttttgcagtcagtgtttacagcgttgtatggatgtaaagaccgagcttgagaagcttccaaaattatcgaagatcaccgttggagaagaagtcatccgtatggttgatctgacgatcccatatgtgaaagaagaattccttgcacagcgcatgtctgattatattgacgatatcgtaaagggcgcagatgcctatgaggatgagaggaagcgtgtccgttatatccgtgactgtcttgcattgaagcggttatttggcgtaatggtcacagacatgaatgcgatcaagctgaaactatataagagagagcgtatcaaggagcagagccggtatcttcgttatgaagaagcggttggtagtaccggacagtcacagggtatctacattcagttcctggttgcgatcatcaattatattgcaggtatgtattcttatggtgcggagggtgagatctctacaaagacaatctttattgataacccatttggcgcggcaaaggatgtatatatctgggagccgatctttgccatgcttgcagctaatcatgtgcagttgatcgttcctgcccgtggcgcaactccggcgatcaccggaaaatttgatgtgaactacgttcttggtcagcagatggtcggtaaccgccagcagacggttgttgtcgattacaccagcaagacctcgcaggaggaactggaatatcaggacatcacctaccagcaggcaaccttcgactttatataa

SEQ ID NO: 52103 - DNA, 1623 bp, Firmicutes bacterium CAG:646
atgcaatacgattttttgaagaatttccctaaaaggatgaaaaatgtggggctgtattctttgttggttcagaatagtttccagaaaaccacatggaaacagtatggatttatcaagagtcatgagcagattaatatgatttttgcagtgcttttgtatattatggaacaatcgttgaaagaagaaaattgtacgctggatgatattggagcttacatagatacgctgaatatgcagtatttgagaaagaatatttcctatgaagaatgtaaagagctgggggattttattgtaaatacgatattgtgcaatgagggacgtcccatgtattttgaagggtttgattttgagcagggagcctatcagaggatgaatgtaagctatgtggccaatcgggtggtctatattgacggagagatcaagcgcacgtcttattatctcacggatgacggctacagtcttttgctgtccacgttggaagtggagagtaatatgaaattgaccattcatgaaatgatctttcagatgcatctggaaaagcagagttatgataaagccgtggacgagataaaaaatgtatttaatctgctgcggattcagcttcagaagattcaggaagccatgagcaggataaggagaaatgccctgaattattcggtaaaggattacgaggaaatcctggtggagaatctgaataccatcagcgacacgaaagagaagtttcagaattacagggaaatggtgaaaaaacgcgtccatgagctggaagaagagaatatcaatgtgcagaaactgagcagaaaagatgaggaaaatctgaaccatctccggattattgaaacgtatctgaaccggacgattgatgagcatcagaagatcctgaaccaccattttgatctgaaagctttgtatacccatgaactggaacagctttcccagatggctctgattcagagatttcagttgcgcactgatttttatgaaaaggttctggaaaatccgggagctttggaacagatggattatttctttcgaccactgttcaatcaggatggagaaaaaatatacaatctgaataaggcattccagtaccagaaaatggcgcagcgaaagcaggaagaggatgaaacggaagagctggattttgatgaagaaacctggcagagagagcaggaagagagaaaacgggagaaactgaaaaagtatgaaggaagtctcagctgtattctgaaatgggcaggagaaaagggagaagtttcactgggagaaatgaaagaaatttttgacgccggggaagaggaggaaaaactaaaattcatccctacggtagaaattttcaaggaaatcatggtggaattgatgaaaacccggaggatcgatcttccggcgcttcgggaagagcgaaagcaatttattcaggaagaatctctggaatttcggctgggagatatggttttgaaactggcggatgagattccggaaaatttcggaatagagcatattgagacgtatcggctggagagagaagaaccggtagtttttgagggagtattcagtgaagacggaagtgtgaagagtatccggtgttcggatgttttgatacgggtgagaaaaaaggtatag

SEQ ID NO: 52104 - DNA, 711 bp, Firmicutes bacterium CAG:646
atggcatatgagatagaacagatcagaaccagtcaggagattttttattatctgctggagcatcatgaattgcgggaggaagaggaaaatactctatatcaatcgtatatacaggaggaggagattcagaatctggtaaaatctcagggtgagatcgcagactgtaatattgaacggtatggaaatgtgatttatctgattccccgggaagagaataattttctgggattttccaaggcgcagctgaaaagtgtcttatgtaagtctacaggaacggataaagattactatttgtctcagtttgtgattctgaccttgctggtggagttttttgacggacagggcagcagcagtaaaacccgggaatatatgcgtgtgggagaattgcagaactgtatttcggagagactgaaggaaggtgtggagcggacagcaggaaaagaggactgtcccattgcattttctcagatgttggaggcttatgaagcgttgaaatccgatgagagaggttccagaaagaaaacgacaaaagagggatttctgcataatattcttttgtttttacaggaacaggggctgatcgaatatgtggaacaggatgagatgatcaaaaccacgggtaaactggatcattttatggactggaatctcctgaatcagaataattatcagcgagttatgaaagtattgggggtaacggaagatgagtaa

SEQ ID NO: 52105 - DNA, 4401 bp, Firmicutes bacterium CAG:646
atgagtaagatcaacgcagttcggtttatcaatctgaattacaataacagcgccatccgtatcagtgacgagacgctttttatgaatggggaaagtacgttgctgtctcttagaaatggaggggggaaatttgttttggtacagatgatgacagcccccttcgtacataaacggtacagagatgccaaggatcgccctttttacagctattttaccaccaataagccttcgtttattctggtggaatgggcgctggagcagggggcaggatacgtgctcacgggaatgatggtaaggaagaatcaggatgtggaggacgtttccggagaagctctggagatgatcaattttatcagcgagtacagccagccctgtctgcaggatattcatcatttgccggtagtggaaaaagggaaaaaggagatgatcctgaagaatttttccgcctgcagacaactgtttgaatcctataaacaggatcgttccataggatttttttattatgatatgaataattccgcccagtcccggcaatattttgaaaagctggcggagtatcagatccactataaagaatgggaaaatatcataaaaaaagtgaatctgaaggagtcagggctttcagatctgtttgctgattgccgggatgaaaaaggtctggtggaaaaatggtttctggatgcggtggagagtaaattgaaccgtgggaaaaaccggatgcaggaatttcagagtattctggaaaaatacgtggggcagtataaagacaaccagtctaagatgaaacggcgggacgccattgaaaaattcaaggaagaatctgtaaaaattcaggaaatcggtgaagaatatgaaggagcagcaaaaggagaacgaaaacaggaaaatctgatcattcattttatgcaggaactggagcgcttattaaaagagacggaagaagaggactctcaggttcaaagagagatagaggaactggaaagtttcattgcccgacttatctatgagcagttatccggggaaatctatgggatggaagaccagaaatattttcatatgagtaacaaagaaatgatttccatggaacaggaggctttggaaagggaagcggaacagatacagagaaagctgtatcttctggtgtgcgcaaagctgcaggagactgtggatcgggatcagaaagatttggaagtactccaacaaaaactggtggcagcccggcagagtgaggaagaactggaaccggagaggcaggaattgggcggtatcctgaaacggtattatgaaagtaaagttttggaaaatcagacggcgcagaaggaaaatcagacatctatagaacagaaacgggaagaaaatacggcagaaaaagaaaagttgtacaggatcggagaagatatgctgcaggcagcccggcaggttacagccagcgagacgagggcgagaaattatgaccgtctggaacatatttataatgagcggtatcaaacatccctgcgaaggaatattctgggagaatatgaaccgggaacattggaaatcttagaggaagaatttcagagggaactggagcaaaaggttagggaaagaacggaaaaaaagagaacctttgaaaaaaataaggaaagactgagagaacaggaacgctgtctggaggatataagagcagaagaaatacataaaaaagaagagatttctcaacaggaaaaaagaagagagcgttatcaacaggaactggaaatcagaaaaaatatcctgcgttatcttgatctggaagaaaaagaacttttttccgaagaaaaaatatttggcgcttttgaccggaaattgaaagaactggatggtatcaggaaaaatctggagaaagaagagtatgaactggagcaggaatatacgagactgacccagggaaaagtgttggaactgccggaagaatttgaaacgattcttcaggaattgggaatccatgcggtatatggtatggaatggctgaaaagaaacagtctgagtcccgaagaaaaggaagatttggtgcgaagacatccgtttttgccctatggtcttttgttatccagacaggaattgaataagcttgcggattatggaaaagaaatttatacttctttccctattcctcttctggtgcgggaggaattggaaaaggcgcagcaggacagagaaaatggaatcgtacagatggacgggatccgtttttatgtgctgttcaatgaaaatctgctggatgaggaaaaactggcaatacttgttcaggaaaaagaaacccatctttgcaaagtgcgggagggaatccagatacgaaaacaggagtaccgggagtattttgagcgtcaggaattggttcgccatcaggaagtaaatcaggagatatttcagaaaaatcagggagaaatccgggaacttcaggagcagctgaaacaactgggagaacgtattcaggaagaaacaagaaggcagcgggaagggaaagaagaactgcagtctctggaagaagaaattcggaaagaagaggaaaacgttcgggaatttcagcggagacaggaggattttactcaactgcgccgggattatgcagaatatgagaataatctgagagaacgggagcagtgggagagaaaacgggaacggcttcaggaacagaaaaagatatctgagagtctctatgaaaaacagcaggaaaaaattcgtgagctggaatgggagagcgatcagcttctccgggaacaggatgatctgcagaaggaactggagaaatattccagttatgaatcgggaaaatttacgcaggaagaacaggaaatccggcggatggaaagtcggtacaaagccattacatctgcgatgtcttctcagattcaggatttggaggagcaggaacagaaggcagccagccgctggcgtcattcccgagaagaactggacagacagagtgagaaatatcagctttctcatgaggagtggcgagagactgcttatgatcggcgggcggaaacccatcaggaaatccagttggaagacagaaaacagaaaatagagagaaaaaaatgggaatggaacgaggaagataagaaagaggctgtacttattcagcagatccgggaacggatggaacggctaaaaaaggaatgcggacaggaaaatcccatggaacgcagtaagatccagagtgaagactttgaggcgagaaaaaatcagctgacgtatcagaaaaaggaaaaagaaaaacagagtggaaaattgcagaagagaatgagaatttataatgaaaatctgacggctctttcggagtatcaggattttaagatacaggaaccgatacagtgggaagaagatttttccggtatggatgaaaaacagctgagaaatttcaaagggattctggtgagagattataatcagacgataaaagaaaagcaggagagaagagaacaattatccagaacgctgcatcagatcacgagaatggaaatctttcaggaagatttttatcggaaaccgctggaagccatgctggaattggtgggggatgcttcccgggtattgtctcagctgcataccaccctccagtcttatgaaagcctcatggaaaagctgaaaacggatatttctctagtagaaaaagaaaaagaacgaattgtagagctgctggaggattatgtacatcaggtacatcaggaaatgggaaaaattgatcaaaattctacgatcaccattcgggaacgtccggtgaaaatgttaaaaatacagataccgggctgggaagaaaatgaaaatctctaccatctgcgtcttcaggattttatcgacgaagtgacaaagaaaggtcttcagatttttgaaaaaaatgagaatgccagagaatatctgggaaccagaatgactacaaagaacctgtatgatacggtgattggaatcggaaatatacagatccgtctgtttaaaatcgaggaacagagggagtatccgatcacctgggcggaagtggcaagaaattccggaggagaaggatttttatccgctttcgtgattttatccagtctgctttgttatatgcgaaaagatgaatctgatatatttgcagagaaaaatgagggaaaagttcttttgatggacaatccctttgctcagacaaatgcttctcatctcttaaaaccattgatggatatggcaaagaaaaccaatacccagttaatctgtcttacgggtctgggcggggaatccatttacaatcggtttgataacatttatgtgctgaatctgatcgccgccagcctgagaaatggtatgcagtatctgaaggcggatcataaacggggaggtgaaccggagatcatgatttcctccagagtacaggtggtggagcagatggagttgttgttttag

SEQ ID NO: 52106 - DNA, 1041 bp, Firmicutes bacterium CAG:646
atgaaaagaatctctttaacacaattactggcatctcacagaaatgtttcctaccaacagcaatatgattatattttaagtctgattcaatccggcaggatcaaaccggtctcggcttctccaatcaatgggaaaagtccggctctgcatcaggagtattggctcctggagaaggaaaaagatcagacttttttattggaggaattgcagtatgatcttcatccggcgatttctataggatattatcagaaacatctggagcaatatgaacgggatcgcgaatgggttttgctgctgaatgaatatctgaaaacaaaaagggagaatctacattggcagatatcgcaaaatgagcgaagctttgagatatggaacagggaaaaatttttgctgaaggaagaaggaaagaaggttttaaaacggtgcgggctggatgtggaaaaattgaatttttatcagacagcggaaccgttggcttattattctcatacaagaaaaacgcctcagaatatgctgattttagaaaataaagatacgttttacagtatgcgccgccatttgctggaggggaagaagagtattctgggagttactataggaacattgatttatggcgccgggaaagggatttttaagtcttttcaggattttgaattttgtgtggaaccttatatgaaggaaaagaagaatcagattttctactttggcgatctggattacgagggaattggaatttacgagagactggttggggtgtatggacaggcatggaaaattcatccttttaccccgggctatttgtctatgttaaaaaaggcagaaatcgtcaggaaacttccggaaagcagcaatcagcaaaataagcatttgaacggcagttttttcgcatattttgaagaggatgaaaacaggaagatgcaggatattttggaacagggaaaatatattcctcaggagattttaaatattatggatttccgggaggatgacgagaagaaacttgataagaggaaggaagaagaatgcaatacgattttttga

SEQ ID NO: 52107 - DNA, 1485 bp, Butyrivibrio crossotus CAG:259
atgctcaacctgaaaaaatattatccattttttgaactggcaaagacctctttttcatggtttatggaaggacggtatgaggacaggctggatatgggttatattattatggctgtgctacgcttttttattgaagaaaataattttaaagaacgtgaagttacataccctgaatatgcggcttttatgaaatcctgtattttaagggattttggaatagtggcaggggacagggaatataaggaacttacggactttgtttttgataaattgaagaatgacggcagacctttttcatttgtttactatgacccggtggacagaattaaaaagacttccagggtcaggctgcttgaaagcagaatagaagacggagttgtatggtattccataagtccggagggaatagaattttatcttgataccaaggaaataagggacgaaagccgtataagcgtggagcagcttctcctggaaaagatgattaagtctaaagattttaagggtggaactgaagtcgtaagaagaattaacgaagaagtaaagcggttgagaataaagaaaaatcaggttatggaacttctcacaactgatatttttgcgggacttgacagttataaggagttttttaatacgggaataaagtggtttgatgaagaacagaagctctttgttaaaaataaggaacttattgaaacagcactaaagagaacagaaaacgatattaacccggtacagggtgaaagtttcagaacgggaagggaaatccacaggctggatacggaacttaaggttgccatgaacaatcacagcgagcttttaaaagcctgtacggagcttggcattaaagcagatgaaataatcaaaagaggcaaacttacaaggttaaggacacgttttgacttcaaaggaattatgaaccggattataaaagaaaacagaacggatatattagagtacattgcggcacctttttttatgcttaatatcaaaaagacttttgatgtgggtaaagtggaggatttgttaagctatagacctgaaaatgaagaaaaaccggagaaaaaggttgaattgactgaaaaagatatcgtttttgaagacgaacttgacgagagaagatttaacagaaataccaggactttatttttgattcttttaagattgttaaaagaaaaaaagacgattatgtttaccgaatacaatgagcaggtcagaaatattttgtccgacaaagtgcttgaaaacggggattactatacgtttctaattcatctttgcgagaaaaaagaatatgtgctggaacagggcgaagcatcggaggacacatttcttgatgcgatgattaaagaatatatgaatgaaccggaattttcggaatttataggaatgcatttttatctggaacttgcaggcggagaggaagaagagatagagacttcccatattgcaaacgttaccaatttcagaattatattagtataa

SEQ ID NO: 52108 - DNA, 717 bp, Butyrivibrio crossotus CAG:259
atggaaaacagaaacttaaacaaggcacttgatatagtgtcaaaattaatcacaggtgaggaagtgggaagaaaatcaaataccatgctttacgaagaatactgcaacaattctgaggtgtacgatatcattaccgaaacctgcaagtcgcttaatcttaatctctatgagtataatgatacactcttcataagtgcaggcgtgaaaaaccgtgtgttcggatattccaacgaggaactgaaaaggcttatgggattaagggttaataaagagctttttatggtttattttattatatataatattatcactgagttttacaaggattcttcaagtgcaacatatcttgaatacataaggatagaagatgttattaaatcggtggacgcttcgcttcacggaattattaaccacgacatcggcgttacacaggatgaggaggaaaaagattctttcaaagcccttgcccttttatgggatgagcttccgattgtgagcattgaagacaaaggcagcgtgagggcagccagaaattcaaggacagggtatgtgaaactgacatttaattttttgacggcacaggcactttttgttgaaaccaatgaaaaatactatcctacagacaggtttaaagcaatggcagaaaaatattttgaagaaaataaaggacgtttatatgaaattttaaacagggaggacgaaaatgccacagattaa

SEQ ID NO: 52109 - DNA, 4395 bp, Butyrivibrio crossotus CAG:259
atgccacagattaacagaatcagagtaaacaatgtaaaatataatttcggcacacagtattatgatgatttttttatgagattttcatgcaggaatactatttatgaccttgcaaacggcggcggtaaaagtgtattaatgcttctgcttttacagaatatgattcctaactgtacccttgacgataaacagccgatagagaagcttttcagaccgggctgtgataacactacgatacattcgctcatagaatggaaactggatgcaggttgtgttaaaaatggaatgaaatatatgactacgggattctgtgcaagaaaggcaaaggagaattcggacaatgccgaaaggaagaacgaaactgccaatatcgaatattttaactactgtattttttataaagaattcggagataacgatataaaaaatctcccacttagtaaaggtaatgaacgcattacctacaacggtcttaaatcatacttaagggatttggagaaaaaagattatggcatcgaagtaaggatttttgaaagaaagggagattatcagaattttataagtgagtacgggcttcatgaaagccagtgggaaatcatccgcgggattaacaagaccgaaggccatgtgcgtacatattttgagactaattataagacaaccagaaaagttatagaggaccttttgatagagggaattatagaaaagtcatataataacagaattcgtaaaggtaatgaagacgattcccagatggcaaagacactttttgacatgaaagaaaaactgacggagctgtcaaaacgcaaaacagacatagataaatatgacgagcagataagacttattaatgtatttaccgataagatgggagaatataaaaaaatatttgaggagaagaaaaaaacagagaatgagcttatacgatgcctttgcgtatgcaggatgagacttgcgggagaaagggcaaagatagaagaactttgtaacagaaaagaagagcttgcagcacatattaacgaaatcaaaagacgtacagccattgcggaaatcgagactgagacggttgagcttgaacagttagagaagctgattgccgaaacggcagcagagaaagagacgcttttatcttcttatgacaggcttaaagagaatcttagatatgtaaaagcagcttcggattattttgattacgttgaaaacaaggcaagatacgatgaacttaaagagctgatatccaacagcacatggaaccgggaagatgttttaaaagagttatcagaacttgcagcgtttaagaagacaattgttgacagaaaaacaacggaattggaagcacggattgacgaaatcaaaactttaacagagaaggtatgcacagagcgggatgaggcagccgataaaaagcttaatgtttatggtgaaatcaacaaaaatcaggggcagttaaaacagcttaaaaatgaaattgaagaactgaataaaaacactgatgagcttatgctaagatgtaatcttacatccaatgccggcattgaagatataatttccaaagcggaagatatgcttaaatcatctgacaaggctttatccggttacacctcccatatttcggaggaagaaaataatatttctgatttaaacagggaatatcttaagacagaaacagaaatatcatttataaaaaatgacgaagaaagggctgcaatactgtatgaaaaagaacagcagcttctaaaagatttaaaccagattaaaaatgtatacggtgagaatgatattgggcagcttattgaaaaaatagaaaaggtgttagccgagattaccgaaaatatcgttgaagtaaaaggcagaattaagtatcttggcaattacgaaaaagcaataagtgagaataaacttccggaatatgacagatgttatgaagaagtcctttcatatctgaaaagcagatacgatgacgtgaaaagcggcgccgagtatattgcactaatggatgaaaatgaacgcagtgattatattgcggaaaatccgatgctgccttatatgatttttgccggggacagttatgaagaaataaaacatgacgaaatgctttattcccttaacacaggctcttatattattcctattataaaaaaagataatattttaagaatctgtaaagaaaacatggtaggtgcgtgtcatgatttatcatttatatttaacgaaacaggcactaattccgagcttataaaaataagtgaagatattgacaaagaaaaggacacgcttgcaggattaaatgataaatataatgttataagcaaagatttgtatttttgccaatatgcagaaaataaacttaatgacagctcctcttacggagtgccggaggacttaaaagaagaaaaagagagacttatatcatatcttggcaggattagtgacgatatggaaatgtcaaaaaagcgtcttgaaagttaccggacttctttggaaagagagcaggcacataatggtgaaacagcagacaatcttttgctgtataaaaaaataaaagagaataccgacagactggcttccttatatgatgaaacaagaacttgtgaaaaacttacaggcgggcttacaaaggaacacgcagaactgtcaagaaaagtcaggtcatttgatgtcctgcttacggaaaaagaaaatataagaaaaagttttgaagaggaagccgcttcaatcaacaaggaatataaggaaaagttcgagtcttatttcaacggagaagcaaaagaaccggatattgaagaagatgaaatcaataccagggcaggggctttgagaaaaatcatatctgatgaaataggagaacttgctgataaagaaaaacagcttgcacattatgatgcccttattaagaaaaatattgataatcttaaatattatggttttaccttagatgaggcaaaaaaagcaaaagacgaaggccttttttcaaaggcatctgttgatgaaaggttagtaatcaagaatcagcttgataaaattaaatctgaaattgacaaaaccgacggaataattaattccgaacaggcacagaagaaccgtattgaaggaagtatatggcacggaaagaaactatatgaagaacaatacggtgaatttatcaggaaaaaatttaatgaccctcaggcgtatattgttaccggacgtcaggaaatatcttctattacatcgggaatacagaatattgagaaagaattgaaaaatattgatgagaataacagggatcttattgtaatggagagagacatcgggagaatattccggaccatgggaatttatataccggaggatggactgacggatgaaaatattgctgtggatgacgatatcactgagaattatgaagaaattgaaaagaattatgacaggttaaaacgtgatgaacagcgtaagaaaactgcttttcttaatgataaacaaaagttatccgatgatttgtacggactggaggcttatgaccttgcggcggaaatcaaactgagtcttaatgcaccggaaaccgcagaagatgtggaagatatggtaaatggtcttagggaaacttcggattatattgcacttgaaagggacaatgtggagcagggcataagagacttacagcagattgcagataattttgaagaacgttgtatccagatttgcagcaatatccgtacagagttagaacgattgccaaagctctcaaagataaatcttgacggagaatccgttcctgtaattacgttacagattccttatataaaagaggagttttataaggaaaaaatgacaacatacataaacgatacaatagcaagagctgatatttttgatacacaggacgataaattaaaatatatcaaaaaccagttatcgtggaaaaaattgttttcagtaattgtaagcgatatgaatagtataagattatgcctgtataaaagggaacatatcaaggacaggagcagatacttaaaatacgaggaagctgtgggaagtacaggccagtcacaaggaatttatatccagtttttaatttcggttattcactatatatccagcataaattcgtcctatgatatgggaatttcaggaaatacaatttttattgataatccgtttggtgcggcaaaagatatatacatctgggaaccgatttttaaactgctcaaaaccaatcatgtgcagcttatcgttccggcaagaggagcgacacctgcaattacgaggatgtttgatgtgaattatatactgggccagaaaatggccggtgacagacagcagacagttgtggtggattacagaagtcaggtaaatacagaggattctgattacaatgtaacggagttcacacaaaccactttaaaacttgattga

SEQ ID NO: 52110 - DNA, 1575 bp, Clostridium sp. CAG:127
atggctttaaaacacgtaatgatcaacgatataattgcagaacatagtgcgcggatgcagaatctgaaaaagtactatccgtttttcgtgttgaatgagacgacttttacacagtacaaggaaggtaagtatgcgtttttagatatgggatatatcacgatggcgtccttgcggtttttcatcaatgaaaacaatttccacgaaaaggacgtcacgtatgaagaatatgaggatttcctgcgggaacttctgacgcgggatttcaagctggaagaggaactggtagagctgcgcgaactgatctcctatatttttgataagattaaaaatgacgggcgggcgtttgagtttcatttctatgatccggaagtgcgggaaaacaaggtcgcacgcgtgaagctgattgacagtcatatcgcgcaggggacggtttattatacgattacgccagagggcattgagttctatctggatacgaaggaaatcaaagacgagagcaagatcaatgtatcccagttgttgcttgagaagatgatcaatgcgaacaacttcaagggcggtatcgatgtggttcgtcggatcaacagtcaggtgatctcgctgattgagcagaaggagcaggtcgtaaagctgcttggagtggatgtgttcgagggtgcaaaggcgtatgaacatttcatggacacgacggcaaagtggtttaccgaagagcagaaattatttgtgaagaacaaggcgctggtcgataaggcgattgaaaaggcagagtttgaacgcgataccgatggaggttcaccgaccctgcattcgaaggcactctcggagatcagccagttggagacagagttaaagaaaacaatctacaatcatagccgcctgatcggtgagacaaccgagctgtcacagttgtccgatcagatcatcaaccgggcgaaattacggaaattaagaccagtctttgattttaagcaggcgttaaatacgatcatgaagctggatcagccggatctgctggcacatgtgctggaaccgctgtttgcgccgcggatggataagtatttcacgatgcggaacatcgacaatatcctgacgcttcgaagtgatgagaagcaggagacagagaagattgaaaagcgggaactgacaccagatttcaagtatgaggacgagattctggaggagaagatcggacgaaacttcgcccacctgttctacgagctctgcgatcagttgaagaagtggaatcgtgttaccttgaaggaatacaatggaatccttgaaataaaatttggcgaggaaatctatacaaaccgcgattactatgcgttcctagtacatttatccgggaagcggtcgtatcgggttgatgaaatgctcgagaagcaggaaacgatgttagaagagatggtcgtcgaacatctgacagaggaagaaaaggaacgcattcgagatattcgattcacaatcacatttggaacggatgaggtagagatcaaaccacagatgcaggatatagaagccgtcgagccgtttgtggtaacggatatgaattttgaaagggaggcagccgagtaa

SEQ ID NO: 52111 - DNA, 714 bp, Clostridium sp. CAG:127
atggaacagcgaaatctggaaaaagcattggatgtatatgccgcgttgattaccgggcaggaaatctccagaagcaatccggacacacgggatctgtatgaagaattttatgcaaatgctgctgtgtacgacattgtaaccaagatgatgaaaaaactgaatttgaatttatatgaatatcaggatgcggtctatctgactgccggtgagggaaaccgcgtgtttggatatacaaacgatgatatgaagcgtctgcttgggctacggttaaaccgggagctgtatatggtatattttatcatgtacaatttcctgttactgttctatcaggattccgcatcgtatcaggtgaaggaatatgtgcggctcgaagatattttagagcaggtaacaacgtatcttgcgtcaattacaaaggatctgtctgtgtattccatgagtgatgtggaagcggacagtttcaagtcactggcgcttttgtgggatgagcttccacttgtgacttccgatgagaaggacaagaaccgtgccagccgtgcgtcccgtaccggatatgtgaaactgacgtttaatttcttacaggaacagaaattatttatcgcggtggaagaccgctattatccaactgaccgtttccatgcgatcgtggagaactatttcgaggagtacaaaggaaaaatttacaaagtactgggaggagagacaaatgcctag

SEQ ID NO: 52112 - DNA, 4401 bp, Clostridium sp. CAG:127
atgcctagtatcaaccgtattcgtgtcaacaatgtaaaatataattttggaacgcagtactacgatgattttaccatgcggatgtatggaaagaacactttgtacgatctggcaaatggtggtggaaagagtgtgctgatgctgcttttgatgcagaacatgattccaaactgtacactcgatgagaaacagccgattgaaaagctgtttcgtaccggaaatggaaatacaaccatccattctctcgtcgaatggaagttggatgagcaggatcgcaaggaaggctatcgctatatgacgacgggattctgcgcgcgcaaagcgaaggatgtcgagggcgagacggcgaagaaggatgtggcagcgattgagtatttcaattactgtattttctaccgggagtacaataaaaatgatattatcaatctgccgttgtcgaaggacaaagagcgcatcacgtttcagggattgcggaattatctgaaagagttagaacatcgtgatatgtcactgaaggtctgcatctttgaccggaagggtgaataccagcggtttatcagcggatatggtctgcatgagagccagtgggagatcatccgaggaatcaataagaccgaggggcatgtgcgtacctacttcgagacgaattataagacgacgcgaaaggtcgtggaggatctgctgatcgagggcatcatcgagaaagcgtatgcagtaaagacgatgcgtgacggcgaggattctgacacaatggcgaagatgctcatggatatcaaggagcaacttacgatccttgctaagaagaaaaaggatattacaagctatgaccatcaggcggagctgatcgaggtgttgcgggataaagtcgcgtcatttatgagtctgtatcaggagcagacgaatatggagaagcttctggcggatatctgcgtgactggagaagagtttgtaaaaaatgatgccgagacgctggaaaagctggagcagacgcgcaatgagaagcgtgcggcaaaggacgaccagagaaaacggatggaatgcctgaaggttgcacgggataaacgacatctcgaacagctttacggacagattaaacaggcggaaaaacagcttgaactggaacagagccgtctggagactgagcaggcggagttcgcaaaaaaagagagtattaacgagtatctcgaatatgtggatgaccgcaggaaaaaggatgaactggaggcgtgggtaaaggcgcagatgaatgcgtcagcctttgatgagacacagttatatacctatgcctataatataaagatgcgcatggatgtgcagatgacgaacctgcgcaaccagattgcagccgatacggaagaattaaagcgtgaggtcgcaaagcagaaatataatgagaagatgcttgctgagatgcaggtgcagcaggcagtgtatgagcatagcaagcaggaggctgagacgcagatccggcagttatccgaacagctttccgcaatccgtatggagatgaatgagatccggtttacgaaagtggatgagcagcttgcagagtccaaagagttactggcatctttgcaggaacagcagacacaggaggaagcgcttgtcgcagattgcaggaaaaaggaagaagcgcagaaggaacggctgatgcagcttcgtctgcaacaggcagaaaatgagaagcagcttgcggagcttctgacgaaggaacaggcatttgaggaagcggcagaaaaactgcataagatacagacaatttacggggcatccgagatggaagcactgtcggatgtgctggcagatcgtatccgtgatgcggtgctcaagatagaggcactgaaaaagcagggggtggaatgcgccaagaatgcggagcgactggcggagggcagattgatcggagtatccgaggctgccaagaaggtattggattatattgagacacggcatggaagtgcagctatgtacggaatggattatgtatcggctctgccggcggacaagcaggcggcggtactttcagcaaatccacagcttgtttatgggattgtggcagaggactacgataccctggcagaagatccgaatatccgcacaattgatacaggcgaagttccagtctatatttatgaccgtgaccggatggaagagatggcgatgcatctcggagacaatgtgtttgcggtgtcggcaacaccggagtatctgctggatgccgagacgatcagcacactggtcgcaaaggagcggcagcgggaaacagagattggcgatcagcttgccatgcaggaggagatgctttctgcataccgggaggatcaggcatttttaatccgtctgtctgaccgggatctgttggaggcaggaaaacgtctggcagatgcaagaaagacggcgacggaattagagacgcagcttaccgcatgcatggatgagctcgaaatgatccgcaagaagattgcggcatcgaaagaaaaacaggaaaattgtaagcaggaatacgaagcatgcatacaggatgtgaaccggttatataccgtggagcagttaacctctgtgattgctacacaggaacagcggcaggcagaggcagaaaaggcactggagcgtctggaagaacagaaagcatcgttcgtggcacagggcggagacagccggcttgatacagagcaaacagaagcgaaaatacgtttcatgcaggaacagctggatacgcttgtacgtgaatggaaagataattatgagtcttattataatgtcgatcaggaatacgaagtattaacgatttcggatgaggatttacgggcgagattccggacaatggttgatgagaaccgcggcgatatgcgtgcgatggaagataagcagctcgtgatcgccacattgcttgcttcgatggaaaaatccagaaaatcaatcgagcgcagaggtgttgattttaaagaactggcagatctggaaagccggaatctgctgtatttctcggatgatgcggtgcttaccgtatgccgggagaatattgcacagacgaaggaacagttaaagaaagaggaacggcagctttccgagatccgctccaaagcagataagttagatggaagcattcaatatgcaatcgagaatatccagaatggatatggttcttacgaggaagtggatgcaagtgagtcagagatcattgccagtcttgaaagcgggcagacattgctggcacggctggaggcggaagcaaaggcgtgcgacgaagagtatcgtacctatgagaaacggcagcggtatatgacagatctgtataaggatgtcaagcggatcgtaacgacacatgagatcagtctggaagatgcgacaccgatgttagaggataaagagacattacgggagatgtttgaatcccagcttatgaatttcgaccggacatgcaaacagcttgaccgtgcgaaaaatgagctgctcaaatttaagggcaatacggcacaggcgtttgatgagatgcatgcgtatgagcttgcgggaacgatccgggacgatgtgcggattccagagaattatgcagaggcaaaggcattggtggacaatctggagtctatggttggatatgtgcgtctggaacgtgaccgtgtggagaagagtctgaccgatatggaggggctcaaagcaaacttcgaggagcagtgcctgcaacggtgtttggatgtgcggacggagctggataaattaccgaagctttcccggattatcatggaggatgaagtgatccagatggtaggcttacaggtgccatatgtgaaggatgagtttttgaaacagcggatgtcggattatgtagaccgcatcgtggcacaggcagatgattatgagcaggatcgcgaccggatgaaatttattaggaacagtttgactttaaagaaattgttcagtgtgattgtaaccgatatgaatgcgatcaagctgagtctgtataagcgggaaagaatcaaagaacagagccgttatctgaaatacgaggaggccgttggaagtaccggacagtcgcagggtatttatatccaattcctgatttccatcatcaattacatttccggtatgtaccggattggaaatgaggatacaggaacaaagacgatctttattgataacccgtttggtgcggcgaaggatgtgtatatttgggagccgatcttcgcattgcttgcggcaaatcatgtacagctgatcgtgccggcacgtggggcaacaccagcaatcaccggacgattcgatgtcaattatattttaggacaacagatggcaggcggaaagcagctgaccgtagttgtcgattatacaagcaaagtcgagcaggaggaacttgtttatcaggatcttgaatatgaacaggtgagcttcgattttatatag

SEQ ID NO: 52113 - DNA, 1596 bp, Coprococcus sp. CAG:782
atggcgcagaaatacgtgatgataaatgacataataaaggaacacaatgccaggatgtacaatctgagaaagtattatcctttttttgtgctgtctgaaactacatttgcccagtataaagagggacgatatgcaggactcgacatgggatatataaccatgggagtgctgcgttttctcattcaggaaaacagtatgaatgagagggaagttacctatgatgagtacgaagaatttatggggcagctcttagacagggattttgacgtggagataaagaccgaggacagaaaagagctgatcgcatatatatttgacaagataaggaacgacggaaaagcatttgaatttaacttctatgacccttctatcaagaagagcaaggtggggcgtgtgaaactggtggacggacatataagggacggacaggtacgatacttcatcaccgcagagggcatagaattttatctggataccaaggagataaaggaagaaagcaagataaatgtggagcagcttcttcttgagaagatgataaccggcgagaatttcaaaggtggtatcgaggttgtcaagaggataaataacgaggtgaaccgcctggtccgtgagaaggacgagatagtggatatgttcagttatgatgtatttaaggcggcggagcgatacgagaaatatatgaagaccgtaggcaactggttcatggaggagcagaagatgttcgccagaaataaggcactggtggataaggctgtggcaagagcaggctacgacaaggcatacggcagtggaaataaaacctttaaggagatcagtgaactggagcttctgcttaagaagactatcttaaagcacggaagccttattaattccacaatggagctgcaggagatatcggacaacataatccacagggcgaagcttaagaagcttaaggcgtcatttgacttccaggcaagacttatggatatcataagggaggacagaccggataagatgttcaccgtgctgtcaccgttatttgcaccgaagaatgagaagtggttctcatttgcgtccatagacaatatcctcacgctgaaatccgatgataacgcaaggatggtcaaggtgaagcaggaggagacagacagcagcttcaggtatgaggacgagcttcttgatgacaggatcagcagaaacttcggaaggctgttcttcgagctggcagatcagctcatcaaatgggacagactaacccttaaggaatttaacggaatactggagatcagatttggcaaggagatctacgggaacaaggattactattccttccttacccatctggtgcagaagaagcattacgatatagatgacatgcttaagaagcaggagaccatgcttgagggcgtggtggtggaggctcttacaggcaagactcccggcatgggaagcgagactgacggtgcgtatgctccgaagctgtccatggagagatttaaaggacttgtgtttgatatagagtgcgatccggcacaggagattgccattggcgaggatatgtacgttacgaatatgatatttgtgagaaaaggtgacagcaaacatggaaagtaa

SEQ ID NO: 52114 - DNA, 717 bp, Coprococcus sp. CAG:782
atggaaagtaagaatttggataaggctctgcttatatattccaagcttatatcgggcgatgaggtaagcaagagagacagtgaaaatggtcagttatatgaggaatattacagcaatgcagaagtttacgacattgttggttctatatttaagaagcttaatctgtgcctttacgagtataacgacagcctgtatgtaaccgcaggcgagggtaacagggtattcggatatacaaatgatgacgtgaagaggatacttggcttaaggctcaacaaggagctgtacctgtgctactttataatgtatatgatgctcatatatttctacagggactctgagagctatcagttcagggattatataaagcccgagaaggtcatagaggagacagacaggtttctgtcaggaataacaggagaactggcggtatttgccagggaggacattgaacaggagagcttcaaggcaataggactgctgtgggacagtctcccaataaccacaagtggaggcgaaggggagaaagccaaggcttccagggcgtcaaaatcaggttatgtgaaacttacattcaattttatggtgtctcagggattatttgtggagaatgatgacagatattaccctacagacagatttaaagcactgtcagaaaattattttgaagattacagaggcagactgtaccagcttctcggaggaaatgaaaatgcctag

SEQ ID NO: 52115 - DNA, 4422 bp, Coprococcus sp. CAG:782
atgcctagtataaacaggataagggtaaataacgtaaaatataactttggtacacagcagtatgatgatttcaccatgcgtatgtacggcaggaatactctctacgatctggcaaatggcggcggcaagagtatccttatgctgcttttgctgcaaaatctcataccaaactgtacccttgatgacaagcagcctatagagaagctgttccgtgcaggctgtggcaatacagtcatacactcacttattgagtggaaactggatgaggcagatatagaaaacggataccgctacatgaccaccggattctgtgccagaaaggcaaaggacgaggacggcagcaataaggacggaggcagtgccacagaaaaggatactgcggctattgaatatttcaactactgtatattctacagggaatacaatagaaatgatatcgtgaaccttcccctgtcaaaggacaatgagaagatcactttcagcggtcttaagaattaccttaaggatctggcaagaaaggatctgagtctggatatccatgtgtttgagcgaaagggagagtaccagagatttataagtcagtatggactccatgaaagccactgggagatcatcagaggtataaataaaaccgaaggacatgtccgtacatatttcgagaccaattacaggaccaccagaaaggtggtggaggatctcttaatagaagagataatcgagaaggcttttcttaccaagacaggcaggaacggtgaggaagacgacatggcacagacccttcttgatataaaggagaagcttaaccagcttgcaaggaagaagagggacattgcaaattacgatcatcagatagagcttataaatgtgcttcaggacagggtaaattcctgtatggatctctatgatgagtacgacagcataacaaaaagcctggcagatatatatgtgacaggaaaagaatttaccagtcaggactcggatcatgcagaggaactcttggcgaagaagcaggacagctatgagaagaaggaggcacagaagctccgccttgataaccttaaggttacaaagcaataccttgaggcggaccagttgaagcagtatcttgagagacttgaggcagagatttctgtaaatgaagagaagcttaaggaagcgagacatttcatcgcccttaaggaaagcataaatgagtatgtgggctatgttaaggacagaagcctcttaaaggagaatgaaaagctccttgaaaatatcatgaacagctcagatgtggatattcacaaaatgaagcagtacgcatggaacaagaagcagaacaatgatttccggctggcagagttaaacagccttaaggtggacaatgagagaactctcgtcataaagaaggaagagcaggctgaggctgagaagctcttaagagagggacagattgccaaggcggttgccgacagcaatatcattgatgtaaagcagcgtatagaaggacttaacgataagataaatgaattgactgcctctgtggatgtggtggttgtaggtgatgcttctgccatgtatgaggcaagcgagaagaagcgtaagaatacagaagagaaactcactgcattacagatagacagcaattccttacgggaagagatgtacgaggacaagtacaacctttccgttaagaacggcgagcttcctgcacttgagaagaaatatgaatctgcaaatgaaaaggctgccctttacggacaggttcagcagaaattcaagaatatcataggtatctacggagcttctgagccgtctcttatagaggacatcatatccgcaaggataaagggtgcctatgaagagatagttaagaagaggactgaggtggaggagcttaagagacaagagaagcttcttgggacaggacagatattcggccctatgaagggtgccgaggcggtcatcaactacattgagacaagacatggcaccatggcagtattcggggcaaattatctggctgcccttgatcctgacagacgaaaaagccttcttaataccaatccggcattgccatacggagtgatcgtgaaggattttgccgccattaaggatgatatcaaccttcctgatatagatacaggaagccagtatgtcatgatctacgatatgaatagtctggcagagcctgcactttacctgggaaataatgcagtagcagtaacccgcagtgcagaatatttcgccgacgaggaagtattgaacaagcttaagaaggatgcgcatgaagcacttgcctcagcagaggatgagctttctattataaacgacagcttaagcacatatgacgaggatcttacatttgtaagaagtatcgtaaataatgatctggtgactgcagatgaggagttaaaggcagcagagaaagagcttgcagacgcaaaggatgagataaagggactttatgacgccataacagagcttaccatccgcatagaccgtagcaataaggaaatggatagtctgacttcggagctcgcggagcttacaacatcaacagatatcttaaaacagatatttgacctttcagaggagctcaagaaggaaattgtaagacttaacgagcttaatgtgtatgagagcacactgtccgtaaagattgaggagttaaagggaaatgagcttaaggctgccatgactgtaggtgatctccaggcaagggctgagaagtacactaaggatatcggtgagataaatgaaaaatgggagcagtactacgctgcctactatgacgatatgccgggggtaagctacgacaggataatcttaagtgatgaagagatagacgccgaatttatggctatgtataaggcacactcctacagcaagcctgatatagaggataagaagaagctgataaatgcccttaagagctccatggagaggaccatgaggaccatagaaaagaggggtataacagaggaggagatcctttcctcaggcgacatagttgtaactgatgaagagacccttgaaaccataaataaagagatagccagacttacccatatatcctcagagcttactagaaagcataacgagacctcaaaggagatcaataagcttgagggaagtaccaattatgcccttgagaatatcatcagagagtatggtgccggcagctatgtgaaggaggacataaccctcacggaggcaaagacagccattgaaaatggtgatcagactcttggggagcttgaacgtcagtacaaagaatgtgtcagggaatacgaaagctatgttaaggaacagggctatatgacagacctcttcaaggatgttaagcgtattgttgatacaaatgatattgatgtggcagcaggtaagatactctatgacgacaaggagaagctcagggatgcatttgagggcagcctgtttaaattcgacaggagccggaagaaccttgaccgtgcaaagaatgatctgatgaggtataaggggcagacggcggaagccttaagtgccatgggtgtatttgaaatggctgcaactataagaaatgatgtgaacatacctgacaactattatgatgccagggcacttcttgacaatctttcccagataatagagtttataaggcttgaaaagggaagagtggcaaagggtatagaggacatggagaccataaaggagaactttgaaaatcagtgtatccagcgttgtatggatgttaagactgagcttgagaagcttcctaagctttcaaagatcaacatgggaaatgaggtcattaagatggttgatctgtccataccttatgttaaggatgaatttgtgaagcagaggatgtcagagtacatagataatcttgttaagagtgcggatacctatgaggatgagcgtaagcgagttaagttcatcaaagaaagtcttggtcttaagagattgttcggagtgatggtcacagatatgaacgccattaagcttaagctctacaagagagagcgaataaaagagcagagccggtatctgagatatgaggaggctgtaggaagtacaggtcagtcccagggtatctacatccagttccttgtggcaataatcaactatattgccggaatgtattcattccgggcagaggatacagtgaccaccaagacaatattcatagataatccatttggtgcggcaaaggatatctatatctgggagcctatatttgcaatgttatctgcaaatcacgtccagcttatagttcctgccagaggtgcgactccagccataacaggaagatttgacgttaattacgtccttggacagcagatggtgggcggtaagcagcagactgtggttattgattacaacagcaagactgatggcgaagagctggagtaccatgagctcagctacgagcaggcaacatttgatttcatttaa

SEQ ID NO: 52116 - DNA, 1614 bp, Clostridium sp. CAG:122
atggaatacgattttttgaaacagttttcaaagagaatgaagattgttggtatgttctcaacattgataaaaaacagttggcagaagactacctggaaacagttcggttttgagaccatggacgagcaggtgaatatgatatatgcggttcttttgttcattatggagtattcactcagggagcagccttgtacgattgatgatatatcagtctttgttgatgatgtatgtaacaggtatctgaaaaaaagtctttcttacgaaaaaagcagggagcttgctgagtttattataaatattgttttgtgtgatgaaggtcatgcgatgtattttgactgttttgagtttgaaaagcgtgaatataaaaagaaaaatataagttatctgtcaaatgaggtggtctatcttgacggtgatataaaaagaacaagctacaaacttacagataacggatataatctggtattatcgacactcgaagtcgaaaacaatatgaagcttacgatacatgagatgatatttaagatgcacttagaacgggctacatatgatcaggcacttgatgaggttaaaaatatttttaatatgttacgcatacagcttcagaaaatacaggaggcgatggataagataaggcgaaatgcacttaattattctatcgaggattacgagcagattttaaatgaaaatatgactgccataagtgatacaaagcacaagtttatggagtacaggcgtgtggttagaaaccgtgttaaagaactagaagatgaaaatataaatattaaggctttgagtgatgaggatatggaaaaacttcataatcttcaggatattgagagatatttgagcaggtcgatagatgaacatcagaagatattaaataaacattttgaccttaaagatctttattctcatgagcttgagcagatgtcaaagatgacgcttattaaaaggttttctatcagaaatgatctgtatgacaaaattattgagcatccgggcagtcttgtaaatataaatcagtttttaaatccgctttttagaaataatccggagaaagtttacaatctgaataagtgtattcagtatcagaagccgctcagagagaaaaatgatgatgaagaagaagaaaaacttgattttgatgctatggactatgaggagcaaaaggagagaaaacttagggaaaagttaaaaaaatatcagtccagtatggaatttcttgttgaaaggacaatggagaatgatggcgagattgatttagcttcaatgagtagtctgccagaggaacagaagaaagtgtttattccgaatgctgaaatgtttaaggagataatggttgagtttattaaagccggaagtattgatattgatgaacttagaaaagagagaagaaatatagttgcggaggaaagctgtagttttcagttaaatgaaatgatattaaaaattgctgatgagagaaaaaattcacagattaaacggataaccgtaagaagatgtgatgacggacagacagtttgttttaaggatgtttacaatgaatttggtgacagacgaaatatatattgttctaatgttcaatttagatttgagaaagaaatggagtag

SEQ ID NO: 52117 - DNA, 735 bp, Clostridium sp. CAG:122
atggcatacgaggcagaagaagtaaagataagtcaggaaatattttgtacgcttatttcaaaacatgaattaagagaggaagataataaggagctgtttgaaggttacacacaaaatccaagaataatgaatcttgtgaaaagtcagggtgaaattgcggattgtacagtagaaagatatggaagtgtgatatatcttatacctgctgaagacaacgattttcttgggttttcaaagcaggaattaaaagcgaaactctgtaagtcaggagctacggacaaggattattatctgtcacagtttgttatccttacaatgcttacagaattttatgacggtcaggggagcagcagtaaatcaagagaatatattaaggtcggtgaacttataaatctggtttcagacagacttatacaggctggaaataatatgaccgaggaggaagaggaaaagacagggcttgcattttcaaatatgcttgaagcatacacggcacttagaagtgacgaaaagggaagaaagacaaagacgacaaaagagggttttgtccacaggatactgacctttttacaggaacagggacttatagagtatatagagagagatgatatgataaacacaacaaaaaaacttgacagttttatggactggaatttgttaaatcagaacaactatataagagtgagcaaagttttgggaatcagtgatgaaaaggagaaggtaaaaggtgagtaa

SEQ ID NO: 52118 - DNA, 4431 bp, Clostridium sp. CAG:122
gtgagtaagataaatacacttcgtatcgtaaacttaaattataacaataattctatcaagataagtgatgaagcatttcagtttaatggtgaaagtacgcttatgtcacttagaaatggtggcggaaagacagtgctggtgcagatgatgacggcaccatttgtgcataaaagatacagggatacaaaggatagaaagtttgagagttattttacgacaaacagaccgactttcattatggtcgagtgggtgcttgacggggaagccggttatgtgcttaccggaatgatggtaagaaaaaatcaggaagtttcggatggggaggctcatgatgaacttgagatgataaattttgtatatgaatatactgccagatgtgaaaatgacatatatcatatacctataataaatgagactgaatcaggtatgacattaaaaaactggggttcatgtaaaaaggtatttgaaaagcttaaaagagaagatggtatgcattttaattactatgatatggatatgcctgcccagtcaagaatgtattttgaaaagcttaagcagtaccagataaattataaagaatgggaaactattataaaaaagataaatttaaaagaatctggactttcagagttgtttacggattgccgtgatgaaaaaggtcttgttgaaaagtggtttttagaagcaatagagagtaaactcaataaagatggaaaccgcattttagaatttgagactataataaaaaaatacgcaaaacagtacagggacaatcagacaaaaattcagagaatgaaaaatctcagaggttttttagaagaagcatcgggcataagagtatatgcggatgaatatgtcgattacactgagaaaagaaaaaataaagaaaatgatattgcatggtttaatgtgatattaaatgagttaaatgcagaagctgaggaaagaaaaagacttcttgacgaagacataagaaaaaaacagatagagatttcagatataaaatatgaagaagtatcatataatattcattcattagaggcaaaaaaggaaagactcatacacgaatacgagcagataacacttgaaaaaggtcaggttgcaaaagaaaaagacaggcttgagaataagagggcaaagcttctttgtgcgagagaaaatgaagaaaaaaatgctgctcttgcagaatgtagaaagattgagagccgtcttgaagcatcaaaaaagagtgaggaacagaaagaacctgaaagacaggaacttggaaaaacactttttaaacattacagcagggcagtttcggagtgcgaggctgaaatcgcaaatacaagagaaaatataaaaaagcaggaaaagcaggaaaaagagtacaaccaaagtaagtccgactgttttaaacaaaaggatgacaattcattacagataggaaaatgtcaggcaaaaatttcaaattatgatgtgattgaagaacagtttaataaaaaatacgaagaaaagctttgcagaaatattttaggtgtttatgagacggggacattagaattaagagatgatgagtataaaaaagaaatatcgaagatacaaaaagatatagtttctcttaaacaggaaaaggtgaaaaatgatgatgattttgtaaaatatgtaagaaagcaggatgatctcagaaatgagattatggagaaaaagagcaagctggcatcagagagagaaatatgtcttgattttgaggagcagttaaaaataagacaggatattatgaaacattttcttgtaagtgaaaatgatgtttataacaaggaagtgatacttaagggtgcagacagaaagcttaaggagataagtgctgcaaaaaggttgttagagcgtgagagcgagcagacaaacacagagataaaacttcttgagaatggaagattgttggaggtttcaaaagagtttgatgaatatctgtcatctatggagattgaatatatatatggtatggagtggctttcaaataatggaagaagtatggatgaaaataaaaagatagctgccaataatccatttattccgtatgcggtaataatctccggtgaggatttaaaaaagctgttggcagataaaaataaggtatttacttcaaatccggtgccgattgtaaagagagaggagcttgaagatggttttataaatgatgaaacaggtgttgtagaacttgaaaagataagcttttatctgaaattccaagaggaacttctcaatgatagcaaacgatatgaaatcatagaacaaaaaaaggaaaaaagcaggaaaatacaggaaaacattgagagaagagatgaagaatataaggagtatttttctaaacaggaatgtataaaaaatcagacgatagaaagtgacagtatagaaagcagcaggggacttattgatacacttgagagtgaaactgttaagatgcaggatgaacttgaaaatctggaaagtttgaaaagaaagattaccttagtaaacgaacagataaatcagaatgtaacagcactgaatgagaaaaaaaatctttcagggataagattgcaggatttcgagatgcttagagagagttataatgattactgcgatgcaaaagaggaaaaaatacgacttgacaagaaaaatgaagatattgacaataagctgaacattattacagaaaaacttaataaccttatcgaggacatcaaagcggatgaaaaaactgagatgaagaagaaacaggagcttcttggacttcaggaaagatatgagtattttgaaaaatttaagggaaaatcagaagatgttgataaggcgtcttatactttgcttgacgaagaggaaaggatttcaaaagaggcagcttacaatgcccttttaaatgattattcaaatgaagtgaaacttcttacagagcagtataacagtgccaacaggagatttcttaagagtaagcaggagttagcagaactgcttgcaaaataccgtattaaaaaaacagacattgaaaagacaaggtatgataaagacgataaggcagaattagatgaacgcatatctgctaacaatatggagttacagttgtatgatgaaaaacttaacaaagtcaatacgcagataaccaaaaaagagtcagacattgagcacgcttacaaggatatgtataggattgctgaaaagaaagagccaattagcaaggataaaatatctgacacaaactttaaagacaggataattataatacaaaatgagataagagacaccagacttgaccttgacggagttacaagtctttgcaggggatatgaagcaaatatttctgcacttgccgaatatagtgatttaaaggttgaggaaaccgatgagcatataaagaaggaggatatttttggaaagtcggtaaaagaaattgataagttcaggggcatgatgataagagattacagagaacttattgaaaatgagagaaagcagagtaatgttatcacaagacttttaaacgagatggcaagaaaaaatatctttaaggatgaatttttccagaagcctatcgaagtattattatcacttacggataatgcagtcaatttcatgaaacagcttgatatactggtttcatcttacgaaagtatgatagaaaaacttgaggtagatgttgccatcgttgaaaaggagcgtgtaaggatagttgaacttcttgaggaatatgtaagggatgtccatgaggagttgggcaagatagatggaaattcaacgataaaagtgcatggagagagtaagaaaatgcttaagataactctgcctgagtggtatgagaatgaggagatatatcatcttaagatacaggatattcttgaagaggttactgcaaagacgataaaggcattagaggaaaataaaaatcctgatgatataacagggctttatatcaacacgaagtatctatacgatacggtggcaggtacgggtaatgtccgcataaaactttacaagatagaggagcagaaaggaagagaaatttcatggtcagatgttgcgaaaaattcaggtggtgagggatttttgtcggcatttatagttctgtcaagtctgctctactatatgagaaaagatgtgtcagatgtatttaccaattataatgagggaaaagtgcttgttatggacaatccttttgcacagacaaatgcttcacatcttttgaaaccgcttatggatatggcaaaaaagacaaatacgcagcttatctgcctttcaggtcttggtggtgattcaatatatgacagatttgacaatatttatgtgttaaatcttgtggcggcaagcttgagaaacggaatgcagtatcttaaaggggagcacacaagaggagatgaacaggaaacaatgatagcaacgcagatacaggttacacagcaggagcttatgttctaa

SEQ ID NO: 52119 - DNA, 1629 bp, Coprococcus eutactus CAG:665
atggcacttaaatacgtgatgataaatgacataatcgaagaacacaatgcgagaatgcagaacctaaggaaatattacccgttctttgttctggctgagaccacatttgcgcagtataaggaagggcgctatgcacagctggacatgggttatataaccatggcggttctgcgtttttttattcaggagaacagcttcaatgagcgtgaggtgtcatacgacgaatatgaagaatttatggggcagcttctcgaccgtgattttgacgtggagattgcggaggaggataggactgacctgataatgtatatatttgacaaaatcaagaacgatggaagagcatttgaattcacgttctatgatccgggaaagaagcagcgcaagacgggacgagtgaagctgatagacagccatatagtggatggcaaggttctgtatttcattactgcggatggaatcgaattctatctggacaccaaggagatcaaggacgagagtaagatcaacgtgcagcagcttcttctggaaaaaatgatcgttggagagaacttccgtggcggtatcgaggtcgtgcgcaggataaatagtgaagtgaacaggcttatccgagagaaggatgagatagtgaatcttctgtccatagatgtgtttaggggcgcagaagaatatgagaattatatgaagaccgtcggcaaatggttcgctgacgagcagaagctgtttgccaagaacaaggcattggttgacaaggcgatcaccaaggcgagctacgacaacatgggcaagggaaacatgaaggcaatggaggagataagccagcttgagcttgagctcaaacggacgatcatcaagcatggaagtctgataagcagcaccatggagcttcagaacatatcggacaatattatacacaaggcaaagcttcagaagctgagacctgcatttgactttgcaaggcagcttcagagcatcataaaagatgacagaccggataagatgctcactatacttgcgcctctctttgctccgaggatcgtgaaaacatttagtatgacatccatagatcacatgctcacgctgaagtccgaggacaatgcgaagacaacaaaggtgaagaaggaacagctagatccgaacttccgttacgaagatgaactactcgatgagcagataagtgccaacttcacaaaactgttccacgaactccttgaccagttgagcaaatggggacacctgagtctcaaggaatttaatggaattctggaggtgaagtttggcaaggagatatatgacaacaaggattactattccttcctcacacacctggcacagaaggacaggtacagtgtggatgagatcctgaagaagccggataccatgctggagggaatgttggtggatcacatagagaggataaaaacaggcaaaggtattgctattttgcagaatcagaccgatggtgatatggggcatggcggttccggactctcacgtgagatgtacgcgccagaactcacactggatgcgttcagaggcatgacatttacactggaattccatccagacgaagagatacagattggcgaggacatgtatgttacgggaattcagtttaacaaaaccagctga

SEQ ID NO: 52120 - DNA, 720 bp, Coprococcus eutactus CAG:665
atggaaagtaagaatctggacaaggcgatagagatatattccaagttaatatcaggtgaggagatctgtaagaagcatcccgacaatggcccgctgtacgatgagttctacggcaatgccgaggtgtacgatattgtcatgaatatgatgaagaagatgaacctgtcactgtacgagtacaatgacagcctgtatataacagccggtgagggcaaccgggtatttggctatacaaatgacgacatgaagaagcttctgggacttcgtctgaacaaggagctctatctgtgttacttcattatgtatatgacacttctatatttttacaaggattcatccagctatcagttcagggagtatgtgaagtcagagaacattatagatgagacaagcaaatatcttgcggacataacgaagaagcttgatgttctgtcaactgatgaggtggagcaggacagcttcaaggcgatagcgcttctgtgggatgaactcccggcggtgacgggcaatcaggagggcgacagcgccagggcgtccaaggcatcccgggcgggttatgtgaagctggtgttcaacttcatgtcggcccagcggttatttgtggagaatgcggacaggtactatccgacagacaggatgaaggctttgtcggagaactattttgaggaatacagaggacggctgtatcagttgcttggaggtgaagaagaggatgcctag

SEQ ID NO: 52121 - DNA, 4476 bp, Coprococcus eutactus CAG:665
atgcctagtatcaacaggataagggtcaacaatgtaaaatataactttggtacacagcagtatgatgacttcaccatgagaatgtatggcaagaacacgctgtatgatctggcaaatggaggaggaaagagtattctcatgcttctgctccttcagaacctgataccgaactgtactctggatgagaagcagcctgtggagaagcttttccgtgcgggcggcggcaacacagtcatccattcgctgatcgagtggaagcttgacgaggcggatataaaggaaggctacagatacatgaccaccggattctgtgccagaaaggcaaaggatacggcggatgccggggaggtacagaaggacactgcatccatagagtattttaattactgcattttctacagggaatataataagaatgacatagtgaatcttcctttgtcggagggtaatgagaggatcacattcaatggtttaaagacgtatctcaaggatctcggacacagggatatgagtctggaggtcagggtatttgacaagaagggcgagtaccagagatttataagcggctatggcctccatgagagccactgggagatcatacgtggaatcaacaagacagaggggcacgtaagaacgtattttgagacaaattacaggaccacaaggaaggtcgtggaggatctgctcatagaggagatcatagagaaggcatttgccacaaagacaggacgaaacggtgaggaagacaccatggcagagactcttctcgacatcaaggacaagctgaacgttctggcacagagaaagcgtgacatagccaactatgaccaccagatagaattgataaatgtgctcgagggcaaggtgaactcatgtataggtctctacgaggacaacgacaggatatgtaagggcctggccgatgtatatgccacaggaagggcgtgtacacaggagggcgacacacatatggaggagctggcgaaggcaaaggctgacgccggggagcagatggaacagcagaacaagcgtctggcaaatctcagggtcaccagggattatctgcgtcttgaggacatgaaccgcaagatggatgacactgccacgcagatagaggacaacgagaagaagcttgcggagctgaaaaaccagatcggctacaaggagagtgtaaatgactaccttgtatacagggagaacaagcgacagtacgatgagaacagactgatagtcgacaatataagaaataacatcggatcatccagtgagaagatggcggtgtatgcgtacaacagacgcatccgtgatgagaagaagcttgcagagctcatggcggcaagggaagaggcccagaccagctatgaccatgcacttgaggaggcggagtactgcagaaaggtcatgagggagggcgagatcgcccaggcggtggcggagaacaatatcgctgatgccacagccaagattgatgagataagtgcccgcataagtgagctggctgcatcggtcaacctgctcgtagtgggtgatgtgaaggatatgatgaacaaggctcaggaggagtctgacaggatacttgctgagatgacagagctggagatagccgtagcagatggcaggacaaagctgtacgatgacagatacagactgacgactgtgcaggctgagtatgatgcgctggagagaagctgcgaggatgcaaggcttgacgccgaggcgtacaggcagtcgggaagccagctcgacagcatcatggcagtatactctgtggagaatccacaggatataacaggtgttataaatgacaggattaggggcaccataacagagacgatcaagcgccagcaggagatcgacagactgacaaagcttgcgaaatgctatgaggatggcagaccatttccgccgtcggagggtgctgagactgtgataaactacatctccaccagacatgggctcatggccatgcatggtgcggattatctgtcggcactcccgggtgatacaaaggaggagctgcttcaggcaaatccatacctgccgtacagtgttgtgacaaagggatttgatagtctggaggacgatataaatctcggttcgatagacactggcagcgaatgtgtaatggtgtacgatatggataagctttcagactcagcgatagttcccgccgagaacatgcttatcataggaagagacaggaaatatttcatgtctaaggactccatagaggacgccagaaaggcaaatgctgataagatagcaggtttcacggaggagatcagtctgataaatgagaagcttgcgacatatcaggaggatcttgcatttgtcacaaggcttgtggatgcgagatatacaggtgccgaggacagggagagagagctgaaccaggcactgctcgataagaaggatgagcttgaggagcttaagacatcgatcaaggttacagagacggagcttaagaataacaccgagagatatggagacctgcagcagagtcagcagaaggaatctgacagaagacagacatttgtcatgatagagcagctgtcggatcttgcaagaccggaggagcagagacttgccgagtataagcagaggaaatttgaccttgtggcaaagctgtcaggacttcagagcgatgtgctgaagtggtcgacgacggttggagagactgaggcaaagcttgcggggcttacaaggaatatagaggatatccagtacaagtggacggagtatttcgaaccgtatctgccgaagtctgagaatgcaggagttgctgaaaatacagatggtgcaggcgtggctgctgcggcatggcaggacggaataccagaggaatacaaggagaccttggacatttcagatgaacggcttgaacaggaatttatggctatgctggcggtttcaaaggagcatgcgccggatcttgaggacaagaagaagctcatggatgcgctgaagaagtcaatggacagaatacagaagaccatagagaagagaggctttgacatggcagtatttgccggggcaggagagctctatccgacgtctgaggacaatctcagggagatggacgatgagctggcaaggctcacgttgatagaggcgtcgctgatgcagcagcagaaggctgaccagaaggcgtatagcaagcttgagggaagcatagagtatgcgatagagaacatcaaccgcacatacggcgatggcagctatgtacgtgaggagatatctgcagccgatgcagatacagccatagccaatggagatgcggtgcttgcggatatgaaccgcatattcaaagaagctgagaaggcgtacagcgattactataagcagtatggtttcatggtggatctgtacaaggatgtaaagagaatagtcgatacaaatgacatagatgtgtccggtggaaatgtactggatgaagacatggataccctcagacagttatttgagacaagtcttatgaagtacgacaggagcatgaaggctcttgaccgcgcaaagaatgaaatcatgagattcaagggacagacggcggatacactagtggagatgggtgtattcgagatggccaatacgatcagacaggatgtgcaggttccggatacctacagtcaggcaaaggaacttctggcaaatcttcttcagattattgagttcatcaagctagagaaggagcgcgtcgagaagggcattgaggatatggttgccataaaggagaacttcgagaatcagtgtgtacagagatgtatggatgtcaagactgagcttgagaagcttccaaagctgtcacgcatcacggtgggcgatgatgtgatcaagatggtcgatctcaccataccttatgtgaaggatgaatttgtaaagcagagaatgtctgattatatagatgacatagtgaaaggcgcggatgcctacgaggatgagagaaagaggatcaagtacatccgtgactgcctcggactcaagaagctgttcggcgtcatggtcacagatatgaacgccataaagcttaacctctacaagagggagagaataaaggaacagagccgttatctcagatatgaggaggctgttggaagtacgggacagtctcagggaatctacattcagtttctggttgctgtcatcaactacattgccggaatgtacagtctggcacctgaggagtcgatacagtccaagactatatttatcgataacccatttggtgctgcaaaagatatatatatttgggagcctatatttgccatgctggcagctaatcatgtgcagctcatcgtacctgcccgtggcgcgacaccggccatcaccggacgctttgacgtgaactatatcctgggacagcagatggtgggcggaaagcagcagacagtcgttgtggactacacaagcaagacagatcaggaggagctggaatatcaggaactttcctatgagcaggcaaccttcgacttcatctag

SEQ ID NO: 52122 - DNA, 1584 bp, Bacteroides pectinophilus CAG:437
atggcgcaggcaaatgttttacagaatgatatcgtgcatgaacacagagtcagaatgctgaacctgaagaagtattatccgttctttaagcttacggagatttcttttgagaatttcaggcagggccagtatgcagatcttgacatgggctatatcgtcatggcggtcctgcgtttttttattgaagagaataattttaaagaaaaagatgtgacgtaccctgagtatgtagagttcataggacaatgcatacgcagggattttgtgcttaatgtgacagatgaagaatgcagggatattgcagactatgtatttgataagataaaaaatgacggaaaaccatttgaattcggatattatgaccctgtggacagaaagcacaaggtctcaagaatgaagctgatagacagttcgatacgcaataatacggtgtggtattcaataagtcctgatgcgatagagttctatcttgatactaaggagattaaggacgagagcagaataagcgtgcagcagcttctgcttgaaaagatgattaagtcacaggattttggacggggaacgcaggtagtaggccgtatcaatgatgaggtcgagagacttatgctcgagcgcagggaagtcgagaggcttctggcaacggatgtatttgcaggccttgaagcgtacagggattttactgataacggaatgcagtggtttgatgacgagcagagattatttgtaaaaaataaagagctgatagatgcggcaatagctaagatggaaagcacgccggcacatgcgggggatggttacagaagagcggttgatgagatatatgaacttgatgaccagcttaagatggcaatgagcagacatggggaactgctgcgggcatgcatggatctgcagaagctgacagataatgtgatacatcggaataagctcagcagattgagaatacattgtgactacagacagcttcttgagcagatggtgcgttcagatacaacaagaccgcttgagatgatgattggtgccatgctcaggccaaagacttctaagatgttcgactttggaataatcgacgagtgtctcacacaaaggacacagaagcaggatatagtcgaggaagatactccgggaacgcaggaggatatcatcttcgctgatgaggcggaagatgaaagaataagccataattacatatttttcatgcggagtataatcaggctccttgaggaaaagcaggaatttacactgtcatggtataatgcatggctcaaagacagatacaaagaaaaggcagataatatacttgccaatgcggattattattcatttctcgttaatctgtgtcagaagcggcgctatgtcataggcggtccggatgatacggaagagagtttccttgacggcatacttaaggaaggactggcagcggatggcgcagccggagtgaacggtaatccatatgtgatagagatagagatggctgacggtgaagttgaagttggcaaagaagcagtggtaagcgagcttatattcaggcttgccaggacacaggacaacggaggcagtgatggaacagaggaatcttga

SEQ ID NO: 52123 - DNA, 717 bp, Bacteroides pectinophilus CAG:437
atggaacagaggaatcttgataaggcacttgatattgtgtcaaagctgctcataggtgaggagatatcggaaaagggcagtaatgccgcactttatcaggaatacaataataacggtgaagtgtatgacatagtacatatgtctcttaaaaagatgaatatacatatgtatgaatatgctaacggtctctatgtaagcgcaggagagaataacagggcattcggatactccaatgaggaactgaggcgcgagataggcataaggaataacagggagctgtatcttgcgtattttataatatataatgtgctgacatttttttaccagtcatcggacagtacggcatattctgaatttgtaagggttgaggatataatatcaggaacggatgctgcagttacgggaattgcagacaggcgtgaggcgatagtgcttaacgagattgaagaaaacagtttcagacagattgccttaagctgggacgggcttcctgttgtaagcgtggaagattcgcaggggcttcgtgctgccaggaattcaaagacgggctttgtgaagcttgttatgaactttctggtaagacaggagctttttgtgcaggctgatacgaggtattatccgaaagacaggttcagggcacttgcacagaactattttgaggaatataagggaagacttctcgaagtaatgagggaggaagaagatgccacagattaa

SEQ ID NO: 52124 - DNA, 4512 bp, Bacteroides pectinophilus CAG:437
atgccacagattaaccgcatacgtgtaaacaatgtcaaatataactttggaacccagtattatgatgatttcatgatgcgcttttccggcaagaatacgctgtatgatcttgccaacggcggcggtaagagtcttcttatgcttctgcttatgcagaatatgattccaaactgcacacttgatgacaaacagccgatagagaagctttttcgcggggacagcggcaatacaacgatacattcacttatagagtggaatcttgacccatgctatcgtaaggacaattacaaatatatgcttacgggcttttgtgcacgcaaagcaagaaatacatcatcagagcagccagcagtgtcagatggatatgatacggacggcacgggaacgtcacaggcttcatccgtatcagctgcttcacaggcagtttcggcaaatgaccaggcatcagtggaatattttaactatgtcatattctacagggaattcggcgataatgacataagaaatctgccgctttcaaaggatggcaaaaaggtaacatatcaggaacttaaagattacctgagagaccttgagaagaaggacttcggagtatcggtaaagatatttgaccgcaagggagattatcagaactttataagcggatatggaatctatgaaagtgaatgggaaatcgtaagaggaatcaataagacggaaggtcatgtaagaacatattttgagacgaattacaggacaagccgcaaggttgttgaggatctgcttattgaggagattatccagaaatccttccacaacataacaggcaacggtaatgatgatgaccgcatggcaaggacgcttcttgacataaaggataagcttgttgaactttcaagaaagcatgccattatggatgagtatgacatgcagatacaggccatagatgagttcacacagggactgtcagattttgaaagtatataccgcaataaaaatgagaacagtgccagacttgtaaggatgctcgcggcagcaaggaaaaagagtgatgaaacagctgctgaggagcagtctgcagcagaggcgattgagagaatacagattgagaccgacagagaacatcggctcatagacactgcggagattattgaacagaagaattcaatgaaggaagtcggggaacttctcaggcaatctgagcaggagaggtcgtctgctgtgcaggcttcggaaagtctgcggcttgaacttactcttaaggagtgcattgcagattacagggaatatcttgaatataagaggcagtttgatgagataacccagattatagataacagactccgtgaccatgaagacatagctgcggaactgagaaatcttgcatcatataaaaaatcagctgatgatatcagaagacatgaattattgtcgggtatgacagaggcaaaagcacttcttgccaatgaggagaacgtatccaatacagcagcagatgcacttaaggcagcagaatcaggaatatccaaggcacttggacgttctgaatatctcaagaatgagataacttccgacgagaatgccatatcgggaatgcttggtgccgatacggtacttgtcgctgagaatgcgtctgacgagctggcaggagtgaatgatgaggcagcagcatgcagaatgcatatgcgggaacttgaggaaaaactggcgtcagtaaagacacagattgatatgtgccgtactaagcttgacagaacagatactcttatagaggtgaacggacagcaggcagagaagcttgaacaggaacttgtggcaggaaagcatgccgatgagctttttgacaagctgtgcaatgtgtattcacagaagacgccggaggggctggcaagagcggtatcggcggcacttaaggagactgaatcacagtttgacaaaagtatgcgcagaagatctgaccttgaagtatatgctgagtcacttaagaacggcgtgtatgtgtgccgcgatgaacagtatgacaaagtgtgggattatcttcagaagcagtatggcgaagatgccatgcagggctcacgctggtatgcgggccttaagcagggacagaaacgggatgtcataaagcgcgttccattcattcataacggctttataataaaaaatgattttgaaagagtcagggcggatacagtgcttggaagcttcaacggtgcatatgctgtaccggttatcagtgaaaatgtgctgtatgatatgaagcttgaagtgaacaatgaacttgtgacatttgcatcgagggatatgtcatttcttacagaaccgtcaggcattgacaatgagattaaaaaatgcagcgaagagatagctgagcttgatgatgtgatagcgcgtctttcagacagaagagatgtgataagggaggactatgattttgcagtaagagaagcggtaaagaggtctgattataatgacagtccggcagtccggcttgaaaagcttaaagctgaagcagtgcagcttgcagagaccagaacggagcttatcggcagacttgagaaccttaacacatcaaaggcttcactcacaagagagtacgatgacgaatcgcagagagaggcgcatgatcttaagagggcagagtttcttcaaaagattacagagctgttcgacagggctgtgggacacagagccgaagtgaagcagcttgaagggatgattcaggagtactcttcaaggaaacagaaagcgggggcagatctcagcgcatcacaggaaagagccggcgcataccggtcgaagattgcatcggtacagagtgcgcttgaaagaatggatgtccagtggactgcatttgcaccatattatagtgaagattacgaagcaggttccgataacacggttaatgcacaacaattcagtgaccaggatctcgagagcaggtttgcagcactcagaagcattattgagcaggatacatctgacataacggataaggagaagcttaagaaccatcttgctgcgtctatggacaaatgctgccgtatgatagagtacaggcgaatgtcggttgatgatgtcaggaaagcgcttgatgacgactcaatggcggacagcagtaatgatgcgcttatgtcgatacgtgacagactggctgagtatgatgggcagattgcttcaataacacagacaatagaatcgcagagcgcactttataacagacttgacggaagtatagcacatggaatctatcagatagaggaaaaatacggaagttatgaggaatttgaatgtgccaatacagcggcattcaaggagcagcatacggcgcttgttgcaaagatgagagaaaacaaagccaggctgtctgacagacagaaagagactgttaagcagcacacaaagcttgaggtcatggttaaggatatggagaggattatccgtgctgccggaatagatgaggcggatgcggatgtgaccggagcagatgagaatgtggctttggagaattacatggattacgagaatgtccagaaagaactcgagaggattcttgtaaggcttgaaaagcgcaaggatacatttgcaaagcagaaagcagagcttactgacagactgcgcagacttgaggcagcagatcttgcggatgaatttacaagaagcctggatgcaccggctgatgcaaaacagtgtgaagagcttgctggacagctaaaggagaccaatgagtatatagcgcttgagagagataatgttgcaaagagcacggaagacatggaacgtataaaggaaagctttgagaacagatgtcttcagacctgcagcaatataaagacggagcttgacaggcttccacagctttcgacaataacgctggacggaaagcttatatcgataattgacctgcagataccatatgtaaaagaggagtcatacaaggagcgcatgtctgcctacatagacgagacagtgacagcggctgagagcttcagggatgcggcacagagacttcagtatatacgcaacagactgacatggaagagacttttttctgtcattgttacggatatggatgcaataagggtgaatctgtacaaacgtgagagaatcggcgatcagagcaggttccttaagtatgaggaggctgtgggaagtacgggacagtcacagggcatatatattcagttcctgattgcggttatcaattatatctccaatataaatgcggcaactcatggggcagcggttacgggcaaggtaatatttatcgataatccgtttggcgcggctaaggatatatacatatgggagcctatattcaaactgctgaagacaaaccatgtgcagcttattgttcctgcaagaggtgcaacacctgctattacgggaaggtttgatgttaattatattcttgggcagaagatggccggcagaatacagcagactgttgttgtggattatcaaagcaacattgagcgtgagaatcttgagtatacaaggattgaatatgagcagcagacgcttgacctgctgtaa

SEQ ID NO: 52125 - DNA, 1530 bp, Eubacterium eligens CAG:72
atgaagaatactatggcagagaatatgacaggtgatatcatatcggatcaccgtgaacgaatgcttaatctgaagaaatattatcctttcttcagactgatagacacatcattttctaatttcaaggatggcaaatacgaaatccttgatatgggctatatagttatggcggttctccgtttctttatagaggagaataattttaaggaaaaggatgttacatatcccgaatatctcgatttcttaaggctgatacttaagagagatttcgggcttgatttgaatgaacaggacagcaaggagattgctgattatatatttgacaagataaagaatgatggcaggccatttgaattctcgtattttgacccggtggacaggaaaaagagagtatcaagaatgaagataatcgagagttcgataagagacaataccgtgtggtattcgataagccctgatgctattgaattctatcttgataccaaggaaatcaaggacgagagcaggataagcgtatcccagcttcttcttgaaaaaatgattaattcacagaacttccgtggcggagttgaagtagttgaaagaatcaacgaagaggtcaaccgtcttaagttaaagaagaatgaagtgctgacaattctgtcgggcgatgtatttgcaggaatagaggcttatgaggaattcgtcaagacaggaatgaaatggtttgatgatgaagaaaagctttttaagaagaaccgtgaccttattgcaaaatcaatcgagaagcttaatgcatcgggcagcacaggcgaaggctattacaggacgatgaacgaaatatacagtcttgagactcagcttaagcaggcaatgaacaggcacagcgagctgttaaaggattgtacagaaatgcagaagatgaccgatgacgcagtaagacgcgccaagcttggcagattaagaagccatatggatttcacatcggcactttcagatatgattaagagggacaatgcagatatattagtcacaatgttaagtccgcttctaaagccgaacataagaaagacatttgacctgataagcattgatgatgcgcttatggtgaagcctccaagatatgaggagaaggaacttataagcaatgaaagaccggaagatatcgaattcgcagatgagattgaagaaaagagaattaaggataattacgtattccttatgaaaaatctcattgtgtgtttgaaaaaatcggacattataacactcggtcagtttgcagatgcaatgaagagggcgtatggtgagcagattctaagaaatgcagatttcttctctttctttgttaatctgtgccagaaggatgagtaccagcttggcggtaatgcgggagaagatacatttcttgatgcatacttaggggaaggctttaaagatacggaaagctttacatttgcaataagaaaagggcttggcgggcaggttatattgtcggataactgtatgatggcagatgttgaattggtacgaaaggaagcacatggagaatag

SEQ ID NO: 52126 - DNA, 717 bp, Eubacterium eligens CAG:72
atggagaatagaaatctagataaggcgctggacatagtttccaagcttatcacaggggaaaatgtgtctgagaggggcgagaatgcagctctttatcaggaatacaataataatgcagaagtgtatgacatcgttcatatgtcacttaagaaacttaatcttaacatatatgaatataacaatggtctgtatgtgagtgcaggtgataataacagggtgtttggatattccaacgaggaattaagaaatgtacttggattaagagttaataaagaattatatcttgcgtatttcataatttacaacataataacagagttttattcagatacaatgagttcaacttatgctgagttcataagacttgaggacatcattaaaaatgttgataagacaacaggtggtattgtcgataagagcgcagggcttgtgcttgatgaggttgaggagaacagctttaagcagatagcacttacatgggacgagcttccggtgacaacagtagaggatcagacaggagcgagagcagcaagaaattcaaagtcgggtatggtaaagcttgtgcttaatttctgcgttgcgcaggaacttttagttgagagtcaggacagatattatccgacagacagattcagaagtcttatagagaattattttgatgattacagaggacgatttgccgaacttatgaatggaggacgcgatgccacagattaa

SEQ ID NO: 52127 - DNA, 4434 bp, Eubacterium eligens CAG:72
atgccacagattaacagaatcagagttaataatgttaaatataatttcggtacacaggtgtacgacgatttcgtgatgcgcttcaactgccagaatactatatatgaccttgccaatggcggtggtaagagtctgcttatgctgcttcttatgcagaatatgcttcctaactgcacacttgatgacaagcagcctattgagaagcttttcagacagggaagcggtaatacatgtattcattctttggttgagtggaagttagatccatgttatcagaaggatggtttcaggttcatgacaactggtttctgtgcaagaaagggaagaggcacagacgatgagaatcaggatggacaggaacagacagctgcaccgacagcaagtgttgaatactttaattactgcatattctacagggagtttggcgataacgatattaagaatcttccacttgtaagtaatggagagagaattacatataacggacttaaggcttatcttcgtgaccttgagaagggcgggtacaaatatgttgttaagatatttgacagaaaaggtgattaccagagcttcataagcaactacggaatatatgagagtgcatgggaaattgtgcgtggaattaacaagacagagggacatgtaagaacatatttcgagtcaaattataagacaagccgtaaggttgttgaggatctgcttatagaggagattatccagaaatcctttaataacaagttgtcagttgataatgatgagggcatgatggctcagactcttatggatattaaggacaagttagtggagctttcaaagaaacactcacagcttggagcatatgacagccagattgcagctatcgacagttttaaagaatatctgtcgacatatgaagcattttacaacagaaaagaagaaatagagaagcagctatatgacctgcttcttgttgctatgcgggaaagtgataagaaggataaggaacttaagagtcaggatgaccttatcactaagatgtatgatgagcttgcacacgagaaggaagctatagcagttgcagaggttatgtctgaaaagaattcgatggcaggagttgagagccttgttaatgagacaagaaaggcacttgaactcaagaacgctgcaattgaagaggcaagaggaaagctttctttgatggagtctgcgggtgattataaagattatgcagaatatgagaagtcctataaaggacttcagattgcgatagataacagattaagagaagatacggatataacagcagagttaaagatacttgctgcaggttacagaaaattctatgagacagagaccagaagacttaaggaaaagcttgatatagcagctaaccgtgttaaggctctggaagtcagattatcagagtctaaggataaccttagaaatgctgacaaagaggcggcaggtcttggtagtctttctgataatcttgagaatgagatacaggaattacaggcacagcttggagcatctttatcagaggcaggaactgtcgtatgtgaaaatgcgtctgaagaatatgataagtcattcagggataaagaactgttaaagaatgaagagacaagaatgtccgaaaaattcaatgatgtgcagcagcagttaatgtcacttaatgagacaatatctgccaataaagcacttattgatatatttacagagcagtcagaaaagcttgaaaaggctgatgaagctggaaatgctgataacgagcgcatgggcaaaatccgtgaaatatacagtgcagataatgacgaggcaatgctttcggttattcttgagacttaccagaagatgcgcagtgaatttacagaagagtataaggcagcccaggaacttgatagctttattgacaatgcaagaaagggaacatatatctgtaagagttctgaaagagacaggcttaaggaataccttgagagccagtatggttcagatgttgttgagggtcatgagtggttcgcagccctgaatgcaggacagaaaagagatgtattaaagagaacacctttcgttgagtacgcatttataataaagaacgatttcgagagaatcaaagcagatgagatgcttaaggattttggcaagggtgcggctgcttatcctgttataagcgagcaggtgcttattgatactaagttagagattaacaaagatctgattgtattcgcattaaaggatatgtcgttcctgcgtgatgaggcaaagcttgagacacagattaagcttgcacaggaggagcttgagtcgcataaggcgcaggcaggaaagctggccgacagaatggagcttgtgtggaatgattatacatttgcacttgtatataatgctgcgtctggaaaggtggatgcgtccgaggcagaagcaatcagattaaagattgctgacagcgaggctgcaattattgaggctgagaagaagagaagtgtgttaaatgaggttaaagagcagctttcaaggaacctcgcacagacaagagatgatatagaagagaaggaaacagcatgcagcctgctctcgcgtattatggagatgaatacttctatagataaaaagtatgagcgcttaaagggactgaaggctgatgtggacagtgcaagaaaccgcatatatgagtgcgaggaggcagcagcttctgctaattctgagtatgataccgcgagagatttcgaggacagtacaagaaaggcatatgatgaaatcattaagtcatgggaggagcagtacgcaccttattatgatgaaaatgtttcaatagaaatcgatgacgatacataccgtcttgataaggatgaaatagagagcagattcaccggattaaagacagcactttcacagaagaacagtgactttgcagataagcaggcgctgatgaaccatctgtctgcatctatgaacaaatgtcgtgatgcaatagagtacagaggttatacatttgacgatattaaggcaaagtatgaagccggtgagattatggcagcaggttcacagcagttaaggaatgccaaggatgctcttaataatcttgtgaagagcagtgattctgtaagggaagagcttgagtcacaggaagcacttcttaacagacttgagggaagtatcgcacatggtattaaccagattgagaataattatggaagctttaatgaattcccatgcgatgacccggatgaattccttacacagcacaaggtacttattaagaagttagaggataacaccaaggttcaggaaaagacacgcagacagatgtctgattcattaaaagacattcttgtatgcagaaaagaccttgaaagaatcgtgtctgatgcgggcatgcatgttccagaagaattccgtcctgaggatgcacagggaattacagctaatcttacagaatatgaggctgttcataaagaatatgcttcaattaccagattagagtataagaaggttgatgaatttaataagaataaatctaagcttattgacctgcttaacggatttaatgcagtcgagcttgctgatgaagtaaggatatcacttaatgttcctgaaaatgtggctaagaccagaagtatgattgaatcgttaaatgagacgaacacatttatacagttagaaaaagaccgcattgccaagggtatagaggatatgcagatgattaaggataactttgaaaatcgttgtatccagacatgcagtaatattaagactgagcttgaccgtctgccacagttgtctaatatcaatcttgacggagaacagattgcaataatcagtttgcagattccttatataaaggaagaattatataaggaaaagatgtctgaatatattgatgaaactgtatttatggcggaaagctttaaggagcctgcggaaagacttaagtatataagaaacagactgtcatggaagagacttttctcagtcattgttacagatatgaactcaatcaggattaatctgtataagagagaaagaatcaaggaccagagccgttatttaagatatgaggaagcggttggttcaacaggacagtcacagggtatatatatccagttccttattgcgattatcaactacatatctaatatgaattcttcaggtaatgaaggtgttgagggtaagacaatattcatagataacccattcggtgcggcaaaggatatatacatatgggagccaatattcaagctgcttgcaactaatcatgtccagcttattgttccggcaagaggtgcaactcctgctattacaggaagattcgatgttaattacatactaggtcagaagctggtagattcaaggcagcagactgtggttgttgattattacagcagcacgaaggaatcagaattggaatacacgagaatggattacgaacaggctacatttgattttttgtaa

SEQ ID NO: 52128 - DNA, 1611 bp, Phascolarctobacterium succinatutens CAG:287
atgcagtacgattttttgaaggattttacgagacgcatgaaatgcgtaggcttatatgctctgctttatgataatagcagtcagaagtatatctggaaggaacggggctttaacactctggacgagcagctgaatgttattttttctgtgatgctttatattatggagcagtcactgaaggaagaaagctgtactattgataatattactgtttttttggacagtcttaacgaaaagtattataaaaagtccatgagctatgctgaatgcagtgatttggctaagttcattgttaacgtggtactgtccaacgaaggaaggccgatgtattttggcggctatgattatgagcagcaggagatgaagaaactgcacatcagctatgtcaacaatcgcattatctatgacgaacaggatgtgcgccgtacctcgtattatctcacagatgatggctataatctgcttttggggacactggaggttgaaagcaacctgaagctgacgattcaggaaatgatatttaagctacatctggagaagcaaagctatgataaggcgttggatgatgtaaaaaatatctttaacctgatgcgtattcaactacaaaaaattcaggctgctatgctgaggataaggcgcaatgctttggagtatagtgtcagcgaatatagtgagctgttatatgataatctgcagactatcgaccagtcgaagaaaaaattcaagggacatcgcgatgttgtgcaggcacgtgtagaggatttagagaagcagaatatcagcttagatagtttgccgcctgatgatgttgccaagctacggaatctgcgtgaaatagataattatttaggtcgtgcaatagatgaatatcaaaaaatcttaaataatcattttgaccttaaggccttatatacagcagagctggaaaaggtttcgcaaatgtctctggtacagcgctttaatttacgtgccgacttttatgagaagcttttaacgaagccggaatgcctgcagaatttagatatatttctacatccgttatttaataaggaacctgaaaaggctgttaatccgaatctttttctggagctgcaaagagtacggctgttggaaactgagtgggaggaagaggcaactgaaagctttgacgttgaagcttgggaggcggagcaaaaaaaactgctggaggaaaggctagcgcagtacgaagcaagcttgactgttattctgaagtatactattagcaaagatcagttgcgcctttctgagctgataaagcagcttaatcaggatgagcgcgagcgcttagtaccaaatatagcagtatttaaagagattatggtggaactgctcaaggttcaggaaattgacattgatagcatgcgcatcgagcgagcagaatttattcaggaagagacgaaggattttcgcctgcaaagtatgcttttggatattttggacaaacgtgcgcaatggcagagagtaaaaaagcttatagtacatcgcctaccggaagataatccggttttgttgaagcagcttgatgaaaatactggtgttttgaaaaatatccgttgttctgatgtcatgctgaaggcagtttgggagtga

SEQ ID NO: 52129 - DNA, 723 bp, Phascolarctobacterium succinatutens CAG:287
atggcttatcagattgaaataattaagcagtcacaaaaaatattttattacttattggagcatcacgagctacgagagaaaaaagcaccggagctacacaaagcatatattgaacaggatgaagtgcaaacgttagttaagtcgcaagcagatgctgctgatagtcatgtagaagcgtatggtggcgttatctatcttataccagggcaggaaaataatttcttaggctattctaaaggacagttgaaaaaagagctttgtcgcagtaatgctaccgacaaggattattatttggtgcagtttgttatcctggtgttgttgttggagttttatgacgggcaaggcagcagctctaagacgcgtgattttattctattgggagatttgcagaattctgtaacagacaagctcaaggaaggggcagcgcgttattcggaggatgagcaggcgcagaatggcatggcctttactgctatgcgagaggcttatgagtccttgcgttctgatgaaaaaagaaatcgtcagaaaaccactaaagaaggttttatgttcagcattttacattttctgcaggagcagggtttgatagattatattgagcaggatgaaatgattaagacaactcgcaaacttgatcattttatggattggaatctgttgaataagaataattttgagcgggtgcagagaattttaggagcggaagaaaatgagcaagattaa

SEQ ID NO: 52130 - DNA, 4425 bp, Phascolarctobacterium succinatutens CAG:287
atgagcaagattaatgctatcaggttggttaatgtaaattataaccataattccattcatatcagtgatgaaacactgcactttaatggcagaagcacgttgatttccttgcagaatggtggtggtaagtctgtactggtgcaacttttaacggcaccatttgtacaaaagcgttaccgtaatcttaatgagcgtagttttgccagctattttactacatctaaaccatcttttatcatggtggaatggttattggaggatgacgccggttactgccttacaggaatgatggtgcataagagccagaatatggataatgacgaggaactggagctgataaattttatcagcgagtataccgagccctgcgagcaggatataaatcatctgcctgttgttgagagtgataaaaaggagcttagaattaaaagctttaatgcttgtcacaagatgtttgatgattttaaaaaggaaagaataaacaggtttttttgttatgatatgaataactctgcgcaaagtaggcagtattttgccaagcttactgaatatggtatagattatcgtgaatggcagaatatcattaagaaaatcaacgaagaggagtctggtctttctaagctgtttgctgaatgcaaggatgagaagggcctggtagaaaaatggttcctcgatgctgtagaaaataagctgaataaaggcaacaacaggatgcaggagttccgcaatatcctggaaaaatatatcactacttataacgaaaactctaataaaatccaacagcaggaaaagcttattgcatttcagcaggaggcgacacctattttgacatttggcaaagagtatgaagcttcttctgctactgtcgctgttaagctgaataaaatttatgagtgcctggctgagcttaaccggttcgctgctaaaaatgaaacggaaattgctgtttgcaatgctgaattggatgctttaggtaaacaattggtgcatttgctgcatgaagagttttccagtaatttttattatgcagaagataaaaaagaagcgttaatcgtactaaaagaagataatgaacagcaaagcagtcaactggaagagcagtcacaattatgggaaaggcggcggcatattctggattgtgcggaattgcaggagcgcttaaatgaagatttgttggaattacaaatggtagagcagagagttactgtttcccgtaaaaagaataaggaccttgaaccggagcgcgaatatattggctatttgctgaaagaatatattgagcaagagctgcaaaagatgcaggagcgctttcagcaggaagagagtgacaagaaggcttgtcttgacttacaaaaacaagctaaacaggaactatcagagttaatcagcagattgaatgagctgcatactacgcagggacgtcttcaaggcttagtgcaggcttatgatgatgctgaggaaagctataataaaaagtgggaacctggcgctgctggtttgcagcgtaatatgctgggcgaatatgatgccggtgcgttaaaggttatggcagaaaagctggtagctgatgagcaggaagctagtgataggcagaaacagcagcagcagaatttaagtggcctaaaaactgcgtttagtgacttggagcgtagcttacagaattgctcaaaagaaaggggcagtaaagagcagctcgtagtagaacgtactcaggttaaaaaacagcttgatgaacagcttgcaaaacgaaaaacattactgcaatatcttcagcttgacgagaagtatctttttgataaagagtatattcaaaaagagctttccaaaaagcttttggaaatggatgaagccagaacaaagctgttgcataaattagatacagtacagaaaaagtatcaggaactgcagactggcaaaaccgtggagctgtcaactgaactggtgcagatgctggagcgtttgggaataaatattgtatatggcatggaatggctgaaaaacaataaaaatagtgaggaattgaacctggagctggtaaaacagcatccgttcctgccgtatgctttgattatgaccggcaaagaaatagaagacctgcaaagggctgaaaaaaatatttatacttcactcccggtgccgattattttacgcgaaagcttaacgcaagctacacagataaaggtcgataatggtgtccttaaaagtgcagatgtgaatttctttatgctatttaacgataatctgctaaacgaagaaaaactgcagcgtctgctggctgaattgaaggcaaagctgcagaagattgaacaggagcttcagcaacgaaaggctgaatatgatttatacagtgcgaaatatagcgagctggtagaacagagccttaccaaagaaagctatgagaggctgaaggatgagctgctttctttgcaggaggcaattgtcaagctgcagaagcgggaggagcagtgccaggcagaaaaagctgataatttactgacacaggaaaatattagccaagatttagcgaaaataggccagatgatagaaaagctgaaactgcatcaggaggcattgcaacagttgacagtaaaatatcagcaatatctgcttgataataagcaactatacgaatgcaataataccttggctaatgcagaaaatgcaaagcaaagcctggacgataagcttgaaaaattgcaaaataagcttgagtggcaaataaaatatcttgcggatctttcaggtaacatgaaagctttagatgatgaaatggctcaatatgcaggctataagcaggtgcctaagccaaaaaattttgctgatgatattgcgcagaatactgaatccttgaaagcacggttaaatagcattaaggaaaagctttccggagaattaagagctcttgaggataatagagcaaatctcgcaagaaaggtgaaaaaggttgaacaaaagctgcaagatagagcaaatcgttttggactggaaagcaaagaatgggtgaatgagcgttatagcgaagctaaaatgcaggagctggatgcaaagcagaagcagttgactcaagataagaaaaagcttggagaagcacgtatagatattgaaaaaagattaacacaggtgcagggggagcaaaataatattctcagacagatggaagaaaaatgccatgctgttgagcctttgcctaaggatgaagttgttgagaaaaatttttcagaagagaaaaatatgcttcagtataagcgcactctaaaggaagagttgcaaaaatccttgggagaacaggagcagaatattagggagaatattgttggcttggctgaatatagtgaaggagcgacaaatgtagagtggtgtgaaagctttaatttggaggatttttcacaagaagagctgtcaagctatacgttatcgttgagaaaagaatataagactgctcaggtgcaggaagatgaggcgaaacgaaagctggagcaggctcttatcaggttgcgtaacgtagaagcatttcaagaggattcttataaaaaatgcatagatatgttgcaggagcttactagcgatgctcagatctttgtaaagcagcttaatgctgttttagagtcctatgtcagaatatctgaaaagctgcaggttgatattgctatagttaagcaggaaaaagaacaaatcattactcagttagaggattatcttaaggaagttcacaagcaattaggatatattgatcgcaattctagcattcaaattcgtggtcattatgtaaaaatgctcaaattgcagcttcctgactgggaggaaagcgctaatatttatcatcgtagtattacagatttagtagatacaatagcggaaaaaggattggcaaaattaagcaaaggtgaacccctcactgaactgcttggtaagctgttgactaccaaagaacttttcgatgccgttgttggtattaataatgttcatgtgcagatgttcaaggttgaggcgcaacgtgaaatacagatttcctggcgtgacgtagcacgtaattccggtggcgagggctttttatcagcatttgttattctttcgagccttttgtattacatgcgtcgtgatgatgcagacgtttatgcagaccgcaatgaaggcaaggtactaatgatggacaatccgtttgctcagactaatgccgcgcatctgcttacgccgttaatggaaatggcagcaaaaaataatactcagctgatatcctttaccggacttggtggtgaatcgatttataattgttatgacaacatctatgttttaaacttgatttcgtctaagctgagtaatatttcttatttgaaaagcaagcatattgccggtaatgatggggagtttctgagtctggcgcgtgttgaggtgaccgatgaagggcagatggatagtctgttctaa

SEQ ID NO: 52131 - DNA, 984 bp, Phascolarctobacterium succinatutens CAG:287
atgaaaaagcgcaggacattggaagaaattttaggcagtaagattaatgctgaatatagcgaacagcatgcttatatcatggagcttgtgggtagtgggcggataaagcctgtacttgcgtcgaagaaaaacggcaagaagccatcgttgtatcgggaatactgggagctggaggagaagcaggattattcagcgttaaaacaggagcttttgtttaacctggctccgcaaattaatataacatattatcagaataatcttgtagcctataataaagaacgcaaggatgttttacagcttagcagtttcttgcagaacagtgctgctctacttacgaagcaggtttcttataacgagcgcagcttccaaatctggcaaagggaaaagtttttgcttcagggaacaggcaaaaaaatattgagtcactgcggtttggagcttgctaaactaaactgttacagtactgctgaaccctttgcttattttgctgcaacacgcgcagtaccgcaaaagctgttgattatagaaaataaagataccttttttagcatgagaaagcatctgctggcaggaaacaaccagcttttgggagaaaatataagtactgttatttacggtgccggcaaaagagttgtcagctattttcaagagtttaacgccagcgctgaaccatacatgctggcagacggaaatgagctgttgtactttggcgatttggattacgaaggcataggcatttatgaaacgctggcagaaagctttgcagagcagggggagattaaaccgtttattcctgcgtatctggcgatgctggcgatggcggataattacaagcagctgccgccgacgaaaaaagaccagaaccgtaatctgcagggagctttcttccgttattttcccgtaaatgcgcaatcgcaaatgcaaagtattttgcagcaggatttgtatatcccgcaggagattttgacgataagtgatttttga

SEQ ID NO: 52132 - DNA, 1596 bp, Clostridium sp. CAG:230
atggaatatgattttttgcagcaatttgccaaaagaatgaacagcgtcggaatgtatgcgatgcttatgaaaaacagttggcagaaaacaacatggaaaacatttgatattgagtctgtggaagaacagcttaatatcattttttctgtattgctctatatgatggagcagtcgttagaagaagaaatctgtacaatagatgatattgccgcttatctggatgatatatgcaatcattttttcagaaagcggtattcttttgaacaaagcaatgcattggcggattttattgtaaacgttgtcttatcggatgaaggccgggcaatgtattttccgtgttttaattttgagaaaaaagagtatatcgatacgcatatcagttatatcgaaaacagagttgtttatctggaagatcagaccaaaagaacctcatataagctgaccgatcaggggtataacttaattctttctacattagaaatggaaggaaatatgaaacttagtgtgcatgagatgatctttcggatgcatctggaacgttctacttatgaccgggcattagaagagatcaaacatatctttaatctgttacagatccgccttcaaaagaacgaggaagcattaaacaggatacgacgcaacgccttggaatattcggtagcggaatatcagaaattattggaagaaaacttggaaacgatcgaacatacacaggatgaatttgaaggatttgcaaagctggttcgcaagcgcacactggagttagaacaggcaaatatcaatgtaaaagtattaggaaaagaagatgccaaaaagctttccgatctacaaaagatcgaacgatatttgcaagatgcattggcaaaacaccaaaagatcctcggaatgcattttgacttaaaagaattatataccagggaattagaacagttgtcacagatggctatgatcaaacgtttttctctgcgcaaagaactttttgacaaagtggtcgagcatccggggaggcttaccaatctcgaatattttcttcgtccgctttttatacaggatcctaagaagatctataacttaaaccgctgtctcgaaccgcaaaaagtgatccgaaaagaaaaggaagaagagacacaggaattgatcgaattcgatgcaaaagagtttgaagccgagaaagaacgaaaagcaaaaaaacgtctgcaaaagtataaagaaagcctgcaaatgatgctagaacttgcatatataaaaaagacaattaccttaaaagagattgccggtcgggaagctgctattcagaacaagattgtttgtgaggtcggtatttttaaagaaatcatggtagaactgatccgaaacaaagaaatcgaccttgttgcactacagcaggagaaaaaggaaagttttgatgacaattctttgcaatttcatttacaggaaatgatttatgagattataaaagaacagggctggagtgctacagacattatagtcgaaagaatggaaccacaggaaacagttacttttgaaaatgtatcggatcgggagaatgctcttactacgatacgctgctcgaatgtaagtattacgatagcataa

SEQ ID NO: 52133 - DNA, 726 bp, Clostridium sp. CAG:230
atggcatatgaaatggaagagatacagcagagtcaggaaatcttttatctgttgttaaaagagcatgagatcaaagaagaaaatgagaaagaactttttcgtgtctatacacaaaataatcatgtgatgaatcttgtaaaaagtcaggcgacggcagccgaaagtctggtggaacgttatggagatgtgatctatctgatccctaaagaagaaaatgaatatttaggatttacaaaacaggaattaaaagcacagctttgtcgttcgaatgcaacagacaaagattattacctgtctcaatttgtgatcttagtgctgttgacggaattttatgatggtcagggaagcagcagtaaatcaagagaatatatgaaagtcggagaacttttgaatcttgtgtcggattatttagtcgaagccggagaaaatatggaaccggaggaagaagaaaagacaggacttgctttcattaatatgttagaagcttatagcgcattacgaagtgatgagcatggttctaaagcacgtaccacaaaagaaggctttgtttatcatgttttgcaatttttacaaaagcagggactgatccattatgtagaacgtgatgaaatgatcatgacaacgaaaaagttagaccgttttatggactggaatcttttgaaccagaaccattatgaccgggtacaaaaagtgcttgcggtatggaaggaggatgacaatgagtaa

SEQ ID NO: 52134 - DNA, 4413 bp, Clostridium sp. CAG:230
atgagtaagatcaatgcaattcgtctgatcaatctgaattataacaatgattcgatccggattgccgatgagacatttcggatgaatggagaaaatacgttgttatctttacgtaatggtggcgggaaaacggttctggtacagatgatgacagctccttttgtacataaaagatatcgtgatacaaaagatcgtccgtttgaaagttactttcagactaataaaccgacattcattctcgtagaatgggaactggatgcaaaagaaggctatgtcctgaccggcatgatggtccgaaagaaccaaaatgtgtcggaattacaaaatccggagaaattagagatcatccagtttatcagctattacagggaaaattgtgagcgtgatctgtatcatttcccggtcattgacaaaaaagaagatcatatgacgttaaaaggttttgtgcaatgtaagaagctttttgaaaattataagaaagaatttccaacagagttttttgcctatgatatgagccagccggcacgcacaagacaatactttgatcagcttcatcaatatggaattcattataaagagtgggaagggatcattaagaagattaatctcaaagaatcaggtctttccgaactttttgccgattgtaaggaagaaaaaggattggtggaaaagtggttcttagatgcgattgaaaataaattgaacaaagagactaaccgcgtgcgggaatttcagacattgatgatgaaatacattcgtcaataccgtgaaaaccagacaaagatcgaacgtttagaaaatgtatcttcgtttcaaaaagaagcatctgccttacagcaggatgcaaaagaatatctttcgatgacaaaaagccgttatgacaaagaggacagactgactgcattttaccgggaattagtcggtctttgtcagaaagtacaggaacaggaaaagcagactttctcacagatggatgctctgaaagaacgttcgacacaggtattgtatgagcagatctcatatgatatctatcgacagcaggaccttcttttggatcatgaaagacaaaaagaagcattgcaaaaagagcaggagcagctttttacagagcaaagaaaagtacaaaaagaaaaagcaatatccgatgcctatgagctgttcaaagaacaaaaagatgccagagaagatatcaaaacattttcgagtcatttggaattttcaaacaaagacaggacacaaaaagatgccgaaagagagcgtctgggtgccattctggctgcgcaatatcttgcattggcgcagaaaaaagaaacagagttagaacagcagaaaaaggaatattctacggatgtagaaaaagaaaaagagcttactcatatgacagaggaagccaagaaagaacaacaaagcatacagcttgaaatcgcaaaatgcaacgaagcgatccggtcttttgatacagcagaagagcaatttgcaaagcaatatgataaagctttggttcgaaatatcttaggagaatattcagagcaggcagttcgtcagatgcaggaagaaattgcacaaaaaaagcaggataagaagcaaaaacgcttacttgtattgcaacaaaagaaccagactgaagaagcattttatcatacaagccgtgcgttagaagatctgcgcagcagacagttagatctttttaagcagatagaaagagcggctgcaaaaagagaagatatcgagcaggaatatcaaagccgggcagatattttgcaacatttagaattatcggaatctgctttttatgataccggtcttttgttagatgaaattcaaaaaaagattgataaaacagctgctgtcaaaagaaacttagaacgtgaaaaggaagtcttgttacagggaaaagaaaacttgaaaacaggtgtgacaacaacactttcacaggaatttgtttcttttttagaacaacaggagatcccggttgtttatgcagcacaatggatcgaacaaaacatttcggacagtaaaaagaaaaaagaattatttgcacaaaatccttttctgccttatgcacttttgatgaagaaagaagaagtacaaaagcttgctttggcaggagaaaaaagaatgcttgcctttccgctgccgatcgtggagtgggagaagttagaacagtatcgtttctctacacaaaaagggctgactacgatagattctattcatttttataccttttttgaagatgtcatacttaccaaagaagagagagaagaaaaagaaaaaagttatgacaaaaggatcaaaaaaatacaggaaaagtggacgatccgcaatgaagaatatgaaaaatatcttgcacaaaaagatatgatcggcaaacagacgttagaggcagacagcttaaaacgggtgcaaaaagagtggcagcaattaaaaaagaaagaagaggctttacagggagaagagcatttattgaataagaagagcaatactctttttgaagaacaaaaagcaaagcaggaagaactgttagaaacacaaaaagaattgcaattagcgatgcaacaggaagaggcattacaagaatggcttgctgcctataaaagttatcaaaagcagcgagagaaaaaagatactttgtcagaacgtctgaatctgtcatcacagcaaaacagcgagcagcaaaaagaactgctttctttacgggagcaatgcaaagaagaagagcaggcgatttttttacaggagctttcgcttgaaaaattgcagaaagaaaaagagaaatattcttcttatcaaaatgataaagagacagaagaagttacacttctttcagaggatgtattagcagaatgcaaagccggttttgaagcattaggaatggattcacatcaggaaaaagcaatgttagaagaacagcttgcaaaggcaaagatccgtttggaaagacatagtaaagcattagagaagcttttaaagaaacatcatctgacaaaggaagaagtacaggaaaactatcgtccttcttttgtaaaaaagatggaggcaaagcaggaagagctttctaagaaagaaaatgtattagtacaaaatttacagacagaagtcgcacagattgcggttgcaaagtcacgtatcagtgatttgaaagagaaacttcatctgaaatgtaatcagacagaaccattgccgaaagaaaaggtaggaagcagtaattttgaacagagaaaagaagaaaaccggcaggaatatatcctgctagaccggaagaaagaggaattgcaaagaagaaggctttcttacgaaaacagtatacaatcccttgctgattttaaagacaaaaagatgcgtcaggaatgcaccttcaaagaagattttctgaccatggaaatcagacagacagaagattttcgaagtgcattgtggaaagagtatatgcagagtatgaaaaaggagcaggaatcacgtgatcagattacaaagcagcttcatcttctgctttgtaccaaagaattcatggatgatttttttgcaaaaccattgcatgcattgagtagtctgactttggatgcatctgctttcttgcgacagcttgaaatgatcatagagtcttatgaaagcctgtcggaaaagttaaagatcgatattgcaatgattcagaaagaacgcgaacatttagcaggacttttattggaatatgtaaaaaatattcatcaaaaccttggaaagatcgatcgtaattcaacgatcacgattcatggcaaagaaatcaaaatgttaaagatccatttgccggattggaaacagaatgaagaagcttatcggatcaatctcgaggatctggtgactaccgtaacacaaaaaggacttgcgttattagacaaaaacgaaaacttagaagaaatgacaggagtttatatcaacacaaacaatctgtatgatacggtcgtcggtaccggaaatgttgagattctcctttacaagattgaagagcagaaagaataccagatcagctggtctgatgttgcgaaaaattcgggtggagaaggtttcctgtcggcatttatcattttaagcagtctgttacagtatatgcgatgggatgataccgacctttttgcaaaccgcaatgaaggaaaggtgttagttatggataatccgtttgcacagacgaatgccaaacatctgttaaaacctttgatggatatggcaaagaaaaccaatacgcaattgatctgcttgtccggtcttggcggtgattcgatctacagctgttttgataatatttatgtattgaatctgataacagccaattttgggaaaagcatgcaatatctaaaaggggatcatatgcgtggagcagaaccaagcacaatgatcgcatcaaggattcaggtagagcagcaaagcttattgttctga

SEQ ID NO: 52135 - DNA, 1569 bp, Firmicutes bacterium CAG:882
atgccgcaggagaatattttagtaaatgatataatttcagaccacagagagcgtatgctgaaccttaagaaatattatccgttcttcaagctgtcggaggtgtccttttcatggtataaagagggcatatacgacagtcttgatatgggatatattcttatggcggtgctgcgcttttttattgaggaaaataattttaaagagagagacgtgacatacgctgagtatgccgaattcatgaaccgatgtataaggcgtgattttaagctgaatccgccgcagggtgacatgagcatacttgtggactacatttttgataagcttaaaaatgatggcaagccttttgtgttccattattttgatcccgttgacagaaaaaagaagatatcaagagtacggcttatcgagagcagaatagagaatggaagcgtgtggtattcgataagcgcggagggtattgagttctatcttgacactaaggaaatcagggatgagagcaggataagcgtggaacagcttctgcttgagaagatgatacagtctaaagactttaagggcggaaccgatgtcgtgaggagaatcaacaaggaagttgacagactgtgggttaagaaaaatcaggtcatggcacttctgtcagcagatgtctttacgggacttgaggcgtatgaggagttcttcggcacgggaatcagatggtttgatgaggagcagaagctttttgtaaagaactccgagctgattgatgcggcacagagaaaggcggagagcgacaagggcaatgatgattacggctcgtatcttaagataacgggtgagatatatcagcttgacacagagcttaaaattgcaatgaacaatcatcttaagctgttgtcggcatgtacacagcttggaataatggcggacgagatggtcaagaaggctaagcttgggagattaagaccaagctttgattttagaaatgcacttgagcttgccatgaagaaggatgatatggagcttctcgggaatctggtacgcccggtgatgggacttaagcttatcaagacctttccgattgaaagaatcggagacatgataacctacagaccggagcgggaggagcaggcggagcgcattgaaaatcctgccgtagagaacattgtgtacgacgatgagcttgaggatgcgagaatcagggataattatgcggcacttattaagatgcttcttgcaatgctcagacgccgtgacagcttcgaccttcgcacattcaacgaatttgcggtaaaggtgctcggggatacgctttttgagaacggggattactattcctttcttgtgcatctttgtcagaagaaggagtatgtgtttgagactgaccgacagagcatggagacttttcttgacgagatattccgtgactgcgcggcgaaggatgaatatgcggagtaccttggaacacatttttcgattgagccggcaggcggtgatgagattgaaataagtgccaattcgcaggacaatgcactgccgttcacgataacgaacataatttttaggaacatacatgacagtgaaatataa

SEQ ID NO: 52136 - DNA, 729 bp, Firmicutes bacterium CAG:882
atggaagaccgcagcttggaaaaagcgcttgagattgcagcaacacttatcagaggtgaagcggtaagctcaggcgagaacattgctctttatgaggaatattcgtcaaattcacaggtatatgatgcgctcaggctgattttaaagaagttcgacatggagctttatgaatataataacgctctgtttgtcagcgcgggtgagaacaacagatgtttcgggttcaccaatgaggagttgagacgtgctctgggagttaaggtcaacaaggaactgtttttgtgttatcttataacatactgcgctatgacggaattttacaagacctccggaaattatacatacacggagtttgtcagacacgaggaggtcataagggcggttgacaatgtgcttgcgaatgtgattgaccgctcggcggggctggtgcttgatgaggtggaggagaacagcttcaagacgcttgcgctgctgtgggatgaacttccggtgacatcgactgacgatatacagggacagagagccgcacgaaattccaagacgggatatgtgaagctcaccttcaactttctggtgagccagggactttttatagagaatcagagtaagtactatccgactgacagattcaaggcgatggctgagaattattacagcaataacaggggaaggctgtatgagattttgacgggagacaacgaagaggaggaagaaaatgccgcagattaa

SEQ ID NO: 52137 - DNA, 4425 bp, Firmicutes bacterium CAG:882
atgccgcagattaacagaatcagggtaaataacataaaatacaatttcggcacacagtattacgatgatttcctcatgcgtttttcgtgtaaaaatacaatctatgaccttgcaaacggaggcggaaagagtgtgctcatgctgcttcttttacagacgatgctgcctaactgcacactcgacgaaaagcagcctgtcgagaagctttttgcgacggcgggaggaagcaccacgatacattcgcttgtggagtggaagcttgattcatgtgatgtaaagaacggttacaagtacatgacatgcggcttctgtgcgagaaagggaagagccggcgaggacgaggaggagacccaaaagggagcaggaatagaatattttaattattgtattttttacagggagttcggcgataatgacataaaaaatcttccgctttcaagcggcggtgagagaataacctataatgggcttaaagcatatcttcgcgaccttgagaagaaggatttcggagtgaaggttaagctgtttgagagaaagggagattacctcagctttataaacgaatacggaatatatgagagtcattgggagcttgtgaggggaatcaataagacggaggggcatgtccgtacttattttgagagcaattataagacaaccagaaaggttgttgaggatcttctgattgaggagataatagagaagtcttacaacaaccgcataaggggcggtaacggcgatgacgagatggcaagaactctccttgagataaaggataagctcttagaacttgccaggcgcagggaggacattgacaattatgagaaggagcttgccctgctaaatgaattttctgccaaggtcaatgattttggcggtgtgttcgcgcgcaaggaggccgggaaaaacactctttttaagtacctttttatggcaggggcacaggtggcaaaaaaagaaaatgatgccgcaaggctttccgaaaagctgtccgggctgaagtctgcaagggagaacgaggaaaggcttattgccgcttcgctcatagctgaggaggaagcagggcttaaggaggtgcgtgagcttgttgacagtctgtctgagaagaatgatgccatgtccgctgaatatgaaaaaaagcgcgaggagcttgaaatgtcctacgccgctgaggattatgcggattatgtgaatcaggaaacggagcttttgaggcttaaagaatatatggataaccgccataaggacagaagccagattacggatgagatgcggaggcttgccggtgcgaagcatctgtatatggcacaggagcttgcagacagcgaaaagtcattgaatgacctgctcggaagggaacgcgagagcagggaggcactggaaaacctgaatgaaaatttccgtatcaaggataatgaatgtgcaagagcggagggcatcattgtcagtctgaaaaagcaggttgaagagcttgaggatgatattaaggaaaagctttcaaggacaccgcttcttgttgttgagaatgcggcacaggaggcctgtgaatatgcggagaggacggatgaactgaaaaataagcttgcagcactctctgaggaggaagcacagctcaatgcgaagaaggagagctgcataagggagcgcgcacagacggacgcgtcacttgaacttacggctcagaatttagacagaataagtgaacgtctttctgctgcaagacagagggaaaatgaactcacggcacttggaaaggtgtatggtgagcctaatcatgagaagctgacagcggtgcttggccatttctatgataatatgctcgctcagagagaacagcttaagaaaaagacggactctgtaagagagtatataagctcaatagagaatcttaagccggcggactctaagggtgttcagaagctgtgtgggtatcttcagagcagatatgaaggaagcattataagcggggctgagtacctgagaaataagaacagtgatgagtgtgccgagcttgcgggaagatatccatatcttccgtattccgtgcttgtaggcgatgattatgggaacatctgccgcgataagaatgtgatgacaatggactgtggtgttgtgccgataataaagcttgatgcggttgagggaacaacagatgctcatgatgcggatgcatacatgcttgcctgccgtgatttatcattcatatatgacgaggcgggcagaatgtcaggcatcagaaaggcatccgaggagcttgagcaggcggtgcaggagcttacaaagcttgaggacagacttgcggttgtcagaacggactacgagcgcgtgagcggatatgcgtgtactgcaggagaaaatgcagcggagcttgagggcctgcttggaagggagaagcacaatgagggaggcctgagggataaggcagataatttaagagagctgtatgatacacttgaggggcgtgaaaaggagctttgcgagagaagaataagacttgaggagcagcttgcggaaaatcttaggataaaagaaaatttagatgaccttgcggagcttaacagaagccttgcagagtgtcatcttgagattaccgggaatgaggctgtcaaagatgcggcggttaaggcgcgtaagctctcaagggagcttcatgacggaagggaaagggcatataatgagcttattcagcgccgcacgggaatacagaagaatatagagaatctcaaaaacacatgggcgatgtatgagccttattacaaggaagctgatgatgcagttgaaatgaagctggttccgtccgcggagattgatgcccgttttatggcacttcgttcccttttaaacgaagagctgggtgacatcacggacaaggaacgtcttatggagaactgccgcacggcgatggataaggcagtgcgctctatgcttcaccgaggaataacgcttgaaaaggcaaaggagcttgccgctcagggaggattacaggtcaagaaccatgaggacattctgataattaccgaggagcaggataagcttaagcagagcatcagggatgtacagagcgagcttgacagtgcgagtgcacagatgaaccggattgagggaagctgtgctcatgcgagaaagaattatgaggaacactatggtacgttagatgcagagcttccggataatccgcgggaatacacaagacagcatcaggcggagcttgaacgtcttaagaaggagctgtcggacattcaggcggaggaaaagaaaaatctgcaggagcacacagcatgcctgcttatgcagaaggatttagagagaatagtgaagtccgtaacacctgatgcggatgacattataaagaaaaaatcggccgagtatgccgagagtgacttgtctgaggagctcacggatgcaaagtacgaggaggcgggacgcagctttgaggctgtgttaaaggatgagcagaagaagcgcacggcatttttgagggcgagggatttactcgtcgaccggttaacgatgttgaaggcttatgagcttgcacaggagattaagcagaatattcagcctccgcagtcgcaggctgaggcggatgaactgtccgatgcactcaggggaaccgccggctgcatagtgcttgagagagacaggataagccgcggtatagaggatatggagcttatcaagtcaaatttcgagaacagatgtgttcagatatgtaccaatatccgttcagagcttgaacgtctcgataagctgtcaaggataactctcgatgatgaggttattccggtgctttcacttcagataccttatatcaaagaagaaatgtataaagacagaatgtctgtatatattaatgagacagtatcatcggctgagaattttaagacgattgatgaaagactcaaatatataagggggcgattgagctggaagagactgttttccgttatagtcactgatatgaacagcataaggctgaacctgtataagagggagagaatcaaggatcagagccgttacctaaggtatgaggaggctgtgggaagtacggggcagtcacagggtatatacattcagttccttgtgtcaataatcaattatatagcaagcataaatgcaggaggcaaggaggcggctgttctcggtaagaccatatttattgacaacccgttcggtgccgcgaaggacgtatatatctgggaacctatatttaagcttttaaagacaaatcatgttcagcttatagttcctgcaagaggtgcaacacctgccattacgggacgattcgatgtcaattatgttctcggacagaagcttgtcgataaaaaacagcagacggttgttgtcgattaccacagtcaggttgcggagcaggagcttgagtacgaaagactgagcttttcacaggaaagttttgattttctatag

SEQ ID NO: 52138 - DNA, 1617 bp, Eubacterium hallii CAG:12
atgcaatatgaatttttaaaaaaatttcctcgaaggatgaaaaatgtaggcctatatgctgtcattatacagaacagcagtcagaagttatcatggaaacagtatggattcacaaagttcgatgaacagataaacctgctatttgaagtgttgctttacattatggaacagtcactaaaagaggaaaaatgtacgatggatgatatagcgacctatatagatacgattaatgtgcagtatctaagaaaggatatttcttatgaacaatgtcatcaacttggggattttatcgtgaatacagtattgtctaatgaggggcggccgatgtattttgggggatatgatttcgaaaaaaatgaatatgaagagatgcatatcagttatgtggctaacaaaattgtctatgtggagaatgaggtcaggcgaacttcatattatctgaccgatgatggttataatcttcttttgtctacattggaaatagaagataatatgaagtttaatattcatgagattattttcaggcttcatttggaaaaacaaagttatgacaaagcggtaaatgatataaaaaacgtgtttaaccttatgagaatacagtttcagcgagtgcaggaagcaatgcgccagattcgcaggaacgcattgagttattccgttgatgagtacgaagaagtactcgttggaaatctgaatacaattacggatacaaagaaaaaatttcaggaatataagacagttattcaggagcgtgtaaaagatttagaagaggaaaatattaatatacgtaagctaagtaaaaaggaacagcaggatttaaataatctccgggtgattgaggagtatctgacaagagttcttgatgaacatcagaaaatcttgaacagtcattttgatttaaaaatattgtatacagaggaattggaacgcttatcacaggcaaggctgatacagcgtttttctatgagaagagatttatatgataaagttttaaaacaggcagatacattgaaaaatatggatatgtttttacggcctctttttaatagaaatcctgagaaaatttataatctgaacaaagcattttcttacgaaaaatcagtaaatgccggaatggagaaagataccgaggaagaagtggattttgacgaggaagcatttcgcagggaaaaagaagaaaagttacaaaagaagcttttagtttatgaaaagagcctccaatatttattagaaaaggcatcggttacgggagaagtttctttaggacagttaaaggacagattggacatttatccagaagaaaaagagatttttataccaaatgtcgatgtatttaaagagattatggtagaattgatccgaaatcgaacgatagatatcgctactctgaaaaaagaaagaagagaatatattcaggaacagccagatggatttcagcttaacgaaatgattttaaaattagtggaagaacagccggaaaataacgatataaccagcattgaagtagagcggctggaaaatgaagaagcgattacattttcagagataaaagatgaagaaaatcggaggaaaacaatacgctgttctaatgtattaatacggatttttaggaaatag

SEQ ID NO: 52139 - DNA, 732 bp, Eubacterium hallii CAG:12
atggcatatacaatggaagatatcagaaagagtcaggagatattttattatcttttggaaaaacacgagcttcgggaagaagatgagcaagcgctgtacaaggcatatacggaggaagaagatattcagaatatcgtgaaatcgcaagctgagaccgcatcctgtgatattgagcgttatggtaacacgatttatctgattccacaggaggaaaataattttctggggtattcaagagtagaacttaagaaagagttgtgtaaatcaacagcgacaaataaagactattatctggcacagtttgttattctgacattattaacagaattttttgatggtgatggaaacagcagcagagcaagagagtatattcgttccggtgaacttatgaatattttgtcggagcgtctgcgagagggagccgcctatgaggaagagcataacgaggaagaaatggatactgcgggaatttcattttctgatatgtgccatgcatatgaagcgttaaagtcagatgataaaggttctcatgcgaaaacgacaaaggaaggctttttgtataatattcttcttttccttcaaaaacagggacttattgagtatatagagcgggatgaaatgataaagacaacgaagaaactagacagctttatggattggaatctgttaaatcagaataattatcagagggtaaagaatatattgggggtgattgaaaatgagcaaaattaa

SEQ ID NO: 52140 - DNA, 4470 bp, Eubacterium hallii CAG:12
atgagcaaaattaatgcggttcggtttatcaatcttaactataacaataatgcgatgaaaatcaatgatgaatgtatgcagtttagcgggaaaagtacacttctttcattgagaaatggcggcggcaagacggttctcgtacagatgatgacggctccttttgtgcatagaggcaagcaaaaaacaaaggacagaccgtttgagagctattttacaacagcgaagccttcttttattttggtggagtggctgcttgatggtggagcgggttatgttcttacgggattaatggttcggaaaaatcaggaaattagtgaggaaaaaacagatgcgcttgaaatgatggcaattattagtgaatataaagagccttgtatgcaggatattcaccatttgccagtagtagagcaaaatgaaaaaacgatgaagttaaaaagctataattcctgcagaaagctttttgaggactataaaaaagataagaagctttcctttttttgctacgatatgagcagcccggcacagtcaagacagtatttttataaactgatggagtatcagattaattataaagaatgggagacgattataagaaaggttaatgtcaaagaatcaggattgtcagaactgttcagtgattgtcggacagaaaaagaactggtagagaaatggtttttagaggctgttgaaagtaagttaaataaagaggaaaataaagttaaaaattttcaggaaatactcgaaaaatatgccggaaaatataagaatattaaggagcagctaaagagaagggatgccattcagaaatttaaggaagccgctgaagaaatacagataaatgcggaagattttcttgtaaaagagggagaaaagatagagcaggaaaaagtaatcgctgcttttatagcacgattaaatgtgttgtatgaagaagcggaaatagagcgggaacggcaagaagagggcagaaaaaaattgcaggaagaattagaattcttaaaatacgaacaattatcctgtgaatttcatgaaaaaaacagagaaaaaagaaatcatgccagcaatcgtgagatgatagatttagagaaagaatcgcttcttagaaaacaagaaaaaatacagaagaaagttcatgtatttctctgtgcaaaacagcaggagatggtcaatgaggataaacaggaatgggaaattcgaaaggaaaaagctgcaatctcccgtacaaaagaggaaaatttagagccggagagaaatagaatcggcggacagttaagtggatattatgaatatcgattaagtgataataaagaaaaacaggaggcgataaaaaaacaaaagcttcagataagaaaagacatttcacagcagaaagacattttaaatgaatatcgggaaaaaacaaagaaaataacagagagtaaaggaagtttccggagtctggtcaggggttacgataatatagaaataaaatataattccaattatagagagaatctttccagaaatatattgggagtatatgaagcaggaatgcttgatataaaacaggaaatgtatgataaagagcagaaaaagagcattcaggaaaacaaggaacagaaagaaaaattcgaaaatacgactgaggagattcacagaacggaaagagccattgaagaaaaaagagaaaagtattttcagaaagatagtgatataaagcaggcagaaaaagagaaaaagggatatgaacaggagcttgaggaaagaaaagacattcttaaatatcttgaattgccggaagaaaagctttttgccagagaagaaattctccataaggccaaaataaaaatgcaggagcttagtagcaggagaagaacgctggaaaagaaagaagatgcattacaaaaagagtataaactcttagtcagtggtcgggtaatggaacttccagacaacttgaaagaagaatttgaaaaattagatgttccggttgtatatggaatggagtggctgaaaaagaatggatttacagagaagaaaaataaagaaattgtaagccaaaatccatttttgccatatgcacttattttaactcgtcaggaactaaaaaagctggcagaaagaaacggagagacatatacttcatttccggtaccgattatagagagggaaaatcttgaatctataaagttagatagaacacaatcttttgtaaaaatgcaggatattcatttttatattttgtttaatgaaaatcttctggatgaagaaaaaatggagattatgatagaacaaaagcaaaaagatattgctgacattcgggaaacgatgcaaatctgtaaaaatgaatatgaagactatttccatcgttttgatgtgataaaaagacaggcagtaaccaaagaaaactgggataaaatacagaaaaaactacaaaaactggagaaagaaaaagaagacattttccagaatatacaacaggcaagagatacaaagcaaagcttaaagaaaaactttgaaatcctgcaaaaaactcttagggaattggagaagaaaattgaatcacaggcagccagacaacgcgcatttaaagaacttagaacggcatatgcagagtatgaggaaaataataagaagcttcaggaatatgaaagagaagaagaacgattagaaaatcgccaacatcttacagaagaaaaaatcagccagcttgaagaaaattatagagaacttagtggacaggagaatagtctgttcagggaggaagagtctattcagaattcctgtcagaagtttgcagcgtataaggagataaatagaaatgtaaaagcaggtaagcttttaggtgtagattctacgttgaggacagataataattcaggtgtaaaaatcattccaagtgaggcggaagttcttaaattagaagcaagatatgaagcggttactgcagacatttcccaggaattaaaagagttagaattagaagaagaaaaggccctgacccgctaccacaaatctttcggagaattacgggaactatgtcaaaaatataatctgaaaaactcagaatggcaaaatatcatttatgacaaaagagagcagctttaccaggaggcagagttagaagattacgataagaaaatagagcgaaaagcaaatcttctaaatgaggaagataaaaaaataggaattttaaacagccagttagaagggattttaaagcagatagtatcagaatgtggaaaaggagatcctttagaagaagaaaaaatcagccagaaagatttagaaagtgcaaagaaccagacgaagtatcaactcagcgaattagagcggaaaatagcattttctgaaaaagcaatacagaaatacagagagaatctcacagcactttctgaatataataatttttccgcagatgaagaaatccattttgagcaggacttcaaaaaaatgagtgaaaaggaactgcgtgattttaagggaatgttgatcagagattataatgatataattagatgtgttcagaaatgcagagaaactcttgcacagacattaaataaaatcgcgagacaggaagcatttcaggatgcaagttataaaacgcctcttgaaaatatgcttaaagtctgtgacaatgcagcgaaagttttacgtcagttaaacatcaccctggaatcctatgattcacttatgaagcagttagaagtagatatttctctggtagaaacagaaaagaaaaatgtaacggaacttctggaagattatgtccagaatattcataaaaaccttgagaagataggacgtaattctacaataaaaatacgggaaaaatcaataaaaatgctaaaagtcattttaccggtatgggaagataatgaaaaattatatagcctccgcttaagtgatcttgtggacgaaatcacagaagaaggtatccgtttatttgagaataacgaaaatgcccaggaatatatcggaagaaaagttacaagcaaaaacttatatgatactgtggtgggaactggaaatgttcagattcagctttataaaattgaagaacagagggaacagcagatcagttggaaccaggtagcaaaaaactcaggaggagaaggtttcctgtctgcatttgtcatattatcaagtttgcttgactatatgcgaaaagatgattctgacattttcatggacaaaaatgaaggcaaagttttattgatggacaatccatttgcccagactaatgcagaacatcttttaaaaccattaatgaatcttgccgataaaacaaatacacagttgatctgcctgacagggttaggcggcgaatccatttataatcggtttgacaatatttatgtactaaatcttattgaagcacatcttagaaatggaatccagtatcttcgtccggagcataaaaagggagaagaagtaaaagtggaaacgatacttccaacacatatagaagtggaagaaatgttgttttag

SEQ ID NO: 52141 - DNA, 981 bp, Eubacterium hallii CAG:12; identical to SEQ ID NO: 51804

SEQ ID NO: 52142 - DNA, 1548 bp, Eubacterium sp. CAG:248
atggcaggaagtatgataggagagataatcacagatcatagggaaagaatgcttaatcttaagaagtattatccttttttcaggctcatggacgcttcatttgaccagtataaggatggaaagtactgtgcgcttgatatgggttatattcttatggctgttctgcgtttttttattgaggagaataactttaaggaaaaggatattacatataatgaatatcttgatttctttaagctgcttgttaaaagggattttggtcttgagctttcggatgaagaatgcagggaagcggcggattatgtgttcgataagataaaaaatgaaggcaggccttttgagttcaggtattatgatccggttgaacataagaaaagggtgtcaagaatgaagctcattgaaagcacaataagagataatagtgtgtggtattcgataagctctgatgctgtggaattctatcttgatactaaggagataaaagatgaaagcaggataagtgtttcacagcttctgcttgaaaagatgattaattcgaataactttaaaggcggagtagaggttgttgaaagaatcaacgaagaggtaggacgcttaaagcttcgcaaggcagaggttatggaagtcctttcacaggatgtgaatgcaggtatagatgcatatgaggatttcgtaagcactggcatgaagtggtttaatgatgaggagaagctttttaagaagaacaaggagcttatagataaggcaatatcaagacttgaaggcttttcatcgggaacagacagctattacaggacgatgaaggagatacattatcttgaggatcagctaaagatagccatgaacaggcatgcagaactgcttcgtgactgcacgcagatgcagaatacaacggatgaggcagtaagaagggctaagctgtcaaggctgcgtctgcatatggatttttcaacggcactgtcggatatgataaagaaggataatgcggaagcacttaagtatctgatagatcctttatttaagctgaatattaaaaagactatagatcttaggacgatagatgaagcacttatggtaaagcctgagaaatatgagaagaaagaatatgttaatgataaagaaccagagaagatagtctatgaggatgaagtagaggatgaaagaatccgtcacaactatatattcataatgacgaatcttcttacgtgtatagataaggtgtgtttgaaaaaatcggacatattaacacttgatgaattcggagaatacatgagcagggcttatggtgatactatacttaaaaatgcggactattatgcattttttgttaatctgtgtcagagagatgagtatgttataggtggagatgacatgcacagcgaaacatttcttgatggcatacttgaagagggctttggtggtaaagaggtcagacattttaagataataaaaggtggtactttaccagagagtgaacaggctgacagtgaatacatgcaggttactaatgtagcatttatgaaggcttatgatgatgctttgtcatag

SEQ ID NO: 52143 - DNA, 705 bp, Eubacterium sp. CAG:248
atggaaaacaggaatctggacaaggcactggatatagtatcaaagcttataatgagtgaacagataagcgaaagtaaagataacagtcagctttatcaggaatacaatactaacgccgaggtgtatgacatagttcatatgtcacttaagaagttcaatcttaatatatatgaatataacaacagcttatatgtcagtgcaggggataataacaaggtgtttggctacactaacgaagagttgagaaataagcttggattaagggtgaacagggagttatatcttgtatattttataatatataacataattacagaattctatactgattcagcaagcacaacatacgcagagtttgtgagagttgaggatatagtaaaaaatgtagactcatccgtatctgccataatagataagaagctgggcatgattatagatgatgttgaagaaaacagcttcaagcagatagcactaagctgggatgctcttccagtaataacagtagctgatacggcagatgtaagggcagctaagaattctaaaacaggctttgtaaagatagcactgaatttctgtgtatcacaggagcttcttatggaagcacagaacagattctacccaactgacaggttcaaggcacttatagagaactattttgacggctataagggacgcatggcagaacttatgcaggaacagtcgtaa

SEQ ID NO: 52144 - DNA, 4515 bp, Eubacterium sp. CAG:248
atgccacagattaacagagttagggttaataatgtaaaatataattttggtactcagttttatgatgattttatgatgcgttttaactgcaggaataccatatatgatcttgctaatggtggtggcaagagtcttcttatgcttcttcttatgcagaatatgataccaaactgtacacttgatgaaaaacagccgatagaaaagctgttcaggaaaggcagtggcaacacatgcatacattcgcttgtagagtggaagctggattcacattgccagagggatggctacagatatatgacgacaggcttctgtgcaagaaaggcaaggagtgcagaagaaagagaagatgcacaagacaaagaagcttacatggcagcagacacagatacaggaaacatgacagccaggagcagtacagcttcagataatacaagtatagagtactttaactactgcatattctataagaagttcggacctgatgatataaagaaccttccgctggtgcacaatggtgaaagagtaacttataatggattaaaggcatatctgagagatgtaactaaagaagataaggacatagaggttcatatatttgacaggaaaggagactatcagagcttcatatcaaagtatggcatatatgaaagtgcatgggaaatagtaagaggtattaacaaaactgagggtcatgtaagaacatattttgaaaccaactatagaacaagccgcaaggtcgttgaggatcttcttatagaagaaatcatacagaaatcttacaataacaggctgtctgttgaaaatgatgactccatgatggctaagacacttcttgatataaaggataagcttatagagctttcaagaaagaacagtcagataagcagttatgataaccagatggaagtgctggaacggttcaaggagtatgccgatacatatacagaattctacaagaataagaaaaataaagaagaagatttatattcaatgcttgcatcggcagtacatatggcaacagacaagcagtcagaacttgaagcacatgacgaaaggaatactgaccttgtaaacaggcttgaagataaaaagaagagtattgctgttgccaaagtattatcagaaaagaagtcacttaaggatgttgaggggcttgtaaagaagtcaaaagaacttctttcacagaagcaaagcaggatagctgctgtaaagaagcgccttatgcttatggaatcagccaatgattattatgattatatagagtatgagaaagaactgttaaaggttgatacagcacttgataacagaatgagggaagatgaagacataacctctgagcttgaaaggcttgcaggcgtgtacaggatatactatgaaaagcatgtaggtgaacttgaggatatgacacatgccgcagcagaggatgaaaaacaggcatatgacatacttgcagaggcaaaagataatcatagaaatgcagaaaaagactgcgcagttgttcttggcttaagggataacatgcaggaaaaaataagcagggatgagataagacagcaggagctttgcagacagtatggagtacttgttgcagatacagctttgtctgagcttgaaaaatgtaataaccatatatcagatataagcggtgatatacatagtgtaaagagcgggcttgaagaggacacaaagcagatatataaggtacaggagcagattaatctgttaaagaccaaaaaggttatgctgcaggaaaatatcagcagaatggatgaacagtcacagctgttaagggataatgccgacagacttgcagatatagagaaggtatatggtgtaagattagccgatgatcttgatgaggctgtacttaaagcatatacaaagataaatacagagtacaatgaaaaatccagggagtatgataagcttaaccagtatatagaagcacttaattccggctcatattatatggatagtcctgatagaagggcgtttaaggattatctttacaatacatatggcacagatgttatagaaggtcatgtatgggtttcacagcttgatgatgtccaaagagaaaacgtcttaaaaagaattccgtttgttgaatacagctttataataaaaaatgattttgacagagttaagaataataatgttttaaatacatttggaagaggtacacagatatatccagtcataagtgagaaggtacttgatagccagcaggctgccatagataaggatatgatggtattcgcacttaaagatatgagctttttaagggatgatacgaaacgcagacttgagattaagacagcaaaggaagaactcgacaacctgaatgaagatatgcagaagcttgaaggcagaaaacagatagtatgggaggattatacatttgttgtaaaatacgaagctatttcaggaaatacccatactaaagcagttgaaaatgtaaggcaggagcttgaccaggttatagaacagctttcacaggtggatggaagcatagacatatataaagaaaaaaaggcagaggatgccaataaacttgagaatctaaaaaaacagcttgacagtgcactaggtcaggcagaagggttaaagaagatatcagacctgtatgcggaaatatcagaagagaggaacagcctgaaagcatacaatgacaagcttgccaaggcagagcgtgcgataatcgggtatgcagcacagcttgacaagtcaagggaagagtatcttaggattaacgaatacaaggataatgttgataagaaatacacagaacttgtatacaactgggaaaatattttctcaaagtattatgtgcaggatgatacaccagcagatggaaacaaaaagccagatactacagagtatgatgaagaaaatataagggagattacaggacgtttcgcaggacttaaagatattcttatgaataagaatgcagaccttacagataaggaagcgcttaagagtcatcttgaagcatcaatgaaaaaatgtattgattctatcatctacagaggtgaagaacctgaaaaacttaaagagctgtatcttcagggaaagatatcggtaagcagccaggaaaagcttcatgagatatcagatgaattaactgaacttaacaaacagtataatgattcagaccgtgaacttggcatgcaggaggctatgcttaacagacttgagggaagtgtttcatatgctatatcacagattgaagaaaggtatggaacatatgaagagtttgagtgtgacgatccggatggctacgttaagaataatactgtcataacaagagagcttgaggatgatataaagaaggaagcggcagcaggaaagaaacttgagaatgagcttaaagatatccaggtatgcagaaaagatattgaaagaatcatgtcaggtgcaggaataaatatacctgatgaagaaatattgaaaaaaacggacataaagtatcgggattataataacctgaataaggaatatgagcagactgcaaaagaatattcagcaatacttaagctggagtataaaaaaacagatgaatttgtaaaatataagagtaagcttatagattcactaaagagctataatgcagaggatcttgctgtgcagataagtatgtcattaaacatgccaaaggatgagcagcagacaagtgcactgattgcttctcttgatgagacgaatagttatattgaacttgaaaagacaagagtacacaagggaatcgaagatatggagagaataaaggataacttcgaaaaccgttgtatacagacgtgcagcaatatacgtacggaacttgaaagacttcctaagctttcacatattaagatggataaagaagatatatctataataggtcttaatattccatatgttaaggagagcgtatacaaggaaagaatgtcagagtatatagatgagactatagaggcagcagaaagctttaaagatcctgaggaaaggttcagatatatacgaaacagacttacatggaaaagacttttctctgttatagtaacagatatgaattcaataaggattaatctgtataagagagaacgtataaaagatcagagcaggtacttaagatatgaggaagccgtaggctcaacaggacagtcacagggtatttatatacagttccttattgcaataataaactatatatcgaatattaatacagttatggatggcggaattgtgggaaatactatatttatagataatccttttggcgctgcaaaggacatatatatatgggagcctatatttaagcttctgaaggctaatcatatacagcttatagttccggcaagaggtgcaactcctgctataacagcccgctttgatgtcaactacatattaggacagaagatggcagataacaggcagcagacagttgttgttgattattacagcaacgtaaaacaacaggagttagaatacaccagaatgaattatgagcaggcaagctttgatttcttatag

SEQ ID NO: 52145 - DNA, 1686 bp, Eubacterium sp. CAG:252
atggcagatagtatgataggagagataatcacagaccatagggagagaatgattaatctgaaaaagtattatccatttttcaggcttatggacgtatcctttgaacagtataaggacggaaagtatagtgcgctcgatatggggtatattcttatggcagttctgcgtttttttattgaagaaaataacttcagggaaaaggacgttacttataaggaatacctcgatttctttaaaatgcttgtaaaaagggactttggtctggtgctgtctgatgaagagtatgtagaagtggcagactatgtatttgataagataaaaaatgatggcagaccatttgagtttaagtattatgacccggttgagcataagaaaagagtgtcaagaatgaagcttgtcgaaagcacaataagagaggatatggtgtggtattcgataagcgcagatgcggttgaattctatcttgatacgaaggagataaaggatgagagcagaataaatgtatcgcagcttcttcttgaaaagatgattaattccaataacttcagaggtggtgttgaggttgttgagcgtattaatgaagaggttggaagactgcggcttcgtaagactgaggtaatggaaacacttgcacaggatgtatgcgctggtgttgaggcatatgaagactttgtaaatacaggaatgaagtggtttaatgacgaggagaagctttttaggaagaataaagagcttatagataaggcaatatcaaggcttgagggttctccgtcaggtacagacagctattacagaactatgaaggagatacaccatcttgaagaccagttaaagatagccatgaacaagcatgcacagcttcttcgtgactgtacgcagatgcagaataccactgatgaagcggtaagaagggcaaagcttgcaagacttcgtccgcatatggactttgcaacagcactttcagatatgatacgaaaagacaacgcggatgcgcttaagtatcttatagacccgcttcttaagcttaatataagaaaaacgcttgaccttaaaacaatagatgaggcacttatggttaagcctgaaagatacgaaaagaaagagtatgtaaataaaaatgagcttaagcagatagtgtatgaggatgaggctgttgatgagagaataaagcataattatacatttgttatgaataaccttcttatgtgcattgataaggtatgtttgaaaaaatcggacatgctcacactcgacacatttagtggttatatgcgacgtgcgtatggtgatgcgatacttaaaaatgcagattactatgcattttttgtaaacctctgtcagagagatgagtacgtggtaggcggcgataatatgcatagtgaaacatttcttgatggaatacttgaggagagcttcaagggaaaagaggtaaggcatattcttatagtcaggggtgaaagtgacagggaagatggggctttaggcgatgcaccagaggatgccgatgctgtacaaaatattgcggtttccagcgatatatcagaggatatatataatacagatggtacacaaaatatttcagtttataataataagtcggatggtacacagaatatagagaacatacagaggacagctctggatgatatacaggtaactaatatagcatttaagaaggtgttctaa

SEQ ID NO: 52146 - DNA, 699 bp, Eubacterium sp. CAG:252
atggaaaacagaaatctggataaggcgcttgatatagtatcaagacttataatgggtgaacaggtgagtgagagtggcgataacagccagctttatcaggaatataataccaatgcagaggtttatgatattgttcatatgtcacttaagaagttcaatcttaatatatatgagtacaataatggactgtatgtgagtgccggtgataataacagagtgttcggttacactaatgaggagcttagaaacagactcggattacgtgtaaacagagaactctatcttgtatattttatcatatataatataataacagaattttatacggactcagcaagtacgacatatgcagaatttgtgagagtagaagatattgtgcgtaatgtggactcgtcagttgcttccatagttgataaaaagcttgggattatcatcgatgatgttgaagaaaacagttttaagcagatagcactaagctgggatgcacttcctataataacagttgcggatacggcggacgtaagggctgcaaagaattcaaagacaggctttgtgaagattgcgcttaacttctgcgtatcgcaggagcttcttacagaggtacagaacaggttctatccaacagacaggttcagggcgcttatagagaattatttcgatgagtataagggacgaatggcagaacttatgcagagctaa

SEQ ID NO: 52147 - DNA, 4518 bp, Eubacterium sp. CAG:252
atgccacagattaacagagtaagggtgaacaacgtaaaatataactttggtacacagttttacgatgattttataatgcgttttaactgtagaaatacgatatatgaccttgccaatggtggtggcaagagtcttcttatgctgcttcttatgcagaatatgatacctaactgtacgttagatgataagcagccgatagagaagcttttcagaaaaggcagcgacaatacgtgtatacattcgctggtggagtggaagcttgattctcattgtattaaagatggctacagatatatgacaacaggcttctgtgcaagaaaagcaagaagtgctgaggaaagagagatcacagaggagagggaggcattagatacctcaggtacaggtgaggtttcaggtgcaaatgtgtcttcatccgataatacaagcatagaatactttaattactgcatattttacaggcagacaggtcctaatgacataaaaaatcttccacttgtgcataatggtgagagagttacatttaacggacttaaggcatatcttcgtgatgtaacaaaggaagataaggggatagaagtccatatatttgacagaaaaggcgattaccagagctttatatccagatatggcatatatgagagtgcgtgggaaatagtaaggggtatcaataagactgagggacacgtcaggacttactttgaaacgaactacaggacaagccgtaaggttgttgaagacctgcttatagaggagattatccagaagtcttacaacaacagattatccgttgataatgacgatgttatgatggcacagacactccttgatataaaagataagcttattgagctgtcaagaaaaaacagccagataagtgattacgacagccagacagaggtgctggcacattttaaggaatatattgatacatatacagcattttataataacaagaaggaaaaggaagaaaagctgtatacaatgcttgcatcagcagtgcatatgacagaggataagcagcttgagctggatgagcataacaggaaaaatgaagcacatataaatgaacttgaggataagaagtacagaatagcagttgcaaaggtactttctgagaagaagtcgttaagggaggttgaagcgcttgtaaagaattcaacagaggtgctttcacagaaggaaaaaaagattaatgatgttaagaaacgtcttatgcttatggagtcagccaatgattactgcgattatgtggagtatgagaaggaattattaaaggttgatactgcacttgataacaggctgcgtgaggatgaggacataacaaatgagcttgaaaagcttgcttatgaatataaggtgtactatgaagggcatatcaaggattataaagatatggcagatgaggcggcactcagtgaaaagcaggcacatgatatgcttgaggaggcagagaataaccataaaaatgcagagaaggactgcgctgtcatattaggcctgagagataatatgcaggaaaagataagggacagtgagcttaaacagaaggaactctgtaacgagtatggcgtacttgttgctgacacagcacaggacgaacttgcacgctgtaatgataatatatcagctataagtaatgatatagaagatattaaaaatgagctggaagaggatacagccaggctttataaggcacaggaaaacgacagcattttaaaagccagaaagagtatgcttgaagagcgtataagcaggatgaaggagcagcagcttaagataaatgcagggcatgataagcttaatgacatagagaaaatatatggtgttaagcttgtagatgggcttggtgaagctgttctttcgacttatacacagataaatacagagtataacgaaaagttaaaggaacacgataagcttaagaaatacatcgaagcaataaaagagggcacatattatatagacagtcctgaaagagatatatttaaagattatctttacaatatgtatggcgatgatgctgttgagggctataagtggttatcgcagcttgaggatgacacaagaaaagatgtattaaagcgtattcctttcgtggagtatggctttgttattaaaaatgattttgccagagttaagaataatgatgcgctgaaagcatttggaaaaggaacacagatatatcctgtcataagtgaaaatgttgcaaaaaatacagactatgctatcgataaggatatggttgtatttgcacttaaaaatatgaattttctgacagatgcagcgaagaaagaagcagagcttaaaagggcggaggatgagcttgataatataagtgcagatatgcataagcttgacggcagaaagcagatgatatgggaagattatacatttgcagtaaagtacgagtctgcacttgaaagcgtacctgaggctgatataaaagaggcagagcaagagctttctgacattacagaaaagcttaataagtgccattcagagcatgaagaatataaaaataaaaaagctgctgatacagaaaaaattgaaaaattcggacatgaacttgaagaattaaaaaagcaggctgacggacttaagaagatagcagatgtatatgcagacatatcttgtgattatgataagctgacgtcatataatgacagacttgcaaaggctgaacgtgccataattgagtatgcagcatatcttgataaggcaagagaggaatatattaaggctggcggctataaggacagtgcagacagcagatacacagagcttgtatacaactgggagaataatttctctaagttctgtaagaataattctgatatttctgacactgatataagtgataaggaatacagcgaagaggatataagggaacttatcggacgttttacgggacttaaggatattcttaataataaaaatgctgacttaaccgataaggaggctttaagaagccatcttgaggcagctatgaaaaaatgtattgagtcaatagaatatcgtggtgaagatgtagaaaatcttaaggagctttatatgcagggaaagctgtctgtgagcagtcaggaaaagcttcgtgagctttcagatgaacttgcagggctgcagaagcagtatagcgaggctgacagagaacttggcatgcaggaggcaatgtttaacagacttgagggaagtgtgacatatgcagtttcacagatagaggagcgttacagcacttatgaggaattcgactgtgataatccggatgaattcgtaaaaaacaatacactcatagtacagcagcttgagaaagacctgaagaaagaaacggcggcgggaaagcagcttgaaaacgaacttaagaatattgaaatatgcagaatggatattgagaggataatgtcggatgctggaatagatattccagaagaagaaatattaaaaaaatcagacataaaaccacttgattataataccttgagtaaagactataataagactgcaaaggaatattctactattcttaagcttgaatataagaagctcgatgagttcgcaaaacataagagtaagcttatagataatcttaagcagcataatggtgatgaccttgcaacacagataagcctgtctgttaatatgcctaaggatggacagcagacggcgcttcttatagagtcacttgatgaaaccagcggatatattgagcttgaaaagacaagagtacacaagggtatcgaagatatggaaagaataaaagataactttgaaaaccgttgtatacagacctgcagcaacatccgcacagagcttgaaagacttcctaagctttcacatataaagatggataatgaggatatatcaataatcagcctttcaataccttatgttaaagaaagtgcatataaggagagaatgtctaagtatatagatgaaactatagaggcagcagaaggctttaatgagcaggatgataagttcaggtacataagaaacagacttacgtggaaaagactgttctctgttatagttacggatatgaattcgataagaattaatctttataagagagagcgtatcaaggaccagagcagatacttaagatatgaggaggcagtcggctcaacaggacagtcacagggtatatatatacagttccttatagcgattattaattatatatctaatataaatgcagtatcagatggaagtatcacgggtaatactatatttatagataatccgtttggcgcagcaaaagacatatatatatgggagcctatattcaagcttctgtcagtaaaccatatacagcttattgtgcctgcaagaggcgcaactcctgctataacagcaagatttgatgttaattatatattaggacagaagttgtctgataatagacagcagacagtcgttgtcgactattacagcagtgttaaggaacaggagttagagtatacgcgtatggattatgaacaggcaagctttgactttatcagtccgaaacaacagtaa

SEQ ID NO: 52148 - DNA, 1635 bp, Blautia sp. CAG:237
gtgcagtacgaatttctgaaaaattttcccaagcgaatgaaaaatgtgggtttgtatgcggtacttatccagaacagcatgcagaaaacatcgtggaaacagttcggattcgctaagtttgatgagcagatgaatcttatttttgccgtaatgctttatattatggaacagtctttgaaagaagaaaattgtacgatggatgacatcggtgcgtatattgataccatcaacagcagatatctgcataaagaaatttcctatgaggacagcaggaaacttggagattttattgttaatgtgatcctgtccaacgaaggtcgtgccatgtactttgatggatacgattttgaccagaatgattatcatatcatgcacatcagttatgttgccaatcgaatcgtatatcttgatcaggaggttcgtcgaacctcttattatctgacggatgacggatacaatctcatcctttctacccttgaaatagaaaataatatgaaacttaccatccatgaaatgatctttcagatgcatctggagaaacagagctatgacaaggctgtggatgagataaaaaatgtatttaatctgatgcgcattcagttacagaaaattcaggaagcaatgggcaagatccgcagaaatgcactgaattattctgtcagagattatgaagagattttgctggaaaatctggatacgatcagtgatacaaaagaaaaatttcagaaataccgggaacttgtgcgaagtcgtgttaagaaactggaagaagaaaacattaacgtgcgtcgcctcggagaaaaggaagaagaaaatctggagaaccttcgcattattgagagttatctgaatcgtaccattgatgaacatcagaaaatcctcagcagtcattttgatctcaaggcactttataccagagaactggaacttttgtctcaggtatcactgattcggcggttttcttttcgtaatgagttttatgacaaagtgctggaaaatccggcagcccttgaaaatctggattattttctcagacctctgtttaaccaggaacctgaaaaagtttacaatctgaataaagcgctgctatatcagaaaccttccgtcagaaatgaggaagaagatatagaagaaattctggattttgatgaagaggcatatcgaaaagagcaggaacagaagcataaagaaaagatgaaacagtacgaaaaaagcctgggaattcttctggaacaggctgtttcggagggcgaaatttcacttctgaatctgcagaataaaatccataaagatgaaattacttccaaagaaattcagaaacagctcattcccagtgtagagatttttaaagaaatcatggttgagctgatacgaaacaaagagatcgatatagaaaaaatcaaaagggaacgaagcgaattcattcaggaacagacagaagattttcagttaagtgaaatgctcttacagctttcagaaagcagatttgcagaccagaaaatacgcaagattgaagtgtacaggattgaagatggaaacactgttacttttgataacgtacagacggaagtgggagaaacgaagagcatccgctgttcaaatatcctgatcaggattgtaagaaacgaggaataa

SEQ ID NO: 52149 - DNA, 714 bp, Blautia sp. CAG:237
atggcatacgaagcagaagaaatacgcaccagtcaggaaatattttattatcttctggagcatcatgaactcagagaagaagatgagcttcttttgtacaaggcatatgcagaagaagaagcagtacgaaatctggtaaagtctcagggagagatagcaggcagtaatatagaacggtatggaaatgtggtctatcttattccaaaagaagagaataatttccttggtttttccaagcagcagttaaagactgcattatgtaaatcagcagcaacagataaggactattatctgtcccagtttgcaattcttacattacttgtggagttttttgacgggcagggaagcagcagtaaatccagagaatatatgcgcgtgggagagtttatgaactgcatttcgcttcgcctgaaagaaggcgcagatgaagaagaaacgaaggaagatacagcaggaatttcctttcaggtgctttatcagacttatgaagcactgaaatccgatgacagaggttccagagccaaaacgaccaaagaaggatttgtctacaatattctcatgttccttcagaaacaagggctgattgaatatgtagtgcaggacgaaatgataaagacgaccagaaaactggataattttatggactggaatcttttgaatcagaataattatcagagagttttgagagtactgggggtggcaaaagatgagtaa

SEQ ID NO: 52150 - DNA, 4407 bp, Blautia sp. CAG:237
atgagtaagattaatgcagtacgtctgatcaatgtaaattataacaataacgcaaatcgtatcagtgatgaaattctttattttaacggtgaaagtacattgatttcgttgcagaacggaggaggaaagtctgtacttgtgcagatgctgacagccccttttgtacatagcagatatcgtaatgcaaaagaccgtccgtttgaaagttattttactacagcgaagccatccttcattctcgtggagtgggcactggatcagggagccggttatgtccttacaggtctgatggtcagaaaagcacaggatatgcaggaagagagtaaagaaaatctggatatcattggaattataagtgagtatcaggagtcctgcatccaggatatccgccatcttcctgtagtggaaaaaggaaaaaaagagatgattctcaagaatttcaattcctgtcggcagctttttgaaggctacaaaaaagaccgggatatgaaatttttttactatgatctgaccaattatgcacagtcccgccagtacttcgagaaactactggaatatcagatcaattataaagaatgggaaacaattattaagaaaatcaatgtaaaagaatccggactttcggatctttttgctgactgtaaagatgaaaaaggtctgacagaaaaatggtttctggaagcaattgaaagtaaattaaacagagacaaaaaccgtatcaaggagtttcagtctattctggaaaaatatgccggacaatataaagacaacagctccaaaatcaagcgacgagacagtattcgtcagtttaaagaagaaacagagtcaattcagaagcagacagaagagtaccgaagtgcggagcaggaggaaaatagacagcagaataaaattgcctggtttatccatgatataaacggacttttgcagacaacggaagaggaatacagacagtcagaatccgctatggaaaagctggatcaggatatttccagagtggaatatgaggagctttccagtaaattttatgccagcgaagacgaaaaaaatcttcatctgggaaaccgggatatgatcgatatggagagggaaaatctccaggaacgggcggcagaaacagaggaaaaacttcatgttctggcatgtgccagacagcagcagtccgtggcagaagaaaaggaagaactggatcttctcagggaaaagatcaaagcagccagacaacagggagctgatctggaaccggaacgaaaggcacttggttttgccctcagaaatctttttgaaaaatatctttttgaaaataaagaacagcagaatattcagtctgaatatattcaaaaaaccggaacacaggcagaagaagaaagtcgcagagttgaagatctggaagaaaaaatacgtgactgctatggcaaaaaaggaaaactggagagccagattgaggtgtacagccgccaggaagagcagtttaatacccgttataaggaagaacttgtacggaatattgtgggagcttatgaagccggaacgctggaaatccgacatcagatctatgagcaggagttgaccagaatcgtaagagaacgtacagaaagtcagaagaaactggaatccggaaaagagatgattcgaagccaggagcgcagcctggaagataaaaaagaagccctggttcataaaaaagcagagatccagagacagacagaagtatatcagctttatgagaaagaactggaaacaaggagaaatattcttaagtatctggacatggaagcaggatatcttctggatcgtgacagaattcttaatgtatcagagcgaaagctgaaagagctggaggaactgcgaagaagcctggaaaaagaagaggatattctggagaaagagtatcagaatcttaccagtggaaaggttctggaactgccggaagatttgaaaaaagaactggataatctgggtattcatatcgtttatggtatggaatggctccaaaaaaacggctattcgcagaagaaaaaccaggaacttgtgcgaagaaatccattccttccatatgcactgatcctgtccgggcaggagatggaaaagctggcaaagagcggcagaaatatctgtacgtcttttccggtgccgattgtagaaagggaaaaaatcgaagaaatccaggagaaatatacagataaacttgtacattttccgggaatcagcttctatattctgtttaatgaaaatcttctggatgaagaaaaacttcaggaaatgatatgggagaaaaaacaggaactggaaaaaactgcacaggcagtaaaagtccgcaaagcagaatatgcagagtattttcagagacaggaagtgctcaagaatcagtctgtaacaaaggaaaaatggcaggaaatccaggagattctggataagctgaaagaagaaaaacaaaatcttgagaaagatattctggaaacggcacagaaccttgacagactaaaaaaagaacacgaagaattgcaggatttcattgtaaaaacaggtctggaaattcagaaccagaaacagcgtatcgcggattttggacagcttgaaaaggattatgcgatatacgaaagcaacagagcagctctggaaaaatgtaaaaaagaagaacagcgttttcaggaaaagcaaaagctggcgaaggagcggcaggcaaaacttctggaagaacagaaaacggcacaaaatacgttaaatattttggaacgggaagccgaaaaactcaatgagaaatacaccagatatgctacatacgaaaaggccgggcagtatactctgccggaagaaatatctgtagaacaaatggaggcacgttatgtggctatcacttctgtcctttctcaggaactgaaagacctggaagagcgggaaaccaaagcttccggccgtttccagagagaacagaatgaacttgagcatcttcagaaaaaatatcggttgaaaccagtgcagtgggcggatgtaatctatgacagaaaagaggaatcacatcaggaagtgattctagaagactttcaaagaaaaatccagacaaaagatatgcagtggaatgacgcagacaaaaaggcagcagttgctcagagcaagagtaatgatctgcagaaaagaatccactctgtatgtggagaagaaaaaccactgtccaggaacgagatccagggacaggactttgaagcacgaaggaaccagcttctttaccagaagaaagaagagaaaagacatgctgattttctggccaaaaaagttcgaagttatgaagaaaacctgacagcactttctgaatataacgaattgattccagtagaaatggaggaacgagaaccggtttcggatactctgacttcagaagaactgcgaaatctcaagggaattcttattcgtgattataaccagaaaatcagagaaacccggcagaagaaagaacagattgtgcagcttttgaacagagttattcgaatggaaagttttcaggatgacttttaccggaaaccactggaacagatgctggagcttgtcgatgatgcacagcgtgttctgatgcagctgaaaacaactgtacagtcatttgacagccttatgcaaaaactggaagtggatatttctgttgtggaaagagaaaaagagagaattgtagagctcatggaagattatattcaggagatccacaataacctgggcaagatcgaccacaattctacaatcactatcagagacagaaatattaaaatgttgaagatccagcttccggattgggaggaaaatgtgggactgtatcaccttcgactggaagactttatcgacaagattacgaaggaaggcgtggaactttttgaaaagaatgagaatgcacaggaattttttggttccagtgttactaccaggaatctgtacgatcaggtagtaggaatcggaaatgtgcagatccatctctataaaattgaagcacagagagaatatccgatcacatggaaagaagtttccagaaactcaggcggcgagggatttttgtccgcattcgttatcctttccagtcttctgtattatatgagacgggatgatactgatatttttgcagacaaaaacgaaggaaaagttctgatcatggataacccgtttgcacagacaaatgcttcacatcttttgattccgctgatggatatggcaaaaaagaccaacacgcagcttatctgcctgaccggtctgggcggtgactctatttacaaccgttttgataatatttatgtgctgaatctgattactgcaagtctccgaaaaggcttacagtacctgaaagccgaacacaagagaggcaaagaacctgatgaactgattacagcacggatagaggttggcgagcagatagagatgctgttttga

SEQ ID NO: 52151 - DNA, 981 bp, Blautia sp. CAG:237
atgaaacgaatctcactggaaacccttattcacagcaggcaaaatctttcttatcaggagcaatacgaatacgtctgtaagttattacaggaagaaaagataaaaccagtaaaagcttccagaacaaatggcaagaagccggcactttatcgggaatactggattctggaagagcaaaaagattacagtgtttatatagaagaactgaaatatactctttcaacaaagatatcaatagattactacctggcacatccggatatttatgaaaaagaacgtccatgggtggtcctgttggatgaatatcttaaaaatgattcggatcgaataaaaatcccggaatctctgaatgagagaagttttgaaatatggaacagagaaaagtttcttgacagagaacagggaaagaaaatcctgaaacattgtgggataaatgtagaatccctaaatatataccgaacgacagagccattgccatattatacacatacaagaaatgttcctcagaatcttctgattctggagaataaggatccttttttcagtatgagaaatcacttattaagtggacatactgaaatttttaatatagaaacaggaacattaatttatggtgcggggaaaggaattattcgttcctttcaggattttgacttgtgtgcagagccatatatgaagcatccgggaaacacgatattatatttcggggatctggattatgaagggattggaatttatgaaaaccttgccgaaaagtttaaagatcaatggaaaataatcccgtttatacctgcatataaggcaatgctcaggaaagctgaatccgtaaaaatattaccaaagacaaaagaaagccagaacagaaatatcagttcagaattttttgcgtatttcgatgaacagactgtttgcaagatgaaaaaaatcctggaagaagacagatatattccgcaggaaatattaaataccacagatttctga

SEQ ID NO: 52152 - DNA, 1629 bp, Coprococcus sp. CAG:131
atggcactcaaatacgtgatgataaatgacataattgaagaacataatgcaagaatgcagaatctgaggaaatattacccgttttttgttctggctgagaccacatttgcgcagtataaggaaggtcgttatgcacagctggacatgggttatataaccatggcgattctgcgtttttttattcaggagaacagcttcaatgagcgtgaagtgtcatacgatgaatatgaggaattcatggggcagctccttgaccgtgatttcgatgtggagattgcgggagatgacagggctgacctgataatgtatatatttgacaagatcaagaacgacggaagagcatttgaattcacgttctatgatccgggaaagaagcagcgcaagacgggacgagtgaagctgatagacagccatatagtggatggcaaggtcctgtatttcatcactgcggatggaatcgaattctatctggacaccaaggagatcaaggacgagagcaagatcaacgtgcagcagcttcttctggaaaagatgatcgttggagagaacttccgtggcggtatcgaggtcgtgcgcaggatcaatagcgaggtgaacaggctgatccgcgagaaggatgagatagtaaatcttctgtccatcgacgtgttcaagggcgcggaggagtacgaaaattatatgaagaccgtcggcaaatggttcgctgacgagcagaagctctttgccaagaacaaagctctggtggacaaagcgatcactaaggcgagctatgataatatgggcaagggcaacctgaaagctatggaggagataagccagcttgagcttgaactcaagaggaccatcatcaagcacggaagtctgataagcagcacaatggagctgcagaacatatcggacaatatcatacacaaggcgaagcttcagaagcttagacctgcatttgactttgcaggacagcttcagagtatcataaaggaggacagaccggataagatactcaccatacttgcgcctctcttcgctccgaggatcgtgaaaacgttcagcatgacatccatagatcacatgctcacgctgaagtccgaggacaatgcgaagaccacaaaggtgaagaaggagcagcttgatccgaacttccgttacgaagatgaactgctcgatgaacagataagtgccaacttcacaaagctgttccacgaactccttgaccagctgaacaaatggggacacctgagtctcaaggaattcaatggaatacttgaagttaagtttggaaaagaaatctacgacaacaaagattactattccttcctcacacacctggctcagaaggacaggtacagcgtggatgagatactggcaaagccggacactatgctggagggaatgttggtagatcacatagagagaataaagaaagttgacgaaaaaacgctggcggcatctgtatctggagatcaggctggtggcagcagatccggtctctcccgtgagatgtatgcaccggaactcacactggatgcgttcagaggcatgacatttacactggaattccatccagacgaagagatacagattggcgaggacatgtacgttacgggaattcagtttaacaaaaccagctga

SEQ ID NO: 52153 - DNA, 720 bp, Coprococcus sp. CAG:131
atggaaagtaagaatctggacaaggcgatagagatatattccaagttaatatcaggtgaggagatctgcaagaagcatcccgacaacggcccgctgtacgatgaattctacggcaatgccgaggtgtacgacatcgtcatgaatatgatgaagaagatgaacctgtcactgtacgagtacaatgacagcttgtatataacagccggagagggcaacagggtatttggctatacgaatgacgacatgaagaagcttctgggacttcgtctgaacaaggagctctatctgtgttacttcattatgtatatgacacttctctatttttacaaggattcatccagctatcagttcagggagtatgtgaagtcagagaacattatagatgagacaagcaaatatcttgcggacataacgaagaagcttgatgttctgtcaactgatgaggtggagcaggacagcttcaaggcgatagcgcttctgtgggatgagctcccggcggtgacgggcaatcaggagggcgacagcgccagggcgtccaaggcatcccgggcgggttatgtgaagttggtgttcaacttcatgtcggcccagcgtttatttgtggagaatgcggacaggtactatccgacagacaggatgaaggctttgtcggagaactattttgaggaatacagaggacggctgtatcagctgcttggaggtgaagaagaggatgcctag

SEQ ID NO: 52154 - DNA, 4476 bp, Coprococcus sp. CAG:131
atgcctagtatcaacaggataagggtcaataatgtaaaatataactttggtacacagcagtacgatgacttcaccatgagaatgtatggcaagaacacgctgtatgatctggcaaatggaggaggaaagagtattctcatgcttctgctccttcagaacctgataccgaactgtactctggatgagaagcagcctgtggagaagcttttccgtgcgggcggcggcaacacagtcatccattcgctgatcgagtggaagcttgacgaggcggatataaaggatggctacagatacatgaccactggattctgtgccagaaaggcgaaggatgctgcggatgccggggaggtacagaaggacactgcatccatagagtattttaattactgcattttctacagggaatataacaagaatgacatagtgaaccttcctttgtcggagggtaatgagaggattacattcaacggtttaaagacatatctcaaggatctcggacacagggatatgagtctggaggtcagggtatttgacaagaagggcgagtaccagagatttataagtggctatggtctccacgagagccactgggaaatcatacgcggaatcaacaagacagaggggcacgtaagaacgtattttgagacaaattacaggaccacaaggaaggtcgtggaggatctgcttatagaggagatcatagagaaggcatttgccacaaagacaggacgaaacggtgaggaagacaccatggcagagactcttctcgacatcaaggacaagctgaacgttctggcacagagaaagcgtgacatagccaactatgaccaccagatagaattgataaatgtgctcgagggcaaggtgaactcatgcataggtctctacgaggacaacgacaggatatgtaagggcctggccgatgtgtatgccacaggaagggcgtgtacacaggagggcgacacccatatggaggagctggcgaaggcaaaggctgacgccggggagcagatggaacagcagaacaagcgtctggcaaatctcagggtcaccagggattatctgcgccttgaggacatgaaccgcaagatggatgacactgccacgcagatagaggacaatgagaagaagcttgcggagctgaaaaaccagatcggctacaaggagagtgcaaatgactaccttgtatacagggagaacaagcgacagtacgaagagagcagactgatagtcgacaatataagaaacaacatcggatcatccagtgagaagatggcggtgtatgcgtacaacagacgcatccgtgatgagaagaagcttgcagagctcatggcggcaagggaagaggcccagaccagctatgatcacgcacttgaggaggctgagtactgcagaaaggtcatgagggagggcgagatcgcccaggcggtggcggagaacaatatcgctgatgccacagccaagattgatgagataagtgcccgcataagtgagctggctgcatcggtcaacctgctcgtagtgggtgatgtgaaggatatgatgaacaaggctcaggaggagtctgacaggatacttgctgagatgacagagttggagatatccatagcagatggcaggacaaagctgtacgatgacagatacagactgacgactgtgcaggctgagtatgatgcgctggagagaagctgcgaggatgcaaggcttgacgccgaggcgtacaggcagtcgggaagccagctcgacagcatcatggcagtatactctgtggagaatccacaggatataacaggtgttataaatgacaggattaggggcaccataacagagacgatcaagcgccagcaggagatcgacagactgacaaagcttgcgaaatgctatgaggatggcagaccatttccgccgtcggagggtgctgagactgtgataaactacatctccaccagacatgggctcatggccatgcatggtgcggattatctgtcggcactcccgggtgatacaaaagaggagctgcttcaggcaaatccatacctgccgtacagtgttgtgacaaagggatttgatagtctggaggacgatataaatctcggttcgatagacaccggcagcgaatgtgtaatggtgtacgatatggataagctttcagactcagcgatagttcccgccgagaacatgcttatcataggaagagacaggaaatatttcatgtctaaggactccatagaggacgccagaaaggcaaatgctgataagatagcaggtctcacggaggagatcagtctgataaatgagaagcttgcgacttatcaggaggatcttgcatttgtcacaaggcttgtggatgcgagatatacaggtgccgaggacagggagagagagctgaaccaggcactgctcgataagaaggatgagcttgaggagcttaagacatcgatcaaggttacagagacggagcttaataataacactgagagatatggagacctgcagcagagtcagcagaaggaatctgacagaagacagacatttgtcatgatagagcagctgtcggatcttgcaagaccggaggagcagagacttgccgagtataagcagaggaagtctgaccttgtggcaaagctgtcaggacttcagagcgatgtgctgaagtggtcgacgacggttggagagactgagtcaaagcttgcggggcttacaaggaatatagaggatatccagtacaagtggacggagtatttcgaaccgtatctgccgaagtctgagaatgcgggagttgctgaaaatacagatggtgtaggcgtggctgctgcggcatggcaggacggaataccggaggaatacaaggagactttggacatttcagatgaacggcttgaacaggaatttatggctatgctggcggtttcaaaggagcatgcgccggatcttgaggacaagaagaagctcatggatgcgctgaagaagtcaatggacagaatacagaagaccatagagaagagaggctttgacatggcggtatttgccgaggcaggagagctctatccgacgtctgaggacaatctcagggagatggacgatgagctggcaaggctcacgttgatagaggcgtcgctgatgcagcagcagaaggctgaccagaaggcgtatagcaagcttgagggaagcatagagtatgcgatagagaacatcaaccgcacatacggcgatagcagctatgtacgtgaggagatatctgcagccgatgcagatacagccatagccaatggcgatgcggtgcttgcggatatgaaccgcatattcaaagaagctgagaaggcgtacagcgattactataagcagtatggtttcatggtggatctgtacaaggatgtaaagagaatagtcgatacaaatgacatagatgtgtccggtggaaatgtactggatgaagacatggataccctcagacagttatttgagacaagtctcatgaagtacgacaggagcatgaaagcccttgaccgcgcgaagaatgaaatcatgagattcaagggacagacggcggatacactagtggagatgggtgtattcgagatggccaatacgatcagacaggatgtgcaggttccggatacctacagtcaggcaaaggaacttctggcaaatcttcttcagattattgagttcatcaagctggagaaggagcgcgttgagaagggtatcgaggatatggttgccatcaaggagaacttcgagaatcagtgtgtacagagatgtatggatgtgaagactgagcttgagaagcttccaaagctgtcacgtatcacggtgggcgatgatgtgatcaagatggtcgatctcaccataccttacgtgaaggatgaatttgtaaagcagaggatgtctgattatatagatgacatagtgaagggtgcggatgcctacgaggatgaacgaaagaggatcaagtacatccgtgactgtctgggactcaagaagctgttcggtgtcatggtcacagatatgaatgccatcagactcaatctctacaagagggagaggataaaggagcagagccggtatctcaggtatgaggaggctgttggaagtacgggacagtcccagggtatctacattcagtttctggttgctgtcatcaactacattgcaggaatgtacagcctggcaccggaggagtcggtacagtctaaaacaatatttattgacaacccgtttggtgcggcgaaggatatatacatatgggagcctatatttgccatgctggcagctaatcatgtgcagctcatcgtacctgcccgtggcgcgacaccggccatcacaggacgctttgatgtgaactatatcctgggacagcagatggtgggcggaaagcagcagacggtagtggtggactacaccagtaagacggatcaggaagaactggaatatcaggaactttcctatgagcaggcaaccttcgacttcatctag

SEQ ID NO: 52155 - DNA, 1497 bp, Clostridium sp. CAG:253
atggatgaacaggtaaatattatatattctgttcttctatttattatggaatattcactcagagagcagccatgcacgattgatgatatatctgtatttgttgatgatatctgcaacagatacttaaaaaagggattgtcatatgagaagagcggtgaacttgctgagtttattataaatgttgttttgtgtgatgaaggccgtgcgatgtattttgactgctttgattttgatgaacgtgaatacaaaaagaaaaatataagttatttatctaacgaagtggtatatatagacggagaaataaaaagaacaagttataaacttacagataatggctataatcttgtattatcaacactggaagttgaaaataatcttaaacttacgatacatgagatgattttcaaaatgcatttggagcgtgctacatatgaccaggctctcgatgaagtaaaaaatatctttaatatgcttaggatacagcttcagaaaattcaggaggcaatggaccgtattaggagaaatgcattaaattactcggttgaggactatgagcagatactaaatgaaaatatgttgacaataagtgatactaagcataaattcatggagtatagaagaatagtaagaaacagggtaaaagagttagaggatgaaaacataaatattaaagcactgaatgatgaggatttggaaaaacttcaaaatcttcaggagattgaaagatatttgagccggtctatagacgagcatcagaaaatactaaataaacattttgatttgaaggatttgtattctactgaattggaacagatgtctaagatgacattgataaagagattttcacttagaaatgatttgtatgataaaattattgaacatccgggtaatctgataaatgtaaacatgtttttaaatccattgtttaggaataatccaaggaaaatttataatctgaacaaatgtattcagtatcaaaagccactcagagagaaaaatgatgagaatgaggaagaacagcttgattttgatattatggattatgaggagcagaaagaaaaaagactcaaaaaaaagctgaaaaaatataaatcaagtatggagtatcttgtagataaagcagaagaaaatggcgggaatctggaacttgccgcaatgtgtgatatgacggaggaacagaaaaagacatttattccgaatgctgaaatttttaaggagataatggttgaatttatcaaagcgggcagcatagatattgatgatttgaggaaagagagaaaaaatatagttgcggatgaaagttacagttttcagttgaatgaaatgcttttgaaaattgcggatgagagaaaagcagacggaattaagaaagtaacaataagaaagtgtgaagatggacaggtagtctgctttaaggatatatacaatgaatttggtgacagacgcaacatatattgttcaaatgtagtgtttaaatttgaaaaaggaatggagtaa

SEQ ID NO: 52156 - DNA, 729 bp, Clostridium sp. CAG:253
atggcatacgaggcggaagaagtaagaataagtcaggaaatattttatactcttatttcaaaacatgaaataagggaggaagacagcaaagaattgtttgacggatatacgcaaaatcccagaattatgactcttgtaaagaatcagggagatattgcagagtgtacggttgaaagatatggaagcgtcatatatcttattccgtatgaagataatgatgttcttgggttctcaaagcaggaattgaaagcgaaattatgtaaatcaggtgcaacggacaaagattattatttgtcgcagtttgtgattcttacaatgcttacggaattttatgacgcgcagggcagcagcagtaaatcaagggaatacataaaagtcggagagcttataaatcttgtttctgacagacttttggaagccggaaataatatgactgaggatgaagaagaaaaaacgggattggcattttcaaatatgcttgaatcttatactgcgcttagaagcgacgaaaagggaagaaaaactaaaactacaaaagagggatttgttcaccggatattgctttttctacaggaacaggggcttatcgagtatatagagagagatgacatgataaatacaacaaaaaagctggacagttttatggattggaacctgttgaatcagaataattatacgagggttcttaaagttcttggcattattgatgaggaggaaaaaagtgagtaa

SEQ ID NO: 52157 - DNA, 4428 bp, Clostridium sp. CAG:253
gtgagtaaaataaacacacttcgtattgtaaacttaaattataataataattcgattaagataagtgatgaagctttcaattttaatggggaaagtacgcttatgtcattgagaaacggcggtggaaagacagttttagtgcagatgatgacggcaccttttgtacataagagatacagggacacaaaagacagaaaatttgaaagttattttacgacaaacagaccgacgtttattatggttgagtgggttcttgacggggatgcgggatatgtcctcacgggaatgatggtaagaaaaaatcaggaaatctcggagggagaagtacatgatgaactagaaatgataaactttatatatgaatataaagacagatgcgaaaatgatatatatcatattcctattataaatgagacagatgcgggcatgaccttaaaaaattgggtgacatgcaggaagatatttgaaaacataaaaaaagaagacggcatgcactttaattattatgatatggatatgcctgcgcagtcgaggatgtattttgaaaaattaaaacagtaccagataaattacaaagagtgggaaactattataaaaaaaataaatttgaaagagtcgggactttcagatttgttttcagactgtcgtgatgaaaaaggtcttgttgaaaagtggtttttagaagctgttgagagcaaacttaacaaggaaggaaaccgcatttcggagtttgagaatattattaaaaagtatgctaaacagtataaagacaatcagacaaatatccaccggatggaaaatttaaaagaatttttaaaggaagcatcaggtattaaaaattatgcagatgaatttttggattatacgaaacaaagacagtcaaaggaaagtgatatagcagggttcatcacgattttggatgaacttcttaaagagactgacgagagaaaaaattatctcgatgaagaaataaaaaataagcagaaacagattgctgatataagatatgaagaaatatcatacagtatctattctattgaagaaaagaaaaataaactggcacatgaatatgagcagcttactctcgaaaaagagcaggtagtaaaagaaaaagagaaacttgaaaaaagcagggatatactactttgtgcaaagcaaaacgaggcaaagaacaatgctttctcagagtgcaaaaagcttgagagccgtattgaagtgtcaaataagaatgagaaagaaaaagaacctgcgagaaaagaattgggaaaaatgctgtttaaacattattttaaggcactttcaaattgtgacagcgaaatcgcagaaataaagggttctatcgttaaacaggaggagcaggagaaagaatataatataagcaagtcagagtgctttaagcaaaaagatgcaaactcattgcagattggaaagtgtcaggcaaaggtatcaaattatgctgttttggaagaacagtttaacaaaaaatacaacgaaaatcttttgagaaatattcttggcatatatgaggcaggtgttttagaacttaaagaagaagagtatgaaaaagaaatagcggctatgaaaaaggatatagcggcgttaaagcatgaaaagacaaaaaatgatgaagattatgtaagatatggaagaaatcaggacgatttcagagaagtaattatagaaaaaaagagcagttttgcggctgaaaaagaaagattggcagattttgaattacagcttaaaacaagacaggatataatgaagtattttcttgtggatgaaagtgaagtatataacaaaacagttattattgaaaatgcagaaagaaagcttaaagagataaatgctgcaaagcggattttggagagagaatatgagcagattggagcagaggtcaagctgcttgaaaacggacgtctgctggaggtgtcaaaggaattttcggattatctctcaacacttgaaattgagattatatatggcatggaatggctttcaaacaatggaagaagtttgcaggaaaataaaaaaattgttgaaaataatccgtttattccgtattcgataatattatccggtgcagattttgatagactcgcacaggataataaaaagatatttacgtcaacccctattccgattgttaagagagaggaacttgaagatggctttatagagagcggtataggtacaatagaacttgacaaagtaagtttttatctgatgtttcgtgacgaattgcttgacacgaagaagcgtggtgatattatctggcagaaaaaggaaaagattacaaagattcaggaaaatataaagagacgagacattgaatacggtgaatatttttctaaatgtgaatgcataaagaaacagtcattagaaaaagacagtattgagcttagtgcaaatatgataatgacatatgaaaaagagataaatgatgcacaaaatcagatagaagaacttgaaaatctgaaaagagacataataaagaataacgaaaatattaaccagaagataactgatttaaacaggaataagagtctggctgatttgagactgcaggattttgaaattcttaatgagaactacaatgaatattgtgaagcaaaagatgagaagataaaacttgagaaaaagaatgaagatatagataacaaactgggtattattaacgaaaagcttgaaaatcttgtcgaaaatatcaaatcggacgagagaaacgagatgaaaatgcgacaggaaaaaaaatcttttcaggaaaaatatgagtatttcaaaaactttgaggcagaaattaaggagaatgcagaaacatataatcttctagacgaagaaacgagaatatcaaaagaagctgaatacaatgcattgctaaacgattattcaaatgagataaagctgttgaatgagcagtataacagtgtgagcaggcagtttgcccaaagcagacaggaacttgatgagttgttgaaaaagcataatttggaaattgcggatgtagaaaaagtaaagtatgacagggaagaaaaaaatgaacttgatgaacgcatttcttccggaaatatgcagattcagctttataatgaaaagctgaataaagttaacatggaaattgccaaaaagcagtcagatatggaacatgcgtacaatgatttgtacagaatatgtgagaaaaaagagccagttagtaaaaagaagataaccaatacaaattttaaagacaggattattttgattcaaaatgaaataagagataacaaatcggatttagaaggtgtattaaatctttgtgcaggttacaggaataacctgactgcgctggcagaatacagtgaactgaaagcagaagacacagaaagcggaataacaaaatcagactttgtaggaaaatccgtaaaagaaatagatacattcagaggaattatgataagggattacaaagaaattcttgagaatgagagaaagcagagtgctgttattacaagactgcttaacgatatggcgagaaaaaatattttcagggatgaatttttccaaaagtccatagaagtattgatgtcgattaccgacaatgcggtgaactttttaaagcagcttgatatatttgtctcttcgtatgaaggaataatagaaaaacttgaagtagatgtggctatggtggaaaaggaaagtgcaagaatagttgaacttttggaggagtatgtcagggatgtgcatgaggatcttggcaggatagatggaaattcaactattaaagttcacgggaaagataaaaaaatgcttaaaataacaattcctgaatggtattcaaatgaagagatgtatcatttgaaagttaaggatattctcgatgaagttacggcgaaaaccgtaacggcacttgaaaataatgaaaatcctgaggaagttataagtctttatattaatacaaagtatctttatgattcggtgattggcaccggaaatgtgcgcataaggctttataagatagaggaacaaaaaggcagggagatttcatggtcagatgttgcaaaaaattcaggcggtgaaggatttttatctgcgttcattgttctttcaagtcttttatactacatgagaaaagatgtgtcggatgtgtttacaaattataatgaaggaaaagtgcttgttatggataatccttttgcacagaccaatgcgtcacatctcttaaagccgcttatggatatggcaaaaaagacaaatacccagcttatctgtctttcgggtcttggaggggattcaatctatgacagatttgacaatatatatgtgcttaatctggttgcagcaagtcttagaaatggaatgcagtatctgaagggagagcataccaggggagaagaatccgatacaatgattgcaacgcagattcaggtgacacagcaggagctcatgttttaa

SEQ ID NO: 52158 - DNA, 1608 bp, Roseburia sp. CAG:100
atgcaatatgaatttctgaaacagttccccaaacgaatgaagcatgtgggaatgtatgcgttagtgctgcagaacagcagccagaagcagacatggaaacaatacggattcctgaaaacagatgaacagattaatattatatttgccctcatgctgtatatcatggagcagtccttaaaagaggaaaaatgtaccatggatgatatgggggcatatctggattaccttaatatgacgtattttaatacaggaatgtcttttgacgattgcagaaagctgggagatttcattattaatgtaattctgtcaaatgaaggaaaggcaatgtattttgacggatatgattttgagcagagagcatataaaatcatgaatatcagttatgtgtcaaatgaaatcgtatatctggattcggatgtgaaaaggacatcctaccgtttgacagaggatggctataatctgctgctttccacgctggaaatcgagaacaatatgaagctgacaattcatgagatgatattcaaaatgcatctggagaagcaaagctacgacaaggcagtcgatgagattaaaaatgtatttaacctcttgaggatacagctccagaagatccaggatgccatgctgcgtgtgcgtagaaatgcattaagctattctgtttcggactatgagcagcttcttggtgaaaatatggaatctattgatatgacaaagcagaagttccaaagctatagggagactgtaaggaaaagggccaaagaactggaagaacagaatatcaatgtaagaaagttatctgcacaggaggaggagaatctggagaatctcagaatcattgaaagctatcttaaccgtggtatcgatgagcaccagaaaatcctgaattcgcattttgacctgaaaatcctttatgaaaaagaactggaactgttgtcgcaaatgtcattgatccagagattttcattaaggacagatctctatgataaggtattacaggatgcttccggattggataatatagatatatttttaagaccgttatttcatcaggctccggataaaatttataatctgcagaaagcgacacagcttcagcgtccaatcaggaagaagcagcaggaagaagaggaagaagtactggactttgatgaagaccaatggcaggaagaatatgcagcaagaaagcgcaaacgccttatgcagtatgagaacagtcttgggtttgtactggataaaatgatggaaaaaggcaaaattacgctgcaggagatggcatcgtctcttggcagagaagaacagaacacgttaattcccgatatagatatatttaaagaaatcatggtagagctgataaaaagccgtcatattgatatagatgcgctgcataaggaaaagagcgagtatattgcagaggaaacattggatttccagctaaatgagatgatattggagttagtggataaggatgaaagaaggaagcacatccatcagatagatatatacaggcttgaagatggtggtgtagtggagtttagaaatatcaggaatgagaccggtgatggaaaaacagtacgttgttccaatgtagcattggaaattggagaatag

SEQ ID NO: 52159 - DNA, 708 bp, Roseburia sp. CAG:100
atggcatacgaaattgaagaaatcaggttaagccagcagattttctattatctgttagagcattttgaactgcgtgaagaagaggaagaaagactataccgggcttatacagaggaagaggcggtacagaatcttgtaaaatcccaggcagcggaagcagaaagcgcagtggaaagatatggggatgtgatttatctgatcccgaaggaagaaaatgtttttctgggattttccaaagcgaagttaaaggagacattgtgtaaatcagcagctacagacaaggatttctacttatcacagttcgtgatcctgacattgcttgtggaattttatgatggacagggaagcagcagcaggtcaagagagtatatccgggtaggagaattgcagaactgtatctctgccagacttaaggagggtgtagagaatacctcggaggaagaagaggagcagaagggaattgccttcagaaatatgttggaagcatatgaggcactccggtcagatgataaaggctcaagggctaagaccaccaaagaaggctttctctattctatattgacttttcttgagaagcaggggctgattgagtatgtggaagaggatgagatggtaaaaacaagtaagaagctggataatctgatggattggaatcttttaaaccagaataattatcagagagtcagaaaggtattggagcatgagtaa

SEQ ID NO: 52160 - DNA, 4401 bp, Roseburia sp. CAG:100
atgagtaaagtcaacgcagtccgttttatcaatcttaattataataataatgcgatcaggatcagtgatgagacctttcaaatgggaggaagaagtacactcctgtcccttcggaatgggggtggcaaatctgtattggtacagatgatgacagccccgtttgtgcataagcagtatagaaagacaaaagacagaccttttgaaagttattttacgtcatccaagcctactttcattatggttgaatggaagctggacggtggagcaggttatgtgttgactggaatgatggtaagaaaaagccagattatggaagaacagtcttcagaacctttggaaattgtaaattttatcagtgaatatacaacaagatgtgaagaggatatttatcatttaccggttgtagaaaaaggaaaaaaggaaattgttcttaaaaattatggattttgcagacagttatttgaaggctataagaaggaccgcagtaagaaattctattattacgatatgaataattatgctcaatccagacaatattttgataagctggcagagtatcagatttattataaggaatgggaaacgatcatccgtaaggtaaatctgaaagaatcaggtctgtctgagcttttttctgattgtaagaatgagaaagaactgattgaaaaatggtttctggattcgatagagagcaagctgaaccgtgaaaaagaccgcatgaaggaatttcagtcaatcgtggagaaatatattatcagttataaagataataaatcaaaaatagagcggagagatactattctggaattccagacagatatgaaagaactacagcagtatggtgaagcgtatgagattgcagaaaagcagatccatgctatggagaaccgtatagcagcctttagaagtgtgcttgcgcagattgaaaaggacacggtggcacggcagtcagagcaggagcagcaaagggcagggatggaagaacaactggcgcacatcatgtatgaaaaattgtccatggaaatatatgaactgatggagcagaagaagtatcataccggtaacagagatatgatttccatggaaatgaatgaattggaactggagacagagtatgttgagaagcttatccacagctatgcctgtgcaaaacagcagaaaattgtggatgaatataccagagataacgaactgcttgtggaaaagattgcagtttatcgtgaaaacgagaaggagtatgagcctgaaagaaaaaaactgggtggatatctgcatactcattatggggacaagttccgcaaagcagggcaaaatgctgaacagatccaaagggaatatgacagcaaccttggcagacagcaggagatgatagaaaaggaatgcgaatatcagaccagaatagaggagttaatcgctgaaatagccaaagaccaggaaagactgtcatcctttgaccggcaggaagaggtattcaacagagattatcaggagcattttgtaagaaatatcattggtacatacgaaccgggaatgcttcagatcaaaaaagaacagtatgtgcaggagcaggagcagctgcatagaaacaatatgcagcataaacgtcagcaggaagaaacggaagaaaaagtaaaatcaatgcaaagaaacctgcaggacagaaataaccagaagatgcagaaagaatatgaactgcggactcttacggaacaaggggaagaatatagcagacagatcagggaaagacaggtcatgatgcagtatcttgagctggatgatacgtatttatggaatgatgggaaaatcatggaagcagcagaccgtaagatcgcagaatgtgacagagtacgtgcagaactggagaaagagcataatctgctggaaagagaatggaaaaaactgacatcaggtgaaatactggaactaccaaaagattttcaggaattacttacccggctggagctgcatccggtgtatggaatgaattggctggagaagaatggatattctgtagaagagaatacagagcttgtcagaaggcagccttttataccatatgcattgattcttccaaggcaggaaatgaagcagcttgagttacatggacaggatatctgtacgtcctttcccattcctatcattccaagagaagaactggagcggacattggcacaagagccaacaagtatggtccaattatcggggataagcttctatttatggttcaatgagaaattactggatgaagatgctttacgtgttttgatcaagaacaaagaatcagagatgaccaaaaagcagaagcagctggagaataaaaagactgagtataaggatgcactcgacagaaagcagatgctggaacggcaaagtatcacaaaagagaaagtagagaagaatcgtcagcagattacggatacggagcaggaaatatcagaaatcgacaatcagattatccacgataaagaagaaatggacaggctggaacaaaagaggagtgagcttgtacagattattctgaaagagaaacaatgcatggagtggaaccagagaagggcatcagattttgactatttctgcagggaatatgactcatatctggagaagcacgacactcttgaaaagaatcgaaaagaaaagacaaaatatgaagataataaaaagcaggcgcaggatttactggaaaagtaccgtgaacagcagaggacactggaaagcagacagcgggaattaaaagcacagactgaaaatatacagaagaagtatattctgtatcaggagtatgagccaattgccctggaaggacagaataggccggtgtctgagatggaagccagatacgaagccattacaacgaagatgtcttttcaattacaggatctggagcatcaactgcagaaaacgaacggcagcttgaacagggcgaaagaggaactggccagattacagcacaaatttcttctcaaagaagatgactggaaagaactgtattatgatgaaaaagaagaaatgcaccaggaaagtgtgcttgcagaacggaagaagcagtataaattcaaagaagcccagtggaatgaacaggataagcagattggtatcatcagcagtaagatagatgataagaataagctgatgcaggagcaatgtggtaaagaagagatattgcccaaagaagaaatacgtacaattgactttgatggaagaagaaaccagcttctctatcagataaaggaaacagaacgtgccctgaagcttacggagaagaaactgacaagtgtacaggagaatatagcatcctttacagaatatgatgattttgtacagaaggaagaaatccaatgggaggaagatattgcgcagatggattccaaatgtctgagagagtatgcgggtatgatacggcgcgattacaggcatagctgcgaggaaggtaagaacagacgggataaagcagaaaaaatcctgaagatattattatgtaaggaaaagtatcaggatgatttctacaggaaaccactggatgccatgatgtctgtgtcacaatcagcccatttgctgcttgcacagcttacgactacactccaatcctatgaaagccagctggcaaaactggaagtagatatatcaatcataggcgaggagaagaagaggattgtaggtctgttggaggattatgtaaaagatgtacacagcaacatgggtaagatagataataattccacgataacaatcagggaacgtcctataaaaatgcttcgtctgcaaatgcctgaatgggaagaaaatgaaggattatatcatcagagactggatgatcttatcagtgagctgactcaaaagggtgtggaaatctatgaaaagaatgagaattcggcagaatatataggaacacgcattactacaaagaatatttatgacacgactgtcggaattagtaatatccagattaagctttacaagattgaggagcaaagggaatatccaatcacatgggcagaagttgccaagaattcaggcggtgaaggattcctgtcggcttttgtcattctatccagtctgctgcattatatgcgtagggacgacacggatattttcgcagataagaaagaaggtaaggttctggtcatggataacccatttgcacagactaatgcagcccatctgctgaaaccgctcatggatatggccaagaaaacagacacacagctgatatgtctttccggacttggaggagattctatctatagccgattcgacaatatctatgtgttgaatcttgtgacagcgggattaagaggaggcatgcagtatctgcgtggagaacatacaagaggtattgaagaggaggtcatggtaacttcccagatagaagtgatcggacagcaaagtctgctgttctga

SEQ ID NO: 52161 - DNA, 1002 bp, Roseburia sp. CAG:100
atgaagagaataagtctggatgatttggaacatgcattgcatctgcaaaattatcaacaactgtatgaggctgttttgcataaaattgagcagggagagataaaaccggttaaagcatctggtaaaaacggtaaaaaacctgtattatacagggagtactggctgatagaacaggcaaggggagacgaagaagaattggtagaggagctttcctatcaatatgtgcctgctattgccacaggatattatatgaaacatctacagcagtatcgtgaagaccgggaatggcttatgctattgaatcaatatctaagggaacataaatgcctgctggagttccccatgtctttgaacgagagaagctatgatatctggcatagagagaaattcctgaaagaagaacagggcagaaaaatactgaagcggtgtggtattcccctggaaatgctcaatctctatgagacatcggaacctttggcttattatacggatacaaaggaaattccgcagaatattctgcttgtagaaaataaagataccttttacagtataagaaggaatctgcttgcaggaaaaaacaaaatacttggaatcactatcggaacagttatatatggtgccggtaagggtattctgcgctctttccaggattttacattgtgctgtgaaccttatatgaaaaacgaagcgaacagattgctgtactttggggacttagattatgaaggtatcatgatctatgagaatctggctgataattttctggacttttgtatcatagaaccttttgtaccgggatatcatgcaatgctgcataaggcggcactgagggggcaggagcgtttacctcatatgaaggagaagcagaatcacaatatcgggatgaaattcctggaatacttttccgtgcaggatagacagtatataaatggtattttggcaaagaacagatatattccgcaggaaatcttaaatggtgaggattttaacaatgcaatatga

SEQ ID NO: 52162 - DNA, 1497 bp, Eubacterium sp. CAG:38
atgttaaacgatattattacagaacacaaagagcgtatgctcaatctcaaaaaatattatcctttttttaagctgatggatgtatcctttgcccagtttcaggaaggcagatatgaaatgctggacatgggatatattgtcatggggattctgcgcttttttattgaggagaataactttaaagaaaaggacgtcacttacccggaatatctggactttattacatcattgctcaaacgggactttgggctgaatctttcagcacaggaatacaaagaacttgccgattacattttcgataaaattaaaaatgaaggcagaccgtttacatttccatattatgatcctattgaaaagaaaaaatgtatttcacgtatcaaggtactggaaagtgccatccgtgaccatacggtatggtattccatcagttccgatgcaattgaattctatctggatacgaaagaaattaaagaagaaagcagaatcagtgtgcagcagctgctcttagaaaaaatgatacaggcacagaattttcagggcggcaaagatgtgattgtgcggattaatgaagaagtggcacgcctacagcgcagaaaaaatgagattatggaattgctcggcaaagatgtctttgcggggattgaagcgtatgaagattttgtccatacgggtatgcgctggtttgatgaagaagaaaagctgtttaagaaaaataaagattttatcgagggtgcgcttgcaaagatggaagccgaaccggtacagtcggagagctattaccgtactttaaaggagatttacgagctggacagccagttacagatagccatgacaaggcacggacagcttttatcggcatgtacacagatgcagcagatgacagaagaagccgtgaagcgggcaaaactcggacggttaagaagccatatccattttggggcgcttctgacagatttaatccgcagcgacaatgcgggactgttagaacagcttttgtcaccggtattactgccgcatataaagaagcggtttacgctggattcacttgacgaggcactgaccgtgaagccaaagcaggcagaagcggcggagaaagtagaagaagaaccgccgcaggaaattcagtttgcagatgaaatggaagatcagcgtattcgtaaaaactatacatttttaatgaataatctgctggcggcatttgaaaagagagatacgtttacgctttcggaatttggcgcggcaatgagcagaatgtattcgccggatattttaaaaaatgcggattactattctttttttgtcaacctgtgtcagaaacaggagtatgtcatcggcggtcagacggaaaacgagagttttctcgatgacattttaagcggcgcatttgcagaccgtgaaccggtacattttacgattacgccaaaatccgcaggagcgcaggacgaacagccaatggaacagtctgaactggtgtttgaacggaagggaacaaagtaa

SEQ ID NO: 52163 - DNA, 729 bp, Eubacterium sp. CAG:38
atggaaagcagaaatatagaaaaggcactggaaatatccgcaaaactggcggcgggggaaacggtaagcgagcaggggacaaatgctgccctgtatcaggaatacagtaccaacccggaagtgtatgatatggtattgttgtcgttaaagaaaatggaactttcggtttatgaatataataattcgctgtttgccgcgccaaaagcgcacggcagcctgtttggctacagcaatgaagcgctgcgccgggagctgggactgcgtaccaacggcgaactctatctggcgtattttatcatctataatattattatggagttttatacggataccatcagtgcaacgtatgccgaatttgtccgcgtggaagacattgtccgcaaggtggacgatacaacggcaggcattgtggataagaaaaacggctttgttttaagtgaaattgaggaaaacagcttccgcagccttgcgttaagctgggacagcctgccggcggcaaccgtggaattgtcggaattaagggcggcgaagaattccaagtcgggttttgtaaagctggtctgcaactttttagtcagccagcagttattaagtgacaatcaggagcggtactatccgacagaccgtttccgcgcagttgttgaaaattattttgacgaatccagaggaagaatcatggaattgttagaccagtcaggagaggagagggacgaacatgccgcagattaa

SEQ ID NO: 52164 - DNA, 4560 bp, Eubacterium sp. CAG:38
atgccgcagattaacagaatccgtgtaaacaatgtaaaatacaatttcggtacgcagtattacgatgactttatgatgcgttttcactgccgtaacacgatttatgaccttgcaaacggcggcggaaagagtcttttaatgctgctgttgcttcaaaatgtgattccgaactgtacgcttgatgaaaaacagccggttgaaaagctgttccgtccgggcggcggcaatacagtgatccactcattgattgaatggaagttagataccgctaacaacgacggctataaatatatgacaacgggattctgcgcaagaaaggcaaaggatacggaagcagacggcacggaagcggacggcatatccgggcgtttttctgcggcagaagaagcaccggcgggacgtgacaatgccagcgtggaatattttaactactgtattttttaccgggagtttggtgaaaacgatattaaaaatctgccgctgacaaaaaacggggagcgcattacttataatggtttaaagcagtatctgcgggagcttgaacataatgatttccacgtttcggtaaaaatatttgaccgaaagggcgaatatcagagttttatcagcaagtatgggctgtatgagagcgaatgggaaattatccgcggcatcaataagaccgaaggacatgtaagaacatattttgaaaccaattataagacaagccgtaaagttgtagaggatttattaatagaagaaattattcagaaatctttccacaataagctggcagtgggcaacgacgaaggtcagatggcacagacactgcttgatattaaggatacgcttgcaagactgtcaaagaaaaatgcacagattaccaattatgataaacagatggagctgctcgatgctttttcagagtatattctgggataccgctctttatatgaagaaaaaggaaatctgcggggacagctgttaaagctgcttatgcagtgcagacaaaatctgtcgggataccgcgcgcaggaagaaaaacagaaggacgaactgcttcatttacaggaagaattattaaaacagcagcgcatgatccagactgccgaggtgcttacagaacaggcttcccttgcgggaatggaagaactgattgctgcaaatgagaagaagcgggcatattttaaggaacaggaagaacacttaaaaaggcagatggaagaaacggaaagtctggtagaataccgcgaatatttacagtatcagaagctctacgatgaacttttggcagccattacggcaaacggacaaacggatgaagaactgataaaacagctctatgcactggcagtggtaattgtgccacagcttgtacagaaaaagaatgctgccggtgaagaattgcagaatgcagaaacacagtaccgggcgtgtcagaaagaagcggcacagacaaaggcagattatcagcaattactgggcggggctgcggcggcagaacagattgcagtgcatactgccaaagagattgaacaggcagaaaaagaactgggtgcctgtatggaaaaggcaggaatccttgtgatggaaaaggcaggcgaagaatacagtgcctgcacacagaaaatcaaagaacaggaagaacagcttttacagaccgagggacagctttcacaggtggaagcactgctttcaaagggcagacagcagcaggcatcctgccgtgcgcggattgaactgctgacagaacagttaggacaggcggaaaccaaaaaagaacaggaacagaaagaaaagcagcagcttttacagttaaaggccgtctatggggaacaggatacccgccgggcatgccgtgttgtgttggataaccaccgcagactggaagcggaatgtgagcagcttaccgctgactgtacgcagcttacgcagttcctcgaaaatatgaagcacgggatattcagtgcgggcggaagacaccgggagaaggtaaaaagctatctttcaggacggtatggagaagatgtaaaagaaggaagcgagtggctttcggggctttcggaagatgaaagaaaacaggtgcttgccgcattcccatatgccgagtatgcatttattgttgaaaatgatttttcaagaatcaaagaagacccagtgcttgcggactttggcagaagcgcctatgtgattccggtattgtctgcacaggcggcaaaagcacagcttacggcagaaaatgaacagtatgttgtatatgccagaaaggatatggcatttttaaaggatgaaaagctgcgcgggcgggaagaaaagctggcgcaggaagaactggcggcggcacaggaaaaactggccagactgaccgacagaaaagaaattgtctggaatgactacgtgcgcatacaggaactttcaaagctggaagaagaaccggcaaagaaagagtttgaagcgttgtctgtgcgtttagaggaactgcaaaaggaagcacagcgtttacaggaagaaatggaacaggaggaagccctgcgtaaaaaaggccgggagcggaaagcacaggtgcaggaaaagctggcacaaaaccgggagcggtatccatacgtgcaaaagtgcgcaaaactggcagagagtcttcttgtacagtaccgtgaaaagcaggaatacacgcagagggcggcagatgcaaagcaggaacagctcttaaaagagcaggaaatgcaggcgcaggaaaaggcagaacagaccgccttacagcgcaaaaatgcactggcagaagaatatgaccgtctgcaaagccgtcttgacaagcgttatcaggcatatataagcatggaagccgacggcggacagtccgcaggaattcatgtgctgcagtcagcggcggatggcagtgcggtagcagggttagcggatgctgacggacatgcgctgtcattagaacagctggagaaccgctttgcgggagtgaaaaaggcattggatgaaaaaaatgccgatgtgcatgataaagaagaattattaagacattaccgtgcggcaatgggaaaatgcagtacggcaattgcacgccgccattttacaatggaagaacttgcggtaaaagaggcacagggagaagctgtcccaaatccggatgatgcgctgtgtgcgcttgagcaggaacgtgagcaggcggtacagcaggaaaaagcggcagcagaagaactggaagcgcagaatgcattaatgaaccgtctgcagggaagtattgcacacggaaagagccagattgaagaaaagtacggtgcttttgaagcgtttgactgtgataacccggagcagttcattgtacagcataaaaattataaggacagcattgcaggacagatcaaagaactggaaaaagagcagaaacgccagacagaaaaaatgcaggatttcctcgtaatggaaaaggatttgtcaagaattgttgccaaagcgggcattgaagtgccggaagcgtcagaaacggaaaatgcagataccatggcaggacagccggaggatacagacataaatgtagcagatttttcgggctatgaaacggtacagaaagaatttgaaaagctgtgtgcgcttgaggtgcgcaagctggaagaatttttaaagaaaaaggataagctgacggaagaactgacggcatgtgatgcaaaagaactggcattggagattaaaatgtcggttcatgtgccaaaggacattgaagccgtgaagcagttaaagtccagactttccgaaaccaatacgctgattgcactggaaaaagagcgcgtatccaaagggatttccgatatggagcgtatcaaggataactttgaaaaccggtgtgtccagatttgctgtaatatcaagacggaacttgaccgcctgccaaagctttcaagcattacgatggataatgaagttatttctattatcgggctgtccgtaccgtatgccaaggaatccgattataaggaaagaatggcggcatacattgacgaaacggtcctgatggcggaaagctttgacaatacacaggagcggttaaaatatatccgcaaccggttaagctggaaacgcctttttgccgtgattgtaaccgatatgaacgccatccgtgtaagtctttataaaagagagcgcatgaaagaccagagccggtatctgcggtatgaagaagcagtgggttcaaccggacagtcacagggtatttatattcagtttttaattgcggtaattcattatatttcaagtatcaatgcgccggcagacagtgcgggtgtactgggcaagaccatttttattgataatccgttcggtgcggcaaaggatatttatatctgggagccgatttttaagctgttaaagactaaccacgtgcagctcattgttccggcacgaggtgcaaccccggcgattacgggaagatttgatgtcaattacattttaggacagaagcttgtacataaccggcagcagacggttgttgtcgattactacagccgtacaaaaaatgaggaacttgaatatacgcgcatggattatgagcaggcagtattcgacttcacactatag

SEQ ID NO: 52165 - DNA, 1524 bp, Roseburia sp. CAG:303
atgacagaagaatatatcctgcataaagatgtaattacaaaccataaggacagaatgttttatctgagaaaatattttccttattttaagattacggaaaacaatttttcgcaatttcagaatggaaaatacgaaagtctggatatgggatatctgcttatggcagtgttacgtttttttatagaagaaaataattttcgcgaaaaagacgtaacatatcaggaatattcttcttttataaaagaaatttatgaaagagactttggacttgtgttggatcaggcagaagaacagtctctttcttcgtatatattcgataaaataacaaacgaaggcagaccgtttctgtggtcctattacgatccggtcgaaaagaagaaggaaaccctgagagtacggctgcttgacagccgtgtcacaaaggagggtgtgtattaccgcctgacatccgaggcaatcgaattttatcttgatacgaaagaaattcaggacgaaagcgatatcagcgtgtcgcaggtacttctgtcgaagatgatcgcatcacggaatttccggggaggaatccaggtggtacagagaatgaataatcaggtggcaaggctgcagaaacagcgggaagaagtgctgggactgcttgcgggagatgtttttcatggaatccgggcatatgaaaaattcatggaaaacggaacaaaatggtttgccgaggaacagaaaatgtttcataagaatatggaactgatagaggaagccttgaaacgtgccgatacggaagctgcctatggacaggcggtaaaggatatttatgatctggagagtgaattaaaacgtgcgctcattaatcacagccggctgctgagtgactgtacgaagctgcagatacaggcggatgagatggtagccggggcgaaatattccagactcaaaaagaatttcgacttcaaagaggcacagtgtatcctgatggaagaaaataatgcggcaaggctggaagcttttattcttccacttcttcgtatccagccgaagaaacgtttttcgctgctgcaggtggacaagctgcttaccctgcggatggatcgggaggaaaaaggtgaggagattgcagaaaatgtaattccggaaatgtatgttacggaggatgagaaagaagaaaaccgaatccgtgaaaattaccggctgtatgtcaggatattgctctatgatattttgaaaaaagacagttttaccatcgaagagtggtgtggggatctggtaaaaatgctgggaaaagacgtactgaaaaacagcgatttatattccatgatgattcatctcgcacagaagaaccaatattccatgcaggaagtcatgcagcatcccgatacattttttgaagaatatctgaaaatgattcttcaggaggaaccggcataccggaagctgaattttaaaatcgagtatctcgaacataaattctgcccgatggcaggatgtgaaatcaagaatttcagaatagtgaaaggggaacagacatggcattag

SEQ ID NO: 52166 - DNA, 723 bp, Roseburia sp. CAG:303
atggcattagaaaaagcactggatattgtgtcagctcttatcaatggggaagaaataagacggaatggaggaaatgcaggattatatgaagaatttgcactgggaacacaggtctatgatgaggtaaaacttattttgaaaaaactgaatctggatctgtatgaataccgggacggactctatattaccgcaggggataataaccagatctttggctatacaaatgaggaactgaaaagagaactgggaataaagcggaaccgggaattatacctgtgttattttattatataccagattatgacatgcttttataaggacagcacaaaccgcccgggacaggaatatgtccgcagtgaccaggtgatacagagtgtggatcaggcactggcttcggttatccgggatctgaaggaattaagtctggatgaagtagaagaaaacagttttaaggaaattgcaatggtctgggaagatatgccgctggtacagacggaagatgcactgaccagggcctcaagaggttctaaaagcggatttgtcaagctggtctttaacttccttgtaacgcaggaattatttcttgaaacggaaggacgatattatccgaaagtccgtttccgtgcactcatggagcattattatgatgaacataagggaagactgtatgagattatgagaggagaaagcgatgccgcagataaacagaatcagggtaaataa

SEQ ID NO: 52167 - DNA, 501 bp, Roseburia sp. CAG:303
atgaatgaaattcgtttgaatctgtacaaacgtgagagaatccgggaacagagccgctatttaagatacgaggaagcggtcggaagtaccggacagtcacagggcatttatattcagttcctgattgcaattattaattatatatccagtatttattcaagaaatacggacagtatcgcactgaaaaaagtaatatttattgataacccgtttggggcggcaaaagatatctatatctgggagcctattttcaaaatgctgaaaaccaataatgtgcagctgattgttccatgcaggggtgcaacaccggcgattacgggaagattcgatgtgaattatgtcctgggacagaagttggtaaacggcagacagcagacggtggttgtggattattacagcagtgtggacagcgagaaactcgattatacaacgatgtcatatgaacagggtgtgctggatctggtaatgggaaataatgccgaatttggcgaatcaatttaa

SEQ ID NO: 52168 - DNA, 1611 bp, Roseburia sp. CAG:303
atggttaagatagattttttaaatgattttgataaaagaatgaagtttatagcaaggttttctgtattatgcagtaatagttttgataagaaaaagtggaaagattatggtgttgaaaacagagatgtacagatgaattatctgtttacactgctgctctgcattatggaatactctctgaaagaagaggattgtaccatggatgacatggcggcatttctttcggatatcagttttgagtattatcatcagaatttcagttatgagaaaagtatggattttgcaaggtttatcgtagaggaaatattgggtaattccggcatgaccatgtattttcaggcatttgactatgagagcaagacatataaaaagataaatatccggtatattgataataaagtggtatatcaggatggcggagtgaaaagaacatcctattatctgacggaagaaggatataatatgatactggcaacgatggaaatggaaaataacctgaggttatccatacatgagatgttgtttaagctgcatctggaaaaggcagattatcataaagcagtagatgatatacgaaatatattcagtcagctgaaaaaacagagccagaagattatggaagctatgcatttgataaaaagaaatgcattgtcatacacagtagaagagtatcgtcagcttgtggaagataatatcagtacgattgcagatacgcgtgaaaaattccggatgcatagggaatttattgaagaaaaaatagaagaatttgaggaaaaagaaataagtgcggataacttcagtgaaaaggaaaaagaaaatctggagaatttgagaaagataggtggttatctttcaaagacactggacgagcatcagaaaatacttggacagcattttgatttgaaaaaattgtatgattatgaactggaaaattattcgaatatgacgctggttcaaagatttccttttcggaaagatgtgtatgatgaagttttaaaagatgtgaatctgttaaaaaatatggatcggatttttaatccgctactgaatgtaaaatcagataaaatttttaatccggaaaaaatgtttgaatatcagaaaagaatacggagggaaaaagaaggagaagaagattttgaactggattttaacagtgaggaatatcagaaggaaaaggaacagaaaagacaggaacgtttaagaaaatacgaaagaagtataagaatagttcttgataaattactggaatatggtgaattggaccttgcaaaattaagcatggaatgtggaatggaagagcagcaggatttgattccgtcggttgaaatattccgggagattatgatagaatttttgacagcaggaacggtaagcgtggaagatttaagaaaagagcaggcaggatatctcatggaagcatcggacagttttgtactgaatgaaatgctgcttaccatattagaggataagaagtatggaacaataggaatgatacaggtatacccggctaaggaagaaaaagcggtgtactttaaaaatctaaaagatgaagccggtaatttcagaaatctgaaatgttcaaatataaaatttatatacgaaaagaggtag

SEQ ID NO: 52169 - DNA, 765 bp, Roseburia sp. CAG:303
atggcatacgaaatagaaaatattacatacagccagaaaattttttattatctgctgtgccatggagcattgaatgatacagatatgggtgtagatgatctgtaccgggcatatgtggaacgggaagaggttatgaatcttgttaaaaatcaggcagaaattgcaggatgcagtgtagaacgctatggaagtagtatttatctgatgcctgatatggaaaataaatatctgggatatacaaaagcagatttgaaaaaagaaatctgtaagtcaggtgcaacagaccgggattattatctttcgcagtttgttattttaactctgattgctgaattctttgatggacagggaagtactgcaaaatccagggaatttctgaaacttggagaacttcagaatattgtggcggagaaattaaaagcaggatatgagatggagcagcagcgggaagagaatggtgatcaggaaaacattctggattataaaagcatgactgaagcatatcaggcattaaagagtgtagaggaaggaacaagagcaaaatatacaaaagaggggtttgtcagtattatctgtgattttctggacaggcagggactgattgtgtttgtgcaggaggatgagatgataaaaacaacaccaaaactggacaatattatggaatataaaatattgaataaagataattatacagcaattatggaagtgttgagggcagaagatgagcaggatagagaaaataagaattttaaatctgaattataa

SEQ ID NO: 52170 - DNA, 1965 bp, Roseburia sp. CAG:303
ttgaaaatccggaatgaaagagctgatatagaagaagtgtgcagaaagacagagatgcagattaatcagttaagaaagaatataaccgaatacgaaaacaggcagcgggagtttgaaaagctttgcaggaagtatgaagtatatggaaaggcagttatgagtctgaaaagaatccggaatgaaaaagaggaactgttaaaagtgcagaaacagctgacggattcgatgaaagaaacggaatttgcagttcatacaatcaccgataagttaaaacggattcaggagcaggagaaatatctgcggaaaaagagaacagaatatgagacctatgcaaaaatggcagaaagtcagaaagcacaaaagggaatggatacggaaattgcaaaaacagaggcagcatatctggcactgacaagggaaatatcggattctatagaagaattgaagaaaagacaggaatggttttcaagtcatattgtacagaaaaaaagagaactggagaaaaagaacagatataagatagaagaaaaggaatataaaaatcttctgtactcagaagaacagtatgaccatctggaaaaccggaaagaacagattgaaagaacactgaatgatgcaaatgaaaataataacacacttacgggtaagatagagatgataaagaatgaactgaaacatgtttatcagaacctgaaagaaagtacaggatatgaagagcctgttccacggaaaaatattacagatacggaatttgaaaaacgcataaattttcggaaacatgattatacccagatgcagacggaaataaaatccatgcaggaaagaaagcagcagttatctgtttttgcagagggaatgacggaatatgaggatgaaagcattgaaacggaaaataagcatgtagaagaagtaaaacagagaataccggacatcgcaacggtagcattggatattctggcagcatatcagaaagaaaaaaagaagaagaaaaatcagatttcaaaagaaatggtaaatatgcagatacagatatatgataagatacatggaatcgcatcaaaaagagagtatgcggatgaatactttaagaaaacatttgacagcctgcttgtgcagacgaaacagccgctctatctgtcgcagcagtttgaaataaacaggatttcctatgaaaatcagctggagaagctgaaaattgatctggcagaaatggatcaggagcaaaaaaatatcgaagttatgctggctgaatatatcaggcaggtaaataataatattgccatgattgataaaaattctacaatcaccatcagaaacaggacggttaagatgttaaaaatccaggtgccagactgggaaagcgagaaagaacatttcaggctcagactgcatgattattttgaaaatgttttaaaatctgcgatttatgttgttgaaaaaaatgaaaatctcggtgagtacataggtaaggcaatacttacaaagagactgtacgatgaggtggtcggaattgggaatatcaggataaaactttataaaatcgaggaagaacgggaagtgccaataacatgggcacaggtatcggcaaattccggaggcgaaggattcttatcggcatttgttgtgcttagctgcctgttaagttatatgcgaagggacgaaacagatttgttctcaaatggagaggaaggaaaagtactaattatggacaatccatttgcacagacaaatgcggaacatcttttaaaaccattgatggaaatggcaaaaaagacaaatacacagttaatttgtctgtcaggtcttggtggtgattcgatatataaccggtttgataatatctatgtattaaaactggtagattccggtatacgcaaaggagtacagcggatagaaagcagacatattaaaggcgatggaataagagaagtagtgccgtctgaattcagggtggaacagatataa

SEQ ID NO: 52171 - DNA, 987 bp, Roseburia sp. CAG:303
atgaaaaagactaagattggtttaaaagatattgcggatgcacatccggagatggattatttacagttatatgaatatattatgcagatggtggataatggggaatttctcccggtaaaacgggcaaagacaaatggaagaaaacctgcattgccgcttagtttctggaaaatccgtgaagaacaggatgattatgctgaggtttatgaagaattggattatagattgaatccgcagctacatacagaatattacagaaagaatccgcaggcttatttaaaggacagggataaaattctgttgctgagtaattatctggactgtcattcggaactgttaaagattccggaaacgatgaatgagcggagttttgaaatttttcaccgggagaaattttttcaggaagaagggggattaaacttttgtaaaagacttggaatcagtcgggaaatgctgggattttatgaaacttccgaaccgctttcttactattcccgttcaaagaaaactccacaaaatattctgatcattgaaaataaagataccttttatgatatccgcagatatatcagccagaccggaagcatattaggcaaagagtttgatactgtaatttatggtgccggaaaaggaatctggagtacatttgccgattatgtaaatcaggcggaggagtactttggtgcagataacagactatattattttggtgatctggattatgagggtattttgatttatgaacaccttgtgaaaggaaaccagatacagattgcgttatttaaaagagcatatgagaaaatgatagaaaaggcacagagttcaggaattgaaaatctgccggatacaaagcagggacagaataccggtatagaaaatatatttatggacagtttttgtgaaaaaacacagagtgagatatggaacatcctgaaatccggtaaatatattccgcaggaaatattaaatgaacacgattggggataa

SEQ ID NO: 52172 - DNA, 1509 bp, Clostridium sp. CAG:269
ttggaaaacgaagaaaaagaagtatttacagcagaagagataaaaaaacaagcttatgaagaaataataaaagatgtaatagaagaaatagattcaagagaagaaaacttaaaaatctattatccttattttgtaataaataaaaaattacaagatgaaaaaactgaaattgacttaaattcagtttttgtagcaatattatcatatttactttatacaggaaaattaaataacagaaaaatcgaatatcaagatataatagattttacagaatattttatttataaaatatataataaaaaacaagaaaatgtaaaagaaatagtaaataagatattagatgtagcacaaaataatggaaacaattttacttatgaatattacagtttaaaagaaaaagaaaataaagatagacatataaaatatatagaaataaaattaggagaaaatggaaagctaaattattatataacaccacaaggaatagatttttatttaaaaacaaaagaatttccagattcagcacaaataacaataaatttattactatttagaaagcaaattgaaaaaggttcatttaattatgcttatgatacgataaaaagactaaatatagaagtaaagaaaaaaagtgaacaaaaagaactagtacttgaagcattaatgtatggtggaaaagaaggaatagaagaatataacaagtatcatgaatctgttgaaggacaaataaatgaggaagaagaattatttggagaagtattagaattagtagataatatttacaatgaatatttagctaaaaatgaatcaaatcaattaaatgaaaaagaaaagcaaacaatttcattaataaaaaagatagaaaaagaattaaacaaaacaataaatagtcatacgaaattattaaaagaagcaatagaaatgacaaaaaaacatgatgaaataataggtatgagagcaagaagtgcattttcagaaaaattcaaatttgagcaagaatttgaaaaggttatatcaaaaacaaataatccagaaaaattattttattttatatcaccatttttattaccaaagaaattaaaaagttttaatccaatgaaatcattagaatcacaaaaaattaatcaagataaaaaagaagaagaacaaaaagaaaaatcacaaacacatcaaatagatacaattgatgatattactaaaaaaagagtagtacataattttaaattttattttgaaaatatgttgtttttattaaaaacgagaaaaagctttgatttaaaagaatattcagaattcataagatcaaattatggagaaaaatcattatataatggtgattttatatcttttgtaatatttttaaatggtaaaaaagaattaactgtagaatctgatgaaatgtttaaagattattcatttaatcaaattagaataataacacaaaatgatgacattgactttggaaatggattgaaaataactaatattattatttcagcaaattcatag

SEQ ID NO: 52173 - DNA, 732 bp, Clostridium sp. CAG:269
ttggaagaaataaaagatagtttaaatatagcattagaaataataaatacattattacaaaataaagaaataaaaaaatctgaaaacacagaattatatcaacaatatgttggaaatgatgaagtagaaagcttatgtgatatgattgctgaaaagatgggatttaatatttatagattagataatacattaaatctatgtgtgatgattgagaataaagtatttggttattcaaatgaagatttgaagaaaaaaattaaaatattaaacaaaaatgaagatatatatttaatgtattttataatattaacaataataacatgtttttatagagaatcagggctaaattcaccaagaagttatttaggtcttgacgaattaatagaaacaataaatataaaatttcaaagtcttgtaaaagaagatattgaaaaaataagtgaagaaaatgaatataattttagagatgtaaaaaaagtatgggaaaggttgccagatgcaagagaagacatcaactcaggaaaaaacgataaaatatcttttgtaaaattagtattaaattttatgcaagaagaaaatctaattttctttgatgaggaaagaagaataatatcaattacaacaagattcaaatcaatagtctatttttactttgaatatagtaaagaaaataaaaatagattacttgaatatgtatatgaattaggaggtaatgaaaatgccacatattaa

SEQ ID NO: 52174 - DNA, 4383 bp, Clostridium sp. CAG:269
atgccacatattaatagaattcgattagtaaatgtaaactataatgatgcaaaaagcatatatgatgattttaatatgagattagatggaaaatctacgacatatgatttaataaatactggtggaaaatcaatgctaatattaatgcttttacaaacagtacttccaaatacatatttaaaaaaagaaaagcctataaaaaatatatttataggtggaaacacaaaaagaacatcacattgtcttgtagaatgggaacttgatgaaggatatgaatacaaatatatgcttacaggattttgtgcaagaaaaaaacaagaatcagataatgatgaagaagatgatagtaaactagaaatagattattacaattattgttatttttataatgattatgcacaaatagatataaagaaattaccacttgtaacaagagatggaaatgataaaatttatatgtcttatgataaattaagacaataccttattggaatgaaaaaagatggattaccagtagaaatatttgatagtaaaaaagattatatgaaaagaatagaatattatggacttatatcagcagaatggaagcttatatcagaaataaatgtatctgaaaattacatagaaaaatatttcaaagaaaataaaacatcaagaaaattaatagaaaactttttaataaaaataattgataatatcaatttacaaaatagtgatgagacagaagatacattagtagatacattgatagaattaaaagataatttaatgttatttagaaagcaaaatgataacaaaaaagaatatcaacaagcaaaagaaatgtatgaaaatcttcaaaaagaaaatgcaaaatttattgatgaatttaacagaattgataaaataaataaaaaagcaaatgaagcatatcaatataagcaacataaaatgaatgagttgaaagacaaaattcaacatgaaacagatgaaattgctagattacaagatgaaaatacaagattaaatattgaaaacgaaaaatataaaatagataaattacataatgacaaagcagaaattgaaaatgacaaacaaaatatagatactgaaatacaaaaaatacaagccaaaaaagatgatgtggaaaagaaattagcattgtcaaaagctcaaaatgaatatgttgaatatttagaaaataagcaagaaagagataaaacacaaatacaaataaatagtatgcaaattgctgataaagatttggcaaaaaaatataatatttatggatataattataaattaaaattacaagaattaatagagaagattagtaaacaatattctgataaatcaaaagaaaaagatgaaaaaactagtgctagaaagattgccaaagatcaagaaaattttgcaagaacaaattttacaaaaagttctttaaatatagaaaattatcaaaaacaaattgatgaagaaaatgaaagcaagaatataattacgaatgagtttacagaaaaaggaaaacttgatttaattttaaatattgatgaaggaatagaaaaagaagaaaaattacaaaatgagtgtaaagaaaaagtagaaaaaaataatgcagaaatagaaagattagataatgaaaatataaaaataaatcaagaacttgctcaaaatagagcaaatcaaatacttcaaaataaagtatttaatgatgctgaatcagatgttcaagaatatgaaaaagcgaaaaatagtatagaaaaactagccaaactatttgatgtagatcttgctaatataaaacaaacaatagaggcaagtatagaggaaagagaaaagcaaagaaattcatatcaaatagaaaaacaaataaaatcaagaaaacttgaactaattaataaatataatacaataattccaaatgaagatatattacatttgaaagaaaagcttgaaaataaatgtaattatgtaattgcaggatttgaaaagttagcagaatatgatgaagaaaaacgtaatgaaataataaaaaataatccattaataatgtattcagtatttgttgataataatagttttgaaaaattaaaagtaaaacaaatagaaacagaattacaaaatttagtaccaattgcaaatattgaaatgttaagacaagaagcggtaataaaaagcaaagattacatatttcctatttctgttgacgtattgcaaaattcaaatccagaaaaacttgaagaatataaggcaaaattagagaaaaatattgaaggattaaattctaaaatattagatgtaaaatcaagaattgacagagagcaagaatatttgaatgaagttaaaatatttgaacaaacatattcaagcaaaaacataatagattctttatatgaaaatgtagatagtacaaaatctcaaatagaaaaattagaaaaagagcaaaaagacttaagtaataatattcaaaataataatgagaaaaaagaagaactttctaaagaaaatactttattagaaaaagaccagaaaagtattttagaagaaattgaagttttaaatgaattaaaaaatataaataatgaattacaaaaacttcaagatcaaatcagcaaagaaaaatcaaatgaacaaatattaaaagaaagtttagaagaaaaaattgaaatagttcaagaaattgaagatgaaataagaggactagaaaaacaaataaataatttagaaaatcaaaaaaatagatatttgataaaattatcagaacttacagaatttgaagaaacagagattattgaggaaagctttgaagaaatagaaacaacatataaagcattaacagaaaaatttagtacatctgaatcaacatataatcaattagtaaaaatattaaatatgtgtaatcaaaatatgaataattgtcaaaatagaattgaagaaaatggatattatgtacatgattttgaagaaaaaaatcaaatatttgaaaaaattaatgagagtgatttgaaatcatataagacaaatattgatattttagaaaaaaatattaaatcattaaaaggcaggctaacagaaaaagataaagcagaaagtgaaataataggacaaataaaattatcaattggtcaattacaaaaatcaggatttgaatatgaaattgaagataaaatttcaaataatgaaataatcaaaacatatatgaatgaaaataaaaataaaatcatatctaataaaacaaatataagaaatattactaataaaatccaagatgttgaaaatgaagttgaagagtttaagaaagaatgtataggtttagaaaatttcataacagataaaaaaatagagcaaacagaaattgatattgaaaatatattagaagcagaattatatacatataataaaatcaaacaagaaagtattagtttagataaagaattatcaaaacaaaaacaaaactttgatagttatataaaacatattaaagaatgtgttgaaaattattatataaaacaagatgtgttagaatcaatagaaggaataaaaaatcctgtatgtttattaagtgaagcggaaaataataatcaaggaatattaactattatagagttaattgatgagagaattagacatattgatgaggcaattgaaaaacttgaaaaatatcaagaaaactttattacaaaatgttttgaaaaagcagaaacaatagtaagagatttggaaaaattgccaggattatctaaaattaaatttggcggaaaagatataaatataataaaacttgaattatttgaatatgaaaaagatgaaaaaataagaagaatgaaagaatatatttataaaattgtacaagacatggaagaaaagccagaagaaatgactaaagaagttttaaatgaaaaactttcttcaaaaatgttagtgggacaaattataaatatagataaagcttatgtaaaattatataaaattgaagatgtgcaagaacattcaacatataagagatgggaagaagatttaggctcagacgggcaagttaatgcaatttactttatgtttgctgtttgtataatttcttatattagtatgcttacaagaaaagatggttcaagcaaatgtaaaaaagttataattgttgataatccttttggtgcaacaagtgcagtatttttatggaaagttatgtttgaaatattaaaagaaaataatgttcaattaattgcaccaggtcataatataagtaaagagattatatcaatgtttgaggtaaattatgtattaaaacatgagtttaaagatggtaataagaaaacagttgttgttgaacaagagtttagagcagaggattctttgaagaatatgaactttgatacaattgatggaaatcagcaaaagttgttttaa

SEQ ID NO: 52175 - DNA, 996 bp, Clostridium sp. CAG:269
atggaaataaaagaacaaataatagtactagtaaaatctaaaaaatccaaaacaataaacataaaagaaataagagaaaacctaaatcttgaatatactccacaaaatgaaaaaatactaaaaaacgaaattgaaaaattagttcaagagagatatatagaaccacaaaaaacatcaaaaacaaatgtagaaggaatttcagaaaaatataaaataataaaacaagatgatgcaaatataaaacaagaaattataaatttatcaaataagcttaaaatagactattatttaaaaaatacaaaagaatatcaaaaagacaaagaaattattaattcaataagtaaatttatttcaaaaccgatagaaggtgtcttaacaataaacgaaagatcatatcaaatatttcaaaacgaaaaattgctcaaagaaagagaagatataataaaaaagcttggattaacattacaagatttaaaatgttatgaaacttatgagccatttttttattatgaaaacaaagaatttagtaaaggaaaaattttaataatagaaaacaaagatacattttggacaatacaaaatgtagtaaaaacaactaaatataaaaatatatatttagtcatatatggagaaggaaaaaagatattaaaaagctttgaatttatcaataattttaaattagaaaataacataatcgaatattttggagatattgattatgaaggaataaatatttatgaacagttaaaaagtaagtattcacaatataatataaaagcctataaaacaggatatcaaaaaatattagatatagaaaaaaatcccaataaaataagagcaaatcaaatttgtaatttaaaaaacaatgaagaatttttaaaagaatttgataaagattatcaaagaaaattaaaatatatatttgaaaataaattatatatcccacaagaagtgtttaatgcaagtattgcagaaaaaataatgaaaggagaatag

SEQ ID NO: 52176 - DNA, 1533 bp, Eubacterium sp. CAG:76
atggcggagaatatgattggagagataataacagagcacagagaaagaatgcttaatcttaagaaatattatccttttttcaggcttattgatacttcattttcccagtttaaggagggcagatatgaagcacttgatatgggatatatcgtgatggctgttctgcgtttttttattgaggaaaataacttcaaggaaaaggaagttacatacaaggagtatcaggagttctttaataacataataaggcacgactttgatatgaagcttactgaggaagaaagcggggaagtggctgattatgtctttgataagatgaagaatgagggaaagccatttgagtatgcgtattatgaccctgtagagaagaagaagagagtatcaagggttaagcttatagaaagtacaataaaagataatactgtgtggtacagtataagcgctgatgcggtcgagttttatcttgatacgaaagagattaaggacgaaagccgtataagcgtgtcacagctccttttggagaaaatgattaattccaataactttaaaggcggagtagaggttatagaaagaattaatgaggaagttggaaggcttaaggttaagaagaatgaagttatggatatgctttccaaagatgtaaagacaggacttgaacattatgaggattttgtcaatacaggaatgaaatggttcgttgatgaggagaagctttttaagaagaacaaggaacttattgacaaggcaatagaaaggcttgagagtaattcatcagcgacagaaagctattacaggacattaaaagaaatccattatcttgaggaccagcttaaaatagcaatgaacaagcacgcggaacttcttcgtgactgtactgatatgcagaataagacagatgaggcagtaaagaaagcaaagctttcaaggcttcgtccacatatggatttcacagcggcactctcagatatgataaggacagatgatgcttcgttactgtcatttataatagagccgctgttaaagcttaatataaagaagacatttgacataaagacaatagatgaagcacttcttgtaaagccggcaagatatgataagaaggaatatgtaacagaggacacaccagaagatatagtatatgaagatgagatagaagatgaaagaataagacataattacatctttataatgaataatcttaaggagtgtattaacagaaaatgtatgaataaatcggacattttaacgcttggagaattcaataatataatgtcagaagcttatggagaggaaattcttaataatgctgattattattctttctttgttaatctgtgccagaaggacagctatgttatcggtggagataatatgcagtcagaaacatttcttgatgacatattaaaggagggttttgaaggaagtgagcctgtacatataattatggaaaagggaacagatgaaataatagattacaccaatgtgcaggtaatgaatattacattcagaaaagaggcagacgatggaaaatag

SEQ ID NO: 52177 - DNA, 705 bp, Eubacterium sp. CAG:76
atggaaaatagaaatcttgaaaaagcattggatatagtatcgaagcttataacaggtgaagaacttactgagcgtggtgacaatagttctttatatcaggaatataacaacaatgcagaaatctatgacatagtacatgtgtcacttaagaagcttaacctttcaatatatgagtataataatggactatatgtcagtgcaggagagaacaacagggtgtttggctatacgaatgaagaactgcgtaaagaacttggcattaaggtgaataaagatttatatatggcatattttgttatatacaatattataacagaattctatacggcatcatctaatacgacttatgttgagttcgtaaaggttgaggatattgttaaaaatgttgattattcggtgtcagcaattatagataagaagcttggaatgattattgatgatatagaggagaacagctttaaacagatagctttaagctgggacgagcttccggttataacagttgaagatacggcagatgtaagagccgcaagaaattctaagacaggttttgtgaaaatggtacttaacttctgtgtgtcacaggggcttttaatggaagcacagtcaagatattatccaacagacagatttaaagcacttatcgagaattattttgatgaatataagggacgtatggcagagattatgcagtctttgatttaa

SEQ ID NO: 52178 - DNA, 4461 bp, Eubacterium sp. CAG:76
atgccacagattaatagaataagagttaataatgttaaatataattttggaacgcagttctatgatgattttataatgcgttttaattgcagaaatacaatatatgaccttgctaacggtggtggaaagagtcttttaatgcttcttcttatgcagaatatgattcctaattgcacacttgatgagaaacagcctatagagaagcttttcagaaaagggagtgacaacacctgtatacactcgcttgttgagtggaagcttgataacaatgcagttaaagacggtttcagatatatgacaacaggcttttgtgcaagaaaggcaagagatgcgaaggatgaagaaaatgttactgacggcacagatacattaacacaggcacaggcttcatcatctgataatacaagtgtagagtatttcaattactgcattttctatagaaagttcggggaaaatgacataaagaacctgccgcttgctgttaatggtgagagggttacttataatggcttaaaggcgtatttaagagaagcggagaagtcagattataacattaaagtatacatttttgacagaaagggggactaccagagctttatatcacgttacggaatatatgaaagtgcgtgggagatagtaagaggcatcaataagacagagggacacgtaagaacttattttgagactaattacaggacaagcagaaaggtcgttgaggaccttcttatagaggagattatacagaagtcttacaataacaggctttcagttgataatgatgactctatgatggcaaagacactacttgatattaaggataagcttatagaactttccaagaagaacagtcagattaatgattatgataatcagatagaggctttaacatattttaaagattatattgcgacatataaggaattctattctaataaaagcaatatagaggacaagcttgccaatatgctcttatcagtgattaatgctgagggcagaaaagaagcagagctttcagaacataatgaaaaagagcaggagctttataatgaactttctgataagaaatataagatagcagtagccaatgtattaaaggaaaagaagtcattaaatgagcttgataagcttgtcaaggaagcactttcagatagaaataagaaagagaaccagataaagactgcaagggaaaagcttatgcttttagaggcagctaataattattgtgactatatcaattacgaaaaagaacttgttaaagttaatactgcaattgacagccgtatgatagaggatgaggacatagcgtcagaattaaacaggcttgcagctatatataagcagtattatgacaaggcagaaaaagaactttcagctaagactgccagagcagctatagatgagaagaatttaagagatgagcttaaaaaggcagatgagaaacatcaggaagacaagaataactgtgctgttatacagggacaggaaagtgctgtaaaacagcagattgaaaaggatgagaaagagcttaaaaggcttgctgacgcttatggaatactgattgttgatgatattatatccaagatagaggaattaagggtacagcataatggtattcttaaggcagaggctcttttggaagaaagcattaaagaaacaaccaagtcggtatacaagacagaggaaaagattaatattgctgagtctaatattgcgatgttagatgaaagaattgaccaacttcaatcacagattataagcaggcaggagaatgagagcaagcttaaggatttgcagagaatatatggaattgcaggagctgacagattaaaagaaggcattttcaaagaattcttaagaatgaatgacaaatataatgaagacagccagaaggcagttaagcttggaaaacttatagaagcagtaagtgcaggttcttattatatagacaatccttcttacaataagttcagggaatatcttaaatcagtgtgcggtgaagctgtaacagaaggttataagtatcttgaaaatgcaagcgaacagcagagaaaagatattgttaaaagaataccatttatacagtacagctttgtaattgacagtggttttgacaagttaaaggaagcggaactgggaactgaaacacaggatagtgctgtatatccggtaataagtgcagaggcacttaaagatgaaaatattaatataaacagcgataaagttatatttgcatttaatgacataagttatcttacagacgataaaagacgtgatgtaaaggtacgcattttaagggaagaacttgataatcttaacgataccataacaaagcttaatagcagaaagcagacagttcttgaagattatgtgctttcggttaatgctggtgatacatcagcggaaaagcttgatgcacctgaggagcttcttaagagaaaaaatgacatcaaagagaatatcgccgcatacagagcagagcttggacgatataatgataagaagtcacaggatatggcagaacttgaaaatgtcagaaagtccaagaagtctgttgaattaaacataagcagatatgaagaaattgcagttgtaaatgagagggtaacggcgggatatgtgacattaaaacagcttactgaaaagcttaaggctgccgaagcacagattatagaatgtgcagattatcttgataaaataagagaagactatattaaggcagatgagtataagactaatgttgataatcggtattcagagcttgtaagtgtctgggaaaatacagtgtcgcatttttacaatgagagcattgattataataatgatgaagcggataagattaaccctgacgaacttaccgctaagataacaggtcttaaagacattttatctaataagaattcagatgtttctgataaggaaaatcttagaaagcacttgaaagcttctgttgataaatgtattgaagctattgagtacagaggtcatacattagaagaacttaagggaatgtatgagactggaacaatatctgtaagtgacaggacaaagcttatggggcttaataatgaactgcacgagtatcagaaagaatatgatgaaggaagcagggagacagaagctaaagaagcacttcttaacagacttgagggaagtattgcacatgctaagagtcagattgaagaaaaatatggacgatatgaagaatttgagtgtgacaatcctgaaaagttcgcagatgatatgtctgtggcagtagcagaattagagaagaatatagaaaagtatgcacagttaagaaagcatatgtcagatgaactcaaagagatacagcttataagaaaagaccttgaaagaataacatataatgcaggaattgatattgagaattatgcagaattatcagaatcggacattgagattaaagattttgaaagtgttgcgaaagaatacgagcagacagcaaaagagtattcatctatattaaagcttgaatacaagaaagctgatgagttcaacaaatataaaacaaagctaatagatgaacttaagaactataatggtgctgaacttgccgttgaggttaatgtatcggttgagcttcctgttaatgccgcaaagacagaacagcttgttaaatcaatagaggatacgaattcatttattgaacttgagaaagagcgtgttcacaagggaatagaggatatggaacgtatcaaggataactttgagaacagatgtatacagacctgctgtaatataaagactgagcttgaaagacttccaaagctttcgcatatcagaatggacaatgaagatattgcaataatcgggctttatattccttatgttagggaagaaatgtataaggacagaatgtcagcttacattgatgagacaattgttgcagcggaaagctttaaggagcaggaagaacgtttcagatatataagaagcaggctttcatggaaacggcttttctcagtaattgtaacggatatgaattcagtaagaattaatctttacaagagagagagaataaaagaccagagcagatatttaagatatgaggaagctgtaggctcaacaggacagtcgcaggggatatatatacagttccttatagctattattaattatatttccaatatgaacacagtatcagatggacagcctttgggtaagactatatttatagataatccatttggtgcggcaaaggatatatatatatgggagccaatctttaaactgcttgcagtaaaccatgtacagctcattgttcctgcaagaggtgcaacaccggcgattacctcaaggtttgatgttaattatatacttgggcagaagatggcagacaaaagacagcagacagttgttgttgactattatagtaatgttaaagagactgaattggaatacacaagaatggactatgaacaggcaagctttgatttcatatag

SEQ ID NO: 52179 - DNA, 1611 bp, Clostridium sp. BL8
atggaagttgaatttttaaagaactttaatttaagaatgaaaaagctaggatcttatgctttaatttgcaagaatagtatgtttaaaagttcctggaagaactatggctttaatgaggactatgagtatttaaaccttatttttgcagtgcttttgtacattatggagcagtctttaaaggatgaaaactgcaccctagatgatattgctgtgtttattgatgatataaattctaaatactttaataagagtttaagctttgaacagtgcaaaaaccttggagaatttattgttaataccatcctttgtgatgatgggaaggttatgtatttcaaagggtttaattttgaagatagggagtacaaggatatacatatttcctttatagggaacaagattgtttatataaataatgtggttaaaagaacttcctattatttaactgatgaagggtactctcttttattgtctactctagaaatggagaataacttaaggttaactattcacgagttaatttttaaaatgcatcttgaaaaggccacctacgatagagcagtggaggatattaaaagtattttcaatattttaagaatgcagcttcaaaaaatggaggaggcaattaggagaattaaggaaaatgctcttaattattctgtagaagagtacagtgaccttcttcaaggaaacatggagtctttgcaggaaactagaggaaagtttaaaaattataaggaacatgttgatgatagaataaaggaattgaaggaaaaggatataaatattaaaagactggatgaaaaggagctagataatttaaagtatttaggaattatcagtaagtacttaactagaaccatagaagaacagcaaaagattctaaactctcactttaatttaaaaaacatttatgcaagggagcttagagaaatatcctccatggctataattaaaagatttaatataacaacagagatctttgataaaatccttgaggatagcagtaagttggatgctatagaaaaggtgtttagaccactttttaatatgccaattgaaaagaaatataatttaaacaagagccttcaataccaaaaggttataaaggaaaaagaagttgaagatgatgaactgatttcctttgaagatgaagattgggaaagagaaaaagaggagcaggcgagaaggaagctattaagttacaaagaagctttaagagtgcttctggaattaatctgtgataaaggggaaacttctctaggggaaatttcaaagattgtagaggaaaataaaagccttaaggaaattttaattccgaaggtagaagtttttagagaaataatcattgagcttcttaaaggaaaggaaattcatattcaggagttaagagaagaagtcagcgcaaccttacaagaaagtggacaactgcagtttcaattaaatgaggttttattagatttagttgaggaagagccaaagctagcccatattaaaaccataaaagcagacaagttatttaataatgaaaaagtaaagttcagtgaagtatctagcgaaaaagggaaggttaaatcagtgatttgttctgatgttctctttaacatatcttaa

SEQ ID NO: 52180 - DNA, 717 bp, Clostridium sp. BL8
atgtataatattgaagatataacaatgggtaatagaattttttactatcttcttaaaaatggagagctaaaggaagaagtagagagagatttatatagagcttattcagaaaaagaagaggtaatgagcttagttaaaaggcaaggagaagattttaactgcagtattgaaaaatacagtggggttatttatttaattcctaaggaagacaatgaatttttaggttattctaagggagaattaaaaagggaactttgtaaatctggtggaacagacaaggattattacttatcccagtttgtaattttaacaattttagttactttttataattctcaaggaaaatccagcaagtcaagggacttcttaaagggaggagaactttctaatttagtaaatgaaaagttaaaggatgccgtggaaaaagaagaagtagagaacttagaaaaaacctcaggcattgcctttacaaatctttatgagagttggcaagccttaaaaagttcagataagtcaaccacagctaagactactaaagagggatttatttataccatattaaccttccttgaaaatcaagggttaataatgtacataaaagatgatgatatgattaaaacaacttccaagctagataacttcatggattggaatattttaaataagaataattatgaaagggtagcaaaggccttaggaggtgttgacggtgagtaa

SEQ ID NO: 52181 - DNA, 4395 bp, Clostridium sp. BL8
gtgagtaaacttaatagtcttagattagttaatttaaattataataacaacactatgaaggttaatgatgaaatttttcagtttggtggagaaagtaccttaatgaatttaagaaacggagggggaaaatctgtaatggtgcagatgatgatggctccctttgttactaaaagaaatagagatttaaaagagagaaaatttaatagctattttacctccccaactcctacttttatattaacagagtgggttttagagggaggagacaatcgcgttcttattggtatggcagtgagaaagaagaattcctctgaggaagatgatgaggaattagatataataaacttcattcatgagtatagaggcagcaacccctatgatatttataatttacctgttgtagaaaatcagggtaataccttaaaaattaagagttttggtaactttaaaactcttgttgaagagttaaagaaaaatagagattttaactttaattattacgatatgaatgtagcctctcaaagcagaaattattttgaaaccctaaagcaatataaaataaaccacaaggaatgggagagcatcattagaaaggtaaacatgaaggaatcaggtttatctgagttatttcaagaggcaaagagtattccagggttagtagaaaagtggtttattaaaactgttgaggacaagttaaatagagaagaaaataagataagtaatttccaagaaatcataaagaagtttatttatcaattcaaggaaaatgaagctagagttcaaaaaaaggcagctattgaactttttaaggaagaatcagaaaacatagctttagctgctgatagttttaataaggaaagaatccacaaagaagaaatagaaaatgaaattgcaaatttaatattatttttaaaaacttctaaggaagcaagagaattagaacaggaaagtttaagggaaattttaaatagcctaagggccgaattaaaggatatacagtatgaagaagcctctgtagggttttataagctaatggatgaaattgaagctttagaagaggaaattaataataccagcttacagattgaaaaagtggaaggggaaaagctgcaccttgaaagaacaaagggagtttatcaatgtgctaagatttatgaagactataaaaagacttcccaaagagttcaaaagtatgaaaatcaactagaactagctaactccaatcaagaagaaactgaagaggaaagaaaacacattggctttactttaaaaaattactaccttaaagaagaagaaacccttgaaaatcaactaaaagataatatggaaagtttagataaaacaaaagaagaaattgaaactatagcttctaacttaaaagattttgatgcatttatatttagcaacagcaaaagattaggtggactacaaagtgacataaaaaggtataacgaagtagaagaaaagtttaatgataaatataagaaaaagattttaagaaatatgctaggattttatccagaagatttaattttaacctgtaaaaatgcctatgaaaaacaggaaacagctttaaatgaaaaaattaaaaatttaaataaaaccttagttttaagaaaagaagaagttccaaaggtggaaagcgaaaaggtcagactaagttcccttataaataaaattaatatgaagcttgaagagggagaaaagcaaaagatagagatagaggaaaaaataaaagaacgaaaagatgttttaaagtacatagagttttctgaggagaagttataccaaacagaggaaatcctaaagacctttgaaagtaaaatagaacttttaagggaagaagagaaaaccttacttggaagagttttaaaggttaaggaagagttaactattctagaaacaggaagaaacttaaagctttcaaaggaactggaaagaaagcttaaaggaagaggtatagacctggtatatggagttgattggcttaaaaataacagttataccatggaagaaaactttagacttatagacaaaaatccaatgctaccctattcattaattatggaagatgaggatattaataaacttaaaagtgaagaattaggggtttattcaaatagtccaattccaataataaatagaagaaacctagataaaaacttaggaaagattaataaggagctttgggttctagatgacattactttttatatttcttttaatcataagcttttaaatgaagaggagctaagaattcttctagctaagaaggaagaagaaataagaaaggcagaagaacttctaaaccttaaaagaaaagacatagatacctatcaaggtttaagaaataatataaaaacctctaacttacataaggattcctataaaaaccttttaaatgaaatagaaaaagatgaaaaggaattaaagactgctgtttcacagtttgagcacatgaatgaaaaactagaagaacttaaaaactccattgaaaagggagaaaaacaaatcaaagaagaggaaaaactgcagagggatttaaaggatgaaatggatagctttaaagaacttgcacttcagtatgaaaagtataaaaactataaaatagaagctgaaaaagtaagtaaaactatttctgaagccgatgatttaaaagcccaaaaggaagagtatattaagcagaagagaaattatttaaagagcttagaagagcaaaaaagggagctttcctctaatttatcaaagattaaagaacaggtttctagatttctacaatatgaacaaggaaccatcattgaaaaagatatagaggatttacaaggaagatacttagctttaacctctgagcttatgaaggaaataaaagtcattgaagaagagttaaaggaagcaagggaaaattttagggaaaaggaaacggagcttaccactactcaagatgaatacggcctatttgaggaggattttaggcaagtattttatgatagaactaaggaaaatgaagctaaaaaacagctaaaggaagctaaaagaacttttgataaacttaaagaggctgaagtagaaagaaagatagagttagcaggtttagaagagcgtaaaagaggtattataagttctcttgaagaaaattatggtagagcctatccgaaagaaagaggagaaataatctttgttaatttcccagagagaatcttagaaaagaatgaagaaattcaaagggcagataccagattaaaagttaacattaaggagcaagagattataggaaagaccttaagttctttagatagttatggagatttttcagttaaccaatttattgaaattaacactccaataaaatccatagaaagatttaagggtgaacttgtaagagattataatcaatgtattgataggaatatgaaagaaagaaataaccttagtgatgaaattaccaaggtatctaaaattcatatttttagtgatgatgatttctttatgagaactttaagcactttagcagaaattgttgatgagccgcaaaacgtaatagaaaccttagatacagctttaaaagcacaagaaatgatattaatgcagctttataaggatttagaattaattaatgaggaaagagcaaacgtagaagacattctatttgattatgtgctagaggtccatgagaatcttgataaaattcatgacaattccacaattaaaataaaagataaatatgttaaaatgctgcaaattaaacttccagactgggaaagcaataaggagctttataggataaggcttagagacttagtaaatggtgttactgaaaagggcttagcactacttactgaaaaccaaaacattgaggaaatgctgtcaaagactatcaccacagtaaatctttataatgaagtagtatccataagtaatgttgacgtaaagctttataaggttgaagaggatagacaaatacctatcagctggaatgaggtatcaaagaattctggtggagaaggcttcttatctgcctttgttatattatcaagcctcttatcttacatgagaaaagatgatagcgaaatattttcaaccagtggagagggaaaggttcttattatggataacccctttgcccaaacaagctctgagcaccttttaaaacctctaatggatattgcaaaaaagagcaatactcagttaatatgctttacaggacttggtggagattccattcttaatcgctttgacaatgtgtatgttttagatttaaaggcttctaaattgagaaatggaactcaaaaatacctagtttctacccatgaaaaaggggaggagttagttcacgatttaatttcttcaagatttaaaataaaagaggaagaagtagagcagatggaactgttttaa

SEQ ID NO: 52182 - DNA, 1005 bp, Clostridium sp. BL8
atgaaagacttaagaaagcttaataaaaaaagaatagatactattgaaatgcaaaagtatctaggaatcgaggattacttagaatttgcctcaatagttaaagaccttgaagtgaaaaaggttatatctcctgttgccagcagtaaaggcaatggaaaaagacctgccctttataacaggtataacattttacaagaagaaatagattattcaaagtacatagaagaactccattatggtttagatattagattaaacaaaacctattatttaaaaaatctagaaaaatacatagaagatagggactatgtgttaagtctcagtaggttcttaaagaaacatcctgaaggaatagaaacagagctagctgtaaatgagcggagttttcaggtttggggaaaagaaaagtttttaaaaaagggtggggaaaggattttaaagaatttaggtttgaccttggactatttaaaagtttatgaaacaacagaaccacttccttattattcttttgacaaaacaacccctcaaaatgtggtgataattgagaataaggataccttttattctcttcgtaaattcttactcagtggaaaaaattctatctttggagttaatatctccactgtaatttatgggggaggaaaaaccatttttaaaagttttaaagactttaaactttgtgttgagccctatcttgctcacaaagacaataaaatactttatcttggggacatagattatgagggaattcttatttatgaaaaccttagtgaggcttttaaagatgaggttaacctagaaccttttgttgaaggctataaagaaatgatagataagtacttaagggaaaacatagacttacctatcaccaaggaagggcaaaacagaggaattaaaactttatttttagattattttcaggatgaatataagaaggaaatattaaaagtactgaaaatggataagtatattcctcaggaaatattaactatagaggatttttaa

SEQ ID NO: 52183 - DNA, 1620 bp, Peptoclostridium difficile DA00145
atggaaatgattaatattttagaaggctacaataagagagtaaactgtataggatcttattatcttattgcaactcttgctaacaatagaaataaatttaaagaatttgacaacattcaattttacaatttattaattcaagttttgtgttatatatttgatagatctcttagaagaaagaactgtttaagagatgatattaaggattttattgaagaaataaatcgtatggattataaaataatgctttcagaggatgacttaaaggatttagcaaactatataattaatggattaaccaatagtggtaaagtatatctatttacctactattctttagaacaagaaaaacatatagatgaaagtattaaaattatagaagataaaaatgtaaaaataaataatcaggaaagactatcctactccttaacaacagagggttatagattgttgttatcaacaaaagaatatgatgaactattccaaattcaaatatcacaaatgattgcaaagttaaggatagaaaagggtgattatcaaggcgcaaaggaagatatttacgatataataaataccttagagattcatcaacagaaaattgataattatataaaaataataaaagtaaatatactatatataaaagaagaaaaatattcaacagtaatagatacaactgtagaaacacttttagaagaaatggacaaatatgaagaattaaaaaaagaagtaaaactattaatcaaagataaagaggactacttggaaaaggatgaggatatagacaaagaaaagataaaaaatataagaactcaactattacaaatgaaagaattaatagatggaatagttttagcaaagtctacagccacaaatttgttatctagagttcaagattttagagaagaatttaaagaaatacttaaaaaactattaacaactccagtacttaaaagattcaatttcaaggaagaaatcttagatagacttgaaaaagacagtgattttttattgataataagagaattatatatatctttatttaaagtagagttgccaaatcgatttaatattggagtggcatatcaagaacagaaactattaaatactagagaaattgaaaatgaaatagttaataaagacgagttagaaattattgaaaataaagagaaggaggaacgtataaattattgtgaaaattactattttgatttttttaaatacttaattaaatatggacttgaaaaaggacaatttacattagaagaatttctaaaaaattatctgaaatatgacaaagttatttacttagaaataactaaagactccaaattgatgagagatataataatttacttcgctaatcaaagggaaagtatcaatatcaaaaagataatcagaatgttagaaaatagtgccttctcaccaaatacagattttcaaattgaaagattaatagaacgtttattagtagaagattttgaactattaaatagcgttagccatattaaaagtaataaaatatttgaagatgaaatgaaaataaatactgaaataaatttagaaactatgactgcagttaagctagaaatagcaaatataaaatttgaaataatctaa

SEQ ID NO: 52184 - DNA, 729 bp, Peptoclostridium difficile DA00145; identical to SEQ ID NO: 51741

SEQ ID NO: 52185 - DNA, 4356 bp, Peptoclostridium difficile DA00145; identical to SEQ ID NO: 51742

SEQ ID NO: 52186 - DNA, 1011 bp, Peptoclostridium difficile DA00145; identical to SEQ ID NO: 51743

SEQ ID NO: 52187 - DNA, 1620 bp, Peptoclostridium difficile F253; identical to SEQ ID NO: 51740

SEQ ID NO: 52188 - DNA, 729 bp, Peptoclostridium difficile F253; identical to SEQ ID NO: 51741

SEQ ID NO: 52189 - DNA, 4356 bp, Peptoclostridium difficile F253
atgccagtaattaataaatacaaaattataaattttaaatttggtatgggacaagaaagaatacttagcaacagaaccatggaactgtatggagaaaacttacaagtagaagcagaaaatacagcaggcaaaactatgagtattcaaactatcatacaaagtatttgtccactatcggatgtagccaaaccgtttactgcaatatataataaaaaagaaccattatactcaatgactgaatggttgctagatgatgggaaaacgttattattaacgggaataggatttgagaaaaaggctggatcatctaaagaagaagggaaagaaaaaaaggacgatttatacaaatactttatgtttattatagaagaatctaaagaaatggaggttgatatagataatatacctttattaaaaaacaatgacaaaggtataaggatagtacaacctttaacggcctcacaagactatataaaaatgctaagagataaatatggaaaaaacaaagtacacttctttaataattacttaagaaaacaacatagagaaaaattagaagaatatggaattaaccaaagtgaatggaaagaaattattataaaacttaatagtaataacaaagaaggtggactatcagactttgttaaagaacataatacttcagaaaaacttataagagataaaatattacctttaatagagacaagcttaacaacagaagaattcgctccaatattgcaaattaaggaacaagtaagaaagtgtataaataatattatagacatgaatgaaaaattatcagattataaaaactatagagatttaaacattagagttgaaagtttacaaaataaaataaataggatcctattcatagaagaagataaaaataatgtattaggagaattagctaatctatatgtacatatagaaaataaacgcaatgaattaaatgaagaaataaaacagtatcaaaaaatgaaagcatcaaaagaagaggaatttaagatagtagaatatgaagaagatagctatgagtattttagaaaagaaaaagagatacaagatactcaggtagaatttgataaagccaaaaatgaattaaatgataaaatagaagaactagaattagatgaacaatatttaaatatatcaaagttcaaaagaaaaaagaaggggctagaagaaggggaaaaagataagatagaaaaagaaagtgaaaaacaaagaaaagaggtaaatcaagaagaaataacggctattataaatcgtctaggtagcagtattcattattgtttaaaggaagaaagtattataaataatgaaaaacttaaagaaaatacaaacaacaatatagctatacaagaaaaaaagaatcaacttaatgatgacaaaagtaagctcacaaaagtattgataagtaaaaattcagaaattaaatatatagaaggcaaagaacgtgattttaataatcaactacatgaatttaaacttaataacactgatattaaaggctttatttctaataattttttaggcgaagtaatagattatactaggtatataaattatttaaatataaaagtaaaatcaatagaagaaaatcttgaatcgaaagtcatgcaaatagaagaatcgaataaacttaaggatgatataaatgaagctataaataatcttaaattagataatcatgaatcttatatgaaactgcaagtattaaaaactagaaagaaagatatagataattttaaagaaaaatataaaatcattaaaacaagatttgaaatagacaatgaattagataactctactaaactatataaagaggtaaaacaagagcttaacaaaatgaaacttcaagtacaggacttagaaaataataaaaagcaattagaaaaagagctagaagatttacaaaattataaagatataattttcgaagaagaaatattaacagatctagaaagaaatggaataaaacctattgaaggcatgaaatatctattaaccttagatggagatttagaatacaaaaataatctcatatctaaaaatccattgctaccatattctataataattacaaataaagagtatcaaaaactgaagcaaataaacttaaaaaataaaactaaaatctcaatgcctatatttgtaagagataacatagaagatacttttataactacatctagtaaccttgtaattagtaatggattaaatatactatcttctttcgataacaaagctttagatcctgaaaaaagagaaaaggatatgaatctaatcaaagaacaaataaatagtattcgagataaagtggagcaatataaagcagaaattgaaatattagaagaatttaaacttctaactaataaaattgattttacagctgaagacttatccatagatgtgaaaattgaaaattataaaaaaattatatttgaaataaacaataaaattaagagtaatgaaaataatgagaagaatttatctaataaaattaaagaactttacgaaaataaagaaaagctattaaataacaagaatatattatttaataaattgaaggacattagaaatatacaagatacatattctataattttagaaaataaaaatgaaataactaagttaaaaacaagtattgaaaaaatcgaagaagaaaaaaaagttattaaaaaatcaatagaagatattgatgttaatatatttaatttaaattcagaaaaagataggataaataggcatatagatgatacagaaagcaagataaataaatttaagatttatgaacctattaaacttgaaaatgctaaactagaagaattagaaataaaatacaagaaatacttagaagaccctacaaaaaaagagattgaaacattaaattatgaaatctcagtttgcttaaaaagaatagagagtattactatagagttagaagaatttagacaacttattagtagtgataattttgaaaatatacctatattattcacaatagaagaacttaataaaagaatagttttaaataaaagtaaggttgatgaactacgaaaacttaaatatagtattaaaagcgacatagataaaaatcaaggttcattaaacactaagagggaggagatacttaaaaaatttaatggaaaagaacctttatctactagcttaatagtgaactttaattttgaagaaagaaaaatagatataaaaaaagatataaaggatattggtgaaattatagaaggtaatagaactacttgtcaaaatctagaacaggaattaagagacttaaagaaatataaagtagaaagaaaagctataacctatcaacctgaagatatttttattgaaagtaaaaaactacaatcaaaactgcaaaatgttgaatataatttaattaaatctataaatagctataaaaatacaatattagaaataaaagaatttaattataagcacatggaaaaatacaaaaactttatagaaactttaaatgtaaataaagataattactctcgacaaaaagaacaagtagaaatagtattactagttataagagaagaaataagcaaattagaaaaacatagcgaacaactaagaaaagaaaagactataatatcaaggcaaataaaagattatgttatggactgtattgatgaatttaaaatcataaataaacttggtaaacataaaggacaagccttattcaacatatcactacctaaatctgataaaatagaaaatagtttgagcttagtagatatgctaatggatgaaattgtagaagaagcaaacctaggtgatgttgaacaaaaaataaataccttttatattttaaataagactcttaatatagggagaattcctgtatcagttataaaatatgaaataaatagaaatgaaactataaagtggaactctattaataacgaaacaacaggaggacagagattttgtatctcatttattgtgacaatattgttgatggaatataaaagatatgatagaaatgcaatagttgatgaaagtaaatataagggtaaggtactacttatggataatccttttggagaaacgtcgcagcaagatttccttaaagaaatatttgaacttgctaaaaaattcaacgttcaaattatatcctatactcatgtaacaaatgcttctataagagcaatgtttaataagatttatttaatgacagttgaaaaaactacttctaataaagaatttgtggatattaatgagattaagcaaaataaaactgatgaattggtgtatatgagtaaattttatataggtaataaagaagaattaattcaagaggatatatttagtttaatataa

SEQ ID NO: 52190 - DNA, 1011 bp, Peptoclostridium difficile F253; identical to SEQ ID NO: 51743

SEQ ID NO: 52191 - DNA, 1620 bp, Peptoclostridium difficile P23; identical to SEQ ID NO: 51740

SEQ ID NO: 52192 - DNA, 729 bp, Peptoclostridium difficile P23; identical to SEQ ID NO: 51741

SEQ ID NO: 52193 - DNA, 4356 bp, Peptoclostridium difficile P23; identical to SEQ ID NO: 51742

SEQ ID NO: 52194 - DNA, 1011 bp, Peptoclostridium difficile P23; identical to SEQ ID NO: 51743

SEQ ID NO: 52195 - DNA, 1620 bp, Peptoclostridium difficile P31; identical to SEQ ID NO: 51740

SEQ ID NO: 52196 - DNA, 729 bp, Peptoclostridium difficile P31; identical to SEQ ID NO: 51741

SEQ ID NO: 52197 - DNA, 4356 bp, Peptoclostridium difficile P31; identical to SEQ ID NO: 51742

SEQ ID NO: 52198 - DNA, 1011 bp, Peptoclostridium difficile P31; identical to SEQ ID NO: 51743

SEQ ID NO: 52199 - DNA, 921 bp, Peptoclostridium difficile P45
atggacaaatatgaagaattaaaaaaagaagtaaaactattaatcaaagataaagaggactacttggaaaaggatgaggatatagacaaagaaaagataaaaaatataagaactcaactattacaaatgaaagaattaatagatggaatagttttagcaaagtctacagccacaaatttgttatctagagttcaagattttagagaagaatttaaagaaatacttaaaaaactattaacaactccagtaattaaaagattcaatttcaaggaagaaatcttagatagacttgaaaaagacagtgattttttattgataataagagaattatatatatctttatttaaagtagagttgccaaatcgatttaatattggagtggcatatcaagaacagaaactattaaatactagagaaattgaaaatgaaatagttaataaagacgagttagaaattattgaaaataaagagaaggaggaacgtataaattattgtgaaaattactattttgatttttttaaatacttaattaaatatggacttgaaaaaggacaatttacattagaagaatttctaaaaaattatctgaaatatgacaaagttatttacttagaaataactaaagactccaaattgatgagagatataataatttacttcgctaatcaaagggaaagtatcaatatcaaaaagataatcagaatgttagaaaatagtgccttctcaccaaatacagattttcaaattgaaagattaatagaacgtttattagtagaagattttgaactattaaatagcgttagccatattaaaagtaataaaatatttgaagatgaaatgaaaataaatactgaaataaatttagaaactatgactgcagttaagctagaaatagcaaatataaaatttgaaataatctaa

SEQ ID NO: 52200 - DNA, 729 bp, Peptoclostridium difficile P45; identical to SEQ ID NO: 51741

SEQ ID NO: 52201 - DNA, 4356 bp, Peptoclostridium difficile P45; identical to SEQ ID NO: 51742

SEQ ID NO: 52202 - DNA, 1467 bp, Escherichia coli HVH 193 (4-3331423)
atgtcgctagggtttttggagcaggctcgtaatgaatcaatggcacgtcgcgagctgtctattcagtctcacgccttgctagtcgtgcgaacgctggattcaatatatagcgcccttcagcgaaatccgttcgatggtgttgagcttgatgcgctggcggcaatcatgtatctctttgacgccatgctttattatgctgaccgcgagcgccagcctggaatgacgcgtaaggaagcggagttatgtctggttgggcacctcaatgaagcctatccgggacaagaagaacccgactacgcacaagtggccagcaagatttttgcggcgatcaaagatcctttccgcctccgttattatgatttctcgcaacgaacgcattccgaagagcagatagtccgtctggtacgctatgaccagctatccggctcagatgatattctctggtcgctgaccgattacggaatgttgttctataccctgcgcttggatgaaacgccgatagaacgcgctgcgattctggcctggcgcacgcttaaaaccatccgtcgtggtgagatcgacaaggcagtacaccagatccaatcaacacagcggcaactggagcaatatctgattgggatgcggatgaaagtgcgatccgcccagtctggtgatttgagtgcatcctatgcacatgatatccgtcctgtactcaatgattcctttgataaaacccgagaggttttggaacatatccagaactcaatgtcggtcattaccgaaatgctagttgaaggacgttcaaaattaaatcccgacaaattaaataagctacgtaaggcacaggagatttttgctgaggtctgcgcttttacgcagtgctatcaagactgcttactggatgtgaataaagattttgagcgagctcgtctgaaactcattattcccagagataatacccttttccgggaaacgctggaaaaaggtgcactcatacccttgctgtctcattcccccgacattgtcgaaaaggaaatcgatggtctcattgcacgcctgttggctccccgaaggcaggatgatgatcggcacattctgtttgaccctgaagcgctgctgaacctctatctcgatagatttgaacaggcgcttccacatgagatacaggaccccaccgatcagcctgtagctattgaaaccaacctacgaaatatccctgaatccgtcattaaaaaatgcagtgattgggttagtgatcgattgaagaattgggggcatgtgagctttacagatgtttttgacgcctatgagtgcgaagaattttccgaacaagaacaacaggtttgtttacttcatattggcagcctggcagctaacagcgatcccgcaatagaagtggagatagacgaagctatcgaaacaactctgtggcgcgctaacaatgtcaaactgttaacggtcgctcccttagacccctttgaggagtag

SEQ ID NO: 52203 - DNA, 4437 bp, Escherichia coli HVH 193 (4-3331423)
atgtggctgattaaacgggtttatatggatggcgcaggtcatgaagaagctttctacaaggacctcacactggactatattggcctgtctcaagcggtcagtagccctgttgttgaaggcctgcgctcgcccgtcaggaatgcgaaggtggtgaccagtacttatcagcagcttgtgaatgggggcggtaagtcaacctacattgcgctgctgttatcgatttttgagccgtccgttagtgactttacccaatatctggcaaatcatcgccagagtgaataccactaccgcaattacttctataaagaactctctgttgttttggttgagatggtcaatgaatcaggacaaacgttattactaggacatgctcatcagcgtaatggagatgatgttgaccgcacactgtttatttgtgatgcgcccgactccctgttgggcgcgccgtttgatgaagtcccttcttattcccgcgcggaacgcaaatttgagctgcgcccctatgccaatagcctgcgcagttttgatagctggcttaatctcaaggtcggtagtgaaggcggtatgcattggcgtaaaaccaccagacagaacgagtggcgcgcatttttactggaacaacaaattaacgttgatcttatcaaaacaatggtgaccttcaactccgaagaaggtggtctgacccgttttatagaatacaaaactgaacatgatttccttggcgcgttcttcgcctgcaccatgtctaaagatgcggctgagcggctgcgggaactggtagcgcatgaagttgaacgtcagggagagttagaggggatccgtcgtaacgagtccttcctgaaggatgtgctggctaactggctggcgtttcttgatccggctaaacagctggaaagcatccaggcacagcagcaactgctggatgatggcttccgagaagcaatgcgcgatctcgcagcctttgtcggggatgctcaggttgaacagacacagcttgaagataacatggatagtttgcaaacgcatattggccaggcgatgtctctgcgtgagcagttaggtaagcgcagagcactgcttgaatatgatctcgtgcagcatcggttcaacaaacaaaaagcgatagtcgatgcgcttcaagacgaggccgataccaatcagcgccagattgagattactcacgctgctatagactacaaagcctatgctaaggccctgaatgagtaccgccaggcagatgaagatctgaaggtattccaaagtgaaacggaaaggccgctacaggtgattttcgagcgtactgctggcgaagccttgggcacattagagtgggcaatcgacagacatcgccagcaggaggctacgcttgaggaagaattagggcagatggacagggaaagccatgtcctcagacagtcatacgataaaatacaaaagacgttgggtggtctggaaacggagcgtgacggatataaaagagacaaatttcagggcgaatcgcaacggaatgaattatgtgaagctgggctgatccagaaggatgaaacaccagtagcagcccaataccgactggaattaaccttacacgatgcaaagcagagtgaagaactggctaatacaattcttcatcagaaagagcaggcgctggaagcgcagctgcatgttgtgcgggaggcatcaattgagaaaagtgaggcccagcaaaaactcattctggctgaacaaaaacaccagtcggctgtggatagtgctttagttttagcaaaaaactaccaaaaactgccaacgtcaacgcgacatgatctggatattgaagacacgagttggcacagcgagctgtgtggattgcagctcgacaaagtattgaatgcgaacgctcaaacgctgaatggaatgaaagagcgtttactgcaagcccggcacgaactggacgagttgagggtgacgggacatgaactggttgctaagcaggtcaatgaggcacttgaagcgttttatgctgcgggcattgcacgggataagctatggacatttccacactatttggcctctgcttacaacgatgatgcacaaaagattgcagcggtgatcgatcagaaccctggccgctacctgagtctggtcgcactcgacaatgtaacgtttgaacaggtccataaaattagtgagatcctaccctggaagaaggcacctattgctatttacttgctggatgaagctcaagatctccgccgagaaacgtctgaattagtacaggttgtcctctcaaaccccgataagcacggatatagccaggccgcttacgaaacccggctgcaagacctggagaatactgtagcgtcgcaggacgtcagtgtgaaggctacggagagcgcccttaaagtactggaatctttcaggaatgactggagtcggcattacgaacagtatggtaagcattgggcgggactgcttgaccaacgggagctggctctattaatactggaaaatgctgatgcagcacttaagcaagctgagcatgatgagcaaacactgcgtgatgagaagagagatgtccaggtgcgtttaaacaacgcccaacagcagaaaattcaggcagaaaaagcacatgataaagtgagtctttttgtagaaaaagaatgggcgaagcgtgaaacggcgataatgaaactggagcagttagctgcacagattcagcgaagcaagaacactctttacacccagagagagaggctggaacggctgagcgagctcgagaagaacaaacgctccgagaaaacccttttaattatccagataggtagttggagtaatctgtgtaacgaaccgttctattcagagattacggcgactgaaggtatggaaggacgaagccctgaatatgcccatgagatggctgctcaggcgcacaaaaaattgctcgaagcagccaacggtgatcaagtgaccgttctcaagcaacaactgaaagatgctgaacaggcacaacgttacgcctctgatcgtttgaccgctcaacccacctacaatacatatccggatgaggtaaaagctgcggccatcaatgagctaacggtaattaataacagcatcgtacgcctcaaagaacagcaaaagcaattcacgcaaaatctaattagctctcaggtaactctgcaaaaattttcccaaagctgtgaggaggctagtaaagcacttgacgaggattttgtctgggaagagaagcccattgagatagaggcaatccaaacgtctctggctgaaatcgtcaataacctttatgcgattgaacaccagatcaagttcctactggaacaaaagacactgctgttgagaaagattgaaaatgtgaaagagcggctacagaacgccaaaacagctcaagcgatgatccagcccattacgccgagctctgccgcgggtctacctggtaggatcctgagcatcaaagaatatgctgacgatctggctgcacaatgccaaatgtatgccggtctaaatgaaacgctaaaacagcaaaatatgcgcgtctctgtggtctggggaaaattccgcaaacggatcgaagaagagttggccaaggttccagacgcccgagccagtcaggaatacttacggcagttggactcaatcgcaacttatcatgaagtgctgggtgatttggagagggtcggtacagggatctcgcaggtattcgaagctgtgcaggacagcctcgagcaattccaacgttcgattgatctgactgtcacccatctgactgctcatctggaaggggcgattaaacttctcaggcgcgcgatgtcggtcaaaattcctgaggattgccccgtactgcctggtcggcccattattaaaatgaccgaccggttgaatgatgttgccgctgatctcaagggttttgccagcagccgcttgcagcagtggatagccaggggacagataccccgagcgcccaatcgggacgccttgacagctgatttggttcagtcggtatttggcgaaggggaactggaggtgcgtttgctgaagacgaatgccagccgtccccaatggactcctgtcacccgacttgaaggttcgggtggacagcgccttacatctgcctttttactgtttgtgacggttggtaaagtacgagagtacgatacgggtatttcaagtgcaggattcttgttagccgataacccgctgggtaaatcgaatgccaatgatctaatgcgcattcaaacccaaatggctaaagcctataaaatccagctcatctacctgacaggtatttcggatgaaaacgcccaatcaatgtttgataaccatctcttcctgaataaagttcaaaaactgaggcggcgcgatttggtaaccgttgataaagaacgccatgccctgtgggctgcttctctggctgctaagccacagttcgatccagtcatttaa

SEQ ID NO: 52204 - DNA, 1044 bp, Escherichia coli HVH 193 (4-3331423)
atgatctggctatcccgactggagtcgacagccaataaacatcgtcttgccgctggtaaggccgcgcgtacagtgaaagctaatgcggtgctggatgaggtattacgcgcacacaaccaggaggccttgagccaggaggtacctgatttgctgagtcaggctgttacgcaactgcttgagagggactggcgggctcagcctaagcacaaagcgagttggcagcgctactggcggggtatgagcctgccaagtacttttgtttacgaaggtgccatcgttcctacgaagacaacatcagaaatagcctggcatccctggttggcccgacgtattacaggacaacttacccagccaatcaaggcacgcttacaacagctgaacacatatctttttcgccaaaccgggggcgacaagtcactattcccgggcttgcttggacatcgtgagcggtctctgcttatatttggtgacgaaaaagctctggactctttgccacctgatggctggaagcatgtcactctgactttggctgatatgggcgcgtttcgacgtgcgccgcctttaccgtatgagtcatcacgttgccatgatcttccggctatcattgttgaaaactccgatgtgtattatcggctatgccaacttaatcgagcacagactcgctggtcactggtcatttatggcgcaggtaacaaagtttccggtcaggcggagtgcgtgtcacaactccttgaggtcgaacaggtagaacaactactttattttggcgatctggatgttgcgggcttaaaaatcgctcatcagttgcgttgtaagttgcttaatgattacggtatcagcttgcatttagatgaatggctttataataaactgatcttaaatggcctgatgacagcggaagggaacgccaacaacgaacggtttgatttcgagttaaagtgtggctggatgccaaagtttgttttacgagaaatgaagactcttctggcgatccaccggcgtctaccccaagaaggtgtggcttctttaggtttatttatatag

SEQ ID NO: 52205 - DNA, 1515 bp, Aneurinibacillus aneurinilyticus ATCC 12856
ttggaaggccttgatatcgatgagttaacaagcggctatagggagaggatgagaaggcttgctctttttgatacattatatgagttagacagaaagcgtgaacaggatttagaaggtacgagtcttgatatgaaagggcttggccttcttactttattgttcttctttgagcaaaagctcatacggcaatccaaaacaggtgtaaagcagttggccgcttttttaaaaaatatttcagagcagcgatatattttaccggaagataaatacgaagatgttgcaagaaccattattcaaacatttcgtcccacagacgggaagaaacgtagttatcactattatgattgggaggagaagactgagcagtctatcgaatattctatcttgaaagcgaatagttttgatgtgaaatcaaatacccaatattatacgttagatgaagatgggcttgagttactgtttgcaacgaaggagttttatagtgagttccagctttccattaatcaactaattctaagaaaacaactggataagggtgagtttaaaggagcccttagacaaattaatgagatgcgaattgatgtggagacgttacaagaacgaatggtaaagctgaagcatgagattcagagaagcattgtgtcagaggaaacctttgagcgatataagcagctccttgaggatatttatggacgactttcacgggaggatgaggagttcacggagttacgccagtttgtaaaagaaacgagagagcgtctctactcccgagatgtgcatcagaaggaaaagaaaacctatggctatgtgctaaaaattaatcgggagcttgaagcggtccattatgatcattcacgtttgttagatcaaacccttacgctgaaaaacacaacgctcattacagcccaagaatccctttattatacaggtattcagtcctttaattttgatcaggatttagtttcgcagatcgtgtcaagtcctcttccattagaggctatgaagggtgtgctgcatccctttttaaaagttgaagagaataaacgatggtcacccttaaccgttttagctgagcaaaatattactgaagaacgggaagaaaaggttgaacaagggtttattgaagtggatcttgatcaggcaggagatccataccgaaaagggcttatacgaaagtataaagaattgatggaacttttcttgagcgcatacgagatggagagaggtggcacgctttctgccttcatagactttcttgaggagactggtcaagcttcagtatatgagcagcgttatttctacgatttttggttgattctccatcagcgctcgcccattattcaaggaagtgtggatgaacaggaaggaaagacacttcttggggatgcactggctctcattggagatcggattttcacgataaaagaaggaaaagggatcattcaaaaagtagggaggtattctattcaagaaatgattgtggaattggagggagaagaggatgaattatcctga

SEQ ID NO: 52206 - DNA, 741 bp, Aneurinibacillus aneurinilyticus ATCC 12856
atgaattatcctgagaaaaaagtgatacaagcctttcagctttatacggaactagcacgagagggggtcgcagacatggaagcggttcagcaatataaaaccgatgatgatattggcgccctacttgacatcttcagtcatgaagtggattgtgtcattatttctacaagtgaacaaatatttatggtgccagaaacgaagctttctacctttcatgtgagtaatgattggattaagcgtaattatttgcgttccagtgcgactaacggagatatttatcttttgtatttttctaccattgttttatttggtcgtttctatgatacgtatcaaagtcaagagcctacaagacaattcattcgtttagatgagtgggtgcattttatccaggagaggattaatcagttgaaatcttatgatgaggatgagctgaaagggtttgaaaaagaattttcttataattggtctttaattattgagaaatgggaggacatggatgatataaaggaaacagcaaagaggcaaagtgggaatacgatcagccgcttaagtttcatacatacagtgaaaagatttctagttgatcaagatctggttcaagagattggaaatgatgaaattaccttgacggaaaaagccaaaacgattattcaacgtttctttatggaagtggagtataacaaggggatttttgagtttatttatggatttgaaagggtggaagagaatgccagccattag

SEQ ID NO: 52207 - DNA, 4440 bp, Aneurinibacillus aneurinilyticus ATCC 12856
atggatttgaaagggtggaagagaatgccagccattagtaaaattcggttaacgaatgttgtctatgaagaaggaaacaagcggtataacgatgagctattcttatttgatgggcataacggcgctattttacttgaaaatggcggcggaaaaactgttctcattcagacagctctacaggcaatcattccccatacggatatagcggagcgaaaaattaaaaacacgcttctccttgaaaatgcgccggctcatattgctattgaatggattactaatgatcaaccgcgacgatatgtggtaacggctgtgaccctctttatcaccaagcaaggcttagactcgttgcgatacgtttatgaatatgaagtaaatgatccgaatggaattgatggaattccttttgtccgggaagggaaagaaggaaagcgaacggctgaacgaggtgaaatgcaggattactatagtcaaatgcgtgatcgttctttcctggctcatacttttcagaccattaaggagtatcgtaccttccttgaagaccagtatcatatcatttcagatgaatgggagagtgtgataaaaataaatagctctgaaggtggagtggaagccttcttcgatgattgtaaaaatacaaatcaattgtttaatcgcctgctaattcccactgtagaaaattcgattgctggccacgatagcaaaatgtttgctgatatgtttgaaaagcagtacacaaattttaagcagtataaaaagctgaaagaaactattgaagaaaacaaacggattcaagcggaattggaaaaattcgttaaaacatttgagcaactccatcaaagcaaactaacctacgagaaaataaagcaacgagccaaaggtctatgggaagaaactcagttgcagaaaagaaaggcgacagatgaacaaatagctattttacagaaaatagaggagtgggagggaagggaacgtaagcatggcgtgaagtctgcttcctacgatattgcttttgagaaatcaatcctacgcacgctaattcatgactataatcaggaatttgctaattattctaaactcgaagaagaacttgaaggctatcaaactgactactactctctcaaactggcggagcttaaggtggagcagaagaactttcaagatcaaatgaagcatattaaagaggaaatgaaaaaactaaatcaaaccgaggagcgccaggagcttgaagatcagttggaagaggccaaacgcacgttgcttgggttcttcatgagaaaaatggaagaagtaaagaaagaaatacaaggggtgtcctttgagctaaatcctataaaagaccagcttcaacaaagtcaagacactttaaagaggttgtgggaacaagaagccaagcagcaaaaggagctttctaggatcgagagtcgtcttgaaacgcgaaaaaaggatttggagaagctagagcaacagctattggcgaatccaaagcaagaacgtgtgcaggaagaaatcaataaatggaacaagcgttatcagtttttggataatgaaattattcaattgaatcaggaggaaagaaaaattcaaatcgagagcaaggaagctcaagggcacaaagaagagcttcaagaagagaaaggcaaacgagctctcaagtatgaaaaagttctttatcagcttgatgagatggaacaagaccagaaagaattgattaggaaacttgcctctgttcgtcctcaatgggcaattcttaagagtctatatgacaatgaaagtactattgcttcaaggcttggagaaactgttgagaggctaacaaataaaaggaatcttttactatatcgtgagcgaattgcgtatcgttttgtagatgatcatggagaacaaaacattttttttgcggatgcatttgtggagtctcagttgaaatcctggaaaaatcagtttgattatttaagcacagggatagagtatttgcagtcccttgaaaagagtgactttgaagagaaaaaaaggtacccgctttggtcattaacacttattacaacaaataaatcgaagcctcttttacgagaaaaattaaagggtgtagcagatcgattacaattccctatccatgtgatcacgacagaagaagcgactattattcataggggtcaaggaaaacatccgtgggtaacaccgctccattggaacaagggaatggaagacgaagctttccgggaatggaaagaagaaattgctcaaagtgcaaaggacacgacccttttaagggagcaaaaagaaaaggaaataaaaacttgggaaaacgtcctccaagcatttaacaagtttatggagcaatattcctttgaaaaaatcatgcagctaaatgaagaacgctcaaatttaatgattcagttagagcaactcgcacttagcattcaaaaagaagacaaacggatggaagaattgcgctccaagcttgcgcttctaaaagatacagttgacaactatcaggacgaaaagcaaggacttgagtggaagattgataaaggaaatagctatcttcagtatagtcatgaagtaggggaagatagacagaaagaacagcagctaaaagaacagcttaaggctctacaaacagaagtacatagtgtgaaacatcgccatgagactcttatagaagataaagaagaaattgaagaacgtattcgttccttaaaaagtaactttaagattctggaagaagatgaaagctttagtgaggtcaaaactttaactcctctgtttacgggtgaaaataaaaagacaattcaagagaaaatcaggacaatagagtttaaaatccgccaaatcaatgtgagttatggagagtggaatgccagacttgaaaacgcaaggcagagcattgagcgcactcagaaggatctggatcaacttcgaatggagcacagccaacttcttgatgaaaatcgcctatttccaggtgacggcaagcaatggctgaaggatttatgggcaaaagtaaggaagttagagcgtcaagttacctctgttaatcaagaggtacagcaaaaattatcagcaaagaaaaagcaagaaggaaagtgtcaaactaagattgagcaattccaaaaagattatcctgatgaaaccatctacgaattcacttctgctttaatagaagtaaaggagcaattaaaagtagaaaaaacagggctcagagaaacaaaaatctacctagagcaagagaagaagagaaatgaacaagaacttacctccattaaagaagcagagcatagtttatatcgttttattgagaaacattacttcaatgcaccagatattatagcaattggactaagctcagaagaaattcttgaattctcttaccaccgtaaacgatttgtcgattctatcattagggacctggagaaaacaagaggattggtaaaagaagagaacgagaaagttgatcgagaaaagcaatcctttaaacagttttgccaaaccatttcagatgtaaagatgagacaaatggcagaaaatggtgtagagcacaaacgaacctatgcagacttagtcgatttcaagaaaaacatgctgataggcgtggagagagccaccagctacgccaatgaacatatccgtcaaaaggatacagagcttcaagcatttatcaatcaggttcatgcacacttgaaaacgttggttgaggaattaaagcaaatccctaaaaaaaccaggataaaagtggaaagtgattggaaacaaatttttaacttttcgattccagagtgggaagaagaagaaggaaaaagtcgaattcgtgattatattgaatggatcctccaacagctagaatccgatcgttttcttactgatctcggcatgcaggacgctcgagaaataaggaaagaaattgaaatgtggcttcaatctaagcaactgctccaaatggtcatgaaaaatgaagtgatgaaagtgaactgccgtaaagtgacgaatgataacaaagtgacgacgagatcgtattcctgggaacagagcaatgtttggtctggaggtgaaaaatggagtaagaacatgactcttttcttggggatcttgaattatgtggccgagaaaaagcaacatattcaaccaaatatgaaacggcacagagccgttatcctagacaatccgttcggaaaagcttcaagtgaccacgtcttaactcctgtgttcttcgtggcagagcagctaggtttccaagtcattgccctaacagctcacgcagaaggaaaattccttcaagactttttcccggttatctatagctgtcgcttacgagaatcagcggaccctactaaaaaagtcatgatcaaagaaaaatggctgcatcatgcctacttccaggatcatgagccaaaatcaatagatagactcggagagatggagcagatggtgttgtttgagtag

SEQ ID NO: 52208 - DNA, 1032 bp, Aneurinibacillus aneurinilyticus ATCC 12856
atggaaacaatcaaaaagctgttatcaatatacccaaaaagaacaattaccttaacccaacttgaagagctaatgaaaccttatatcgatacatacggagagttttcgaatatcattcttaacttagagtcagaagaggtattaggaatggttaagtcgaaagggcgtacaacaagaacgccatcccttgctttgcagtaccgaatcgataagagattattggcaactaaccaccacatggcgctccagcgcttccgaaatgttcttcatccgtctataaatattgatgcctattaccgcaaagatccttccatttggcaaagtgacctaccctatattcagaaagtggatgaatacataaagaaatattcctttccaacggaaaaagttcctgcccctgaacgtagttttgaattagtaggggatgagaagtgggtagttgaaaagaggggcaaggagcttcttgagcaaattggcgtattcgataagcttaatattattccagtttccgaacctctcatgtttgccattaatccaacgaacattcaaaacactactcagcttcaccttatcgtggaaaataagacaacctatcaaggtttactgccggctctggtggaggctgaattttcgacacttatatatggatgtggaaaatcggtgattaagagcattgaacagttttccattcaatacccattaaatgcccaccaccagtttttttattttggtgatattgaccgggaaggtttgttgatttggcactctttaacgaagagacagccaacatatctggctttgcctttctatcgtgcttgtttagaaaaaacagccgtagaagggaaggaatatcagagagagagcgaggaagcgcaaaatttgtttctgagcttctttcttcctgaagagcaggataaaatcagaaaactattggctgaaggtaagtactatccccaggaaacattaaagacggaagaattacagaagatttggagggagtccgattggaaggccttgatatcgatgagttaa

SEQ ID NO: 52209 - DNA, 1626 bp, Clostridium symbiosum ATCC 14940
atgcggtatgattttttaaagcattttcccaaacgaatgaaacatgttggtctttatgcagttcttttacagggcagcctgcagaaaaccacctggcagaaatacgggtttgtacgggcggatgagcagattaacctaatctttgcagtccttctatatatcatggagcagtctttaaaggaagaatattgcacaaaagacgacatcggcgtttttattgatgaactgaatatggagtatttaaaaaaggatatggcctatgaggactgcaagagcctgggcgattttattttaaatgttgttctgtccaatgaagggaaggccatgtactttgatggctataattttgagcagaaggcgtatcagattatgaatatcagctatgtggccaatcggattgtgtatgtggaggatgaggtgaagcgcacctcctattacctgactgatgacggctataacctgcttttgggaacgctggagatggagagcaacatgaagctgaccatccatgagatgatttttaagatgcacctggaaaagcagagctatgataaagcggtggatgagataaagaatgtatttaatctgctgcggattcagctccagaagatccaggaggccatgggcaaggtaaggcggaatgcgctgaattattctgtggcggagtatggagatattttagatgaaaatctcgatacgatcagcgataccaaccagaaattccaggattacagagagcttgtgaaggcgcgggccagagaactggaaaaggagaaaatcaatatcagaaggttgactccggaagaagaggagaagcttaaaaatctaagggaaatcgagagctatctgaccagaaccattgacgagcatcaaagaattttaaatggccattttgatttaaaggcgctgtatacaagggagttggagcagctttcacagatgtctctgattaaacgttttccgctgcgaagcgcattttacgacaaggtgctggagaaaccggagattatggagcggatggatctgtttttgcgtccgctgtttggacaggatccggataaaatttataacctgaataaagcgcttgagatccagaagcccatacgccgccgccgggaagaggaggagacggagcttctggatttggatgaggatgcgtggcaggaggagcaggaaagacggcttcgggaaaagctgaaacggtatgagggcagcttatcttttctgttggagctggcgtcggaaaagggagagataacgctggaggaaatcagcagcaggctgccggaggatgaggaacaatcggcggaccgggagcggctgattcccaatacagaaatttttaaagaaatcatggtggaattaatcaagaaccagcagattgatatacgagcgctgaggaaagagcgaagcgaatatatacgggaaaaggcagacagcttccagttgaatgagatgcttctggatctggcagaccggcagggcgatccgatacagagaattgaggtgtaccgactggaggacgggaaggtgatcgaattcggccgggtaaagagtgaggatggcagaataaagcgggtagcctgctccaatgtgctgctgcgggtgatccgggaggatagataa

SEQ ID NO: 52210 - DNA, 711 bp, Clostridium symbiosum ATCC 14940
atggcatacgaaatagaggatatcaggctcagccaggagattttttattatcttctggagcatcatgagctgcgggaagacaatgaattgagattatacaaagcatacacccaggaagagaccattcagaacctggtcaagtcccagggtgaaatcagcgactgccatatcgaacggtacggcaatgtgatttatctgatacccaaggagaacaacagctttctgggcttttccaaagcccagatgaaggcggcgctgtgccgctccaatgccacggataaggattattatttatcccaatttgtgattctgacgcttttggtggaattcttcgacgggcagggcagcagtgccaagtccagggaatatatgcgggtgggagaactccaaaactgtatttcaaagcgcctgaaagagggggcaaagagccggggagaagaggaggaagagaagcaggggattgcattttcgaatatgctggaggcgtatgaggcgctgcggtcggaggaaaagggctcccgcgccaagacgacgaaagagggatttctgtaccatcttcttacctttttgcagaaacagggcctgattgattacgtggaagaagatgaaatgattaaaacgacaaagaagctggacagctttatggactggaatctgttgaatcaaaatcattttcagagagtgaagaaggtattgggggaggttgaatga

SEQ ID NO: 52211 - DNA, 4452 bp, Clostridium symbiosum ATCC 14940
atgagtaagataaatgcaatccggctgattaatctgaactataataataatgccataaaaatcagtgatgaaacctttcatttgaatggagatagtacgcttttgtccctgagaaacggaggcggtaaatcggtgctggtgcagatgatgacggcgccgttcgtgcataagcgctaccgtgatgccaaggacaggccctttgagagctattttaccggcagcagacccacctttattctggtggaatgggcactggatcagggggccggctatgtcatgaccggaatgatggtgcgcaagcggcaggagatttccggcgaggagacaggttccggagaagaacttgaaattgtgaacctgatcagtgaatacaaagagcggtgcctactggatatcagccacttaccggtggtggaaaagacgaagaaagagattaccctaaagagtttcggcgcctgccgccagttatttgaatcgtggaaacgcgataaaagtgtcaatttctttttctatgatatgaacaatcaggcccaatcgagacagtattttgacaagctgaaggagtaccagatcaattataaagagtgggagacgatcattaagaaggtcaatttaaaggaatccggtctctcggatttatttgccgactgccgtgacgaaaagggactggtggaaaaatggtttctcgacgctgtggagagcaagctgaaccgggacaggaaccggatgaaagaatttcagaatatcgtagaaaaatacgtggagcagtataaaaataaccgttccaaaattgaacggcgcgataccatccgctgcttttgtgaggagggggagaaaatccgggcggaggcccttcaatttgaggagtcgcttaagcgggtggcatttcatgaaaatcagattgccggtctgagagcagagctgggccgtctgagaaatgaggaagaggaggccagagaaaagcttttacaggaaataaaggagattcaggaaaagcgggagtatctgctctacaaaaaattatccggagagtattatgagctggaaaaacaggagcgttttcacagcagcagccgggatatgattgatatggagcgggaggcgctgaaacgggagtgcagcgagactgagaaacgtctgcatttattggaatgtgccaggcagcaggatgaaacggacgaagacggccgggctcttctggaggccgtggaacggtttgagcttgcaaagaaaaagggagaatctctggaaccggaacggcagcgattaggttccctgttgaagcaatactatcaggaggcctgcaaaagctgggaggcgaagcaggaacagaaccggaaagagcaggagacggtaagggagacgctgaaatcaaaagaagagcggctggaggagctgcagaatcaaattatagattacgcctccaggatggcagggcaaaagaccagaatcgcagtatttgaccagagagaaaaccgctttaataaaatgtatggagagagtctcaaacgaaacctgctgggcgagtacgaaccgggagcgctgcagatccttcttcaaatttatgaaaagacactggaggatgtgattaaggagagactcaccctccggcagaagcaggaaacagagacagaagagaaaaagaagctggagcggagactggaggatttaaagcaggagctgggaagaaacggcgaagaacagagagagctttttcgaatcggccgggaatacggggaagaactttccgagcgcaggaaaattttgcgctatctggagcttaaggactccctggtatttgagcaggatgccattcttcaggcttcgggacggaaactgaaagaaatccagattgccaggcgggaactggagcaggaggaggagcggtgccagaaggaatacgaacgcctgacccagggaaaggtgctggagcttcctaaagagtttgaagccatgctgagggagctggaaatcccatgcgtttacggtatggaatggctgcaaaaaaacggcagaagcgcgggcgaaaaccagaagctggtgaaacgccatccatttttgccttactcacttttgatttcaaagagggagcttaaaaccctgctttcctttacagaaaaaggagacggaaaagaggtctatacttcctttccggtgccaatgcttttgcgggaagagctggaaggcagggccggcgaggaggcgggaaccgttctggaatggaacaaaatccatttttacgtatattttaatcaaaatctcttagacgaggcagccctgaaacgtatggtggaggaaaaggcacatcagatggataagctgaaaagtgccatttccagaaaacaagaggaatatcagggttattttgaaaagcaggaaaaagtacggaaccagaaggtgacgaaagagtcctaccaggaaaaccaggaaaaactggaagaaaacggccgccgggagcaggagctgaaaggacagatcgaagctgcggccgcacaagccagaaccctggaagaggagctggagcagttcagaggccggattcagaaactggaaaatgatgacaggtggcagacgcagcgtttatccgagtttaaagaattttcatccgaatatgcagcctatcttgaagagagaaatgagctggaacgctgtgaaaagaaggcggccagcctgtcggagcaaaaggccgtgtgcagagagcagatggagcggcttagacggcagcttcagacacttgagaatgcagccgcagatctgaaagagaaggtccgggataaccgggaaaaatatctggtgtatgagacatttccggaacattttgcagagatagaagcgccttggcagaccggggaaggccgggaagaagcatatgcacagatggaggcgagatatcaggccattacggccggcttttcaatggaacagcaggaactggaaagatgggtgttagagtgcagaaaacgccatggaaaatcgaaggaggaactggcctggctcagggataagtataagctggaggatggagcctggaagacggttctgtacagcagagaggaagagtaccaccagcgatccgtcttggaagagcggagcgaaaagaaaatcctgaaagattccgaatggaataaggaggacagagtgttattgctgctgcgtcagtcgatgaagcagaaaaaagagaaaatggcggagacctgcggcaaagacgagcctcttccccagagtgagattatgtcggaggatatcgatgcacagatgaatgagctttcctggcaggagaaagagaaaaagcagcagcaggagcagcacgaaaaaaggattaacagctatgagcagaatattacctctctgtccgagtataatcatttggagcagcgggaggagataagctgggaaacagatatatccctgcttgataagaaacagcttgatgattttaagggggagacagtcagggagtaccgcttaagcatcagcgcctccggagaatgtaaggctcggatggtacagcagctcaatcgaattctcagaatggatgtattccgggaggaattttaccggaagcccctggaagccatgctggaggtttcaggtattgccgcccaggtattggctcagcttaacataacggtacagtcgtatcagagcctgatggaaaagctggaggtagatatttcgctggtggaaaaggaaaaagccagaattgcagagatattggaggattatctgaaggatgtccatgaaaatttggggaaaatcgatcacaattctaccatcaccgtgagggaacggccgattaagatgctccgccttgagcttccttcctgggaggaaaatttgactgtatatcagcttagaatcaatgactttctgaacgagattacgagacagggaattgaatggtttgagcgcaacgaaaatgcccaggaatattttggcacccagctcacaacgaaacatctctatgatacggttgccggcattggaaatgtacagattcatctcttcaagatcgaggagcagagggagtatcccatcacctgggccgatgtggccagaaactcgggaggggagggctttttgtccgcctttatcatcctttccagcctgctctgctatatgcggcgggatgattcagatttcttcgcagacagaaatgaaggaaaggttctcgtcatggataatccatttgcccagaccaacgcggtccatcttttaaagccgctgatggatatggcaaagaagaccaacacgcagcttatctgcctgtcaggccttggcggagagtccatttataaccggtttgacaatatctacgtcctgaatctggttgccgccggtctcagaaattccgtccagtatgtgcggacggaacatatcaaaggaaccgaggcggagacagtgattgcgtcgcggatacaggtggcggagcagatggagatgatgttttag

SEQ ID NO: 52212 - DNA, 1023 bp, Clostridium symbiosum ATCC 14940
atgaagcgaatcactttagaagaaatagaaaaaaacggaaaatttgaaacatatgaagctctgtaccgccatattctgtctgaaatttcctccgggagactgagtccggtgaaggcatcctgtatcaacggaaagaaaccggcgctttatctgcggtactgggtcacggaggaggaaaaagattacgggtgtttaaaggaagaattaatctacgggctgacgcccctgatttccccggattactacttaaagaacctgtcactctatgaaaaagacagggagtgggtgcggatgctgaatggattcctgacagaacgaagagagctgttaaatcagacagaatcaatcaatgaacggagttttgaaatctggggtcaggaaaaatttttaaaaaggggccagggaatgaggattctgaaaaactgcggaatttcccctgactttttgaattattatgagactacagagccgatgccctgttatacccatacgagagaggtgccgcaaaatctgctactgctggaaaataaggataccttttacagcatgagaaggcatttgctggagggcaaagataccattctgggcatgaaaatcgggacattgatctatggggccggaaagggaatcttaaaatccttccaggacttttcgatttgtgcggagccatatatgcagaacaggcagaatcagatttactattttggcgatttagactatgagggaatcgggatatatgagaaactggagcagctttttggggaccaatattcgattcgtccatttatgccgggctatttaagaatgcttgaaaaagcagaaggcgttttgcttccgattacaaaagagcagcaaaaccggaatctcacaggacagtttttcgcctgtttcccccaaagcgcagtggagcaaatgaagaaaatactggaaagtgagcagtatattccgcaggaaatcttgaatatcagggattttggcggactggagcgtgttaatctcccacaaagtgtgacgcacagctga

SEQ ID NO: 52213 - DNA, 1605 bp, Clostridiales bacterium oral taxon 876 str. F0540
ttgaaagttaatatggataatttaaagatgcttgaaggctacaggagaaggatgaatcttctctccagcacctacttcctgtctgagtttgttgtaaacagaagagacggaaaagagtttgacaatcacgaattttacaatctcataattcagattctctgttttataatggacagatctcttaagggagaaaactgcaccagggaagacatagtaaattttatggacgatataaacagggtctgctataagaagacgctgacaagagaacgaataggagaacttgtctactatatcttaagaaaaggcctgagaaacgaaggttatgcatacagcttcagctattatgactatgataatgaaaaggactcacacataaatgtgcagcttataaacgatgaaatcatagatattgacggcgaaacaaaaacaacctactttcttacagaagatgggtacaagcttttgttctcaacaaaggaatacgacgacatatatgaaattgagataacaaaaatgattgctgaattcaagataaaaaatggagactacaagagtgcaagggaagacatagacaaattggttaaccttcttgagattcaatgccagaacatagacaattatattcaaagaacaaagaggaacatagcctttattcagaacgaaaaatactcggaggttataggaaagaccttcgatgtgctcctgtctcagatgtcaaaatacagtgagcttaaaaccatggttttaggaaagctagatatactatacacagaagacgtcagcagcgagagaatacttgagcagataggcgacataaagatggtcttaagtggccttgacaaggctatttttttcataaggaagcttcatgagagaaaggactccttcagcagtcagtttaaggaacttctaaagagcgctatgttcataaactacaatggaaggtttgactttgaaaaagagataatgcagaaaatagaaaaggatgcctcttttataggaaaccttgacagaatatataaacctttgttcaagcttcagtccccaaatatcttttcgctgcatgttccttatgatgagcagaacctgcaaggggagaaggtctcaaaggaaattgaagttatgagcgaggaagttgagctggaagatgaaaaagaagaaataatgagagcctacaatgctttctatgaggactttctaaggtcgcttttagattatggatttaggtgcgagagcttttatctttcatcatttatagcagatttgaagaaggacaaaaacatctatgttgagaaaacaagatacggcggccttgtgagaaatatgcttctcttttttgcacatgaaggggaggaaataaacttagaggaagtcagaaaggaacttagaaaggttgcggtggttaatccctcagaaagctttgacatattatactctgtaagcacactgagcaaatactacaggaagctgccaacaataaagatttcagttcttgatgaaaccttcacttttttaacgtccataaacctggaggaaaggactgcaacaaaacttaccgtgccagatatggaatttacttttattcagcagggaggcctttaa

SEQ ID NO: 52214 - DNA, 726 bp, Clostridiales bacterium oral taxon 876 str. F0540
atgatggaagaaaagataaaaggagctacaaaaatttactatcagcttttaaaaggcggggaaataaaaaggatacttaataaggagctgtacaacctttatgcaaactacagcgacgttcaggaaactttaaagtttatggcagaagagagcaaatgcgaccttcttcttacaacagatgcgctgtacatgataccaagaccggagaacgacatcatagggttcaactacaaaaatgatgaggattttaagagcgttaaggatgaaacggactactacctgggcctctacataataacagttatcataaatgagttttatagcagtatttcccccatggagtttatatccgtaaacgaacttgtgaaaaaggttgaaagaaggcttgaagctgcagcatcaaaagatgacgcagaggagctagaaaatgaatacaaatataatataagaagccttaaggatgcatggtttgcaaaggagaacatacccggggacaaggaagaaagactcggaaagcagacctggtcttttcagtacaggtacggctgtgtgaggaaaatgataatctttatgacaaatcaggagcttgttttgtattcaaaggaagatgacgagataaggcctacacagaagcttaacgacctcatgaactactattttcttgacaacagacgaaaagctgagattgaaagcatattctttgataccatcagggaggacgcataa

SEQ ID NO: 52215 - DNA, 4302 bp, Clostridiales bacterium oral taxon 876 str. F0540
atgtttataaatagatacaaatatgtaaatttcgtatatggggacagcaaaaaccgcataatgacaagcgagccttttgaagccatgggcaaaaatatgcaggtggaagccaccaatacagcgggtaagtccatatccataataacacttttgcaggcggttgttcctctggttgatacggacaagaattctgttgacgtatttaccagcaaggaaccggtctatatgcttatagaatggatttcggaagacaacacaagagtattaaccggtatcggcatagaacgtaaaatgcagaacttcgcagaagacgataaaagacaggataagtcaaagctattcgacatagtaacctttatagctgaatatgacaggccaaacaaatttgacttagatagcatagagataacctatgaaaaggatgaaaagctctactgcaaaagcatatcagaggtatgcgccatgtttgaaaagaacatggaaaagccagcaggggtaaagtttattaagcactacaagaaatcctatcttaaggagtataaggagaagcttgaggaatacggaatattccccgatgaatgggctacggtcatagcaagacttaacaagggtgaatctgtactttccaaatattacgaggataacaatacaacggaaaagctaatgaagaacctgattgtacccacaatcgaggaaaatatagaaaattcaaaaggcaactcctttattaaagacatccaggattcacttaaaaaatacagggaattctcaaaggaacacagaaatgagctcatagaatacgacagcttatgcataacaaaggaaaaacttcaggtgctgatgaatgcgtctaatgccaggatagagcttgaagaatcagaagaggaaataaggctaaaattcggtgagctttataattccgtagaagatgctcatagatccataggctttaggatggaagataaacatagggaaaatgaagagcttaataccaaggcattgtccataaaactaaacagggattccagggaatatttcaatcttgaaactgaagtaaagaagctgaagtcagagattgatactctaagggatgaactggaaatcacggaagaccttattgaggataacacgagaatggcagcactgtgcaacctaaaagagtggacagacagaagaaaccgaatagtaagcgatatttcaaagcttgtggctgagaaggacaagaaggaaaaaacacagaatgaaataatgaaaaagcttaacaatttgggattttcaataagagagtattatgaaaaggaaataaaggaagtacagagaaagcaggaagaaaacaagcaggaagaatcaaagcttctatatgaagaaaatgctttaaaggaagaaaatataaaacttatagaagaagcaacgcatacagcaatacagcagggcgagcttaaggaattttttagaggttatgaagcaagggaagctgaaataataaaaaggtacagtgatgcttcagagtatataactaatactcttgaaggcaaaatgttcagcatagacaagcttgtaaagatctcggaggcttcaataggaaatcttaaggaagatacactgaagcttaagagtgaaataaccggtcttgaaaaggaattgaaagactccgacctaaaaatgtctgaactaggagctataataaaagagaagggcgaaacagcagcaaaacaggaggaggaacttctaaaattcattgaagcaaaggaataccttacagagacagcttcaaagttccttttagatgcttcaaatatctttgaaagagagctatttaaaagagagatatccgatgtaatattaaagaaaaaagaaaaagcagagggcctaagcgaaaataggaaaaagcttgttaaagaattggagttccttaaaggggacagcaaactgcatcttccagacgctttgaaagaggagatggacaatcttggcattaaagtaatcagcgggcttgattaccttaacaaacagggactttcagctgaggaaaaaacaaaaatatataaagagaacccacttattgtaagttctttaatggtcacaagaaaagagatagaacttataaaagggatttcatttaaaataaacagcagcacaccggtacctttaatgctgagggaggacttaagtaaagaaggactttgggagcttacaaataatgttgctgaaagtaccagcggaagattcataatgttctacgatagcagcatgcttgatgaaaaagcactggttgagaaggttaatagcctcaatgagcagcagtctaagctgagtatttccatatcaaagctcaatgaggacattgaagcattatacagcctgaaaaacaaggcagagagctttaactatgatatgcagtatgaacagagaaccagggcttcaataagccttctatacaaaaatatagaggatatggtagccagcgcaaatgagatcgaaagaaaaataccggagataaaagctggtcttagagagaaagagaacagtctggtggacatcgaagaccagatatcaaaacagaaggacaaaatagacaagcttactgaattcaatgatagctattgcggaatatataataaaaactatgttaataaggaagttctctcaagaaaagcaaaagagatagatagagctcaaaaaacaaaccgggagaatcaagattccataggaaagcgcagggaaggaattattgaatacagggcaaaacttaatgagagacttgaaagcttaaaggataaaagctctgagtacagcatatataaagaaggcgtactgcttacggaagagccaacagtgcttataggcatgtttaaagaatacggttcaaactcggaagcaaacaacctaagcagaataaacgaaaacttgagccgcagggaagaagaaaaaacagaagctgaaaacaagatgaaaatttatgagagaactgccaagacaagcaattttgatcttttaataaaaagccttgaagaatacgagagaactttaaatgaattaaaagatgaaaaaatgaaaatttacgggcagaaggagcaaaagacaggggcactaaaggaaaaggaaaataaactgtctgctgattacaataaaatagtaaattcctatggagttccaccgctgccgccggtagagataatagaaatgaattacagcgaagagatgctcagtatagacagggcaaaacaaaaaaatgaaagtgcgcttaaggacttggctgaaacttcaaaaaacttagaagtatattcaggatatcttaaagactataaaggcatcacaaacaattttgaagcaatgagtatggaaaaaataaaagctgactacggcagcatccaggaaagaaaatcctccttggatgaaaagattaaagaatgcaatgacaatctcatgaaagcgcaaagcgaattggcacctcatttaagcggagaaagaatagaggtctataatacaatagcaggaatgactgacataaacatgaaggcagacttccttcaaaacgtgattatagcaacagatggagagttagacaggcttcttgcaagaaagcttgaaatagagggagagaaggaatacatctacaacataataaaagactatgttgatgagatattaaagggccttaaaaggcttaatgacatagcaaggataaacagggaaaggcttatgaagataacacttaaggaggagaatattgactataacgagataaaaaatataatagattctgtagcctctaatgacaatctaaatataagcagccttgtgacaacctattatctccttgatgttgtagcaaagataaggagaatacaggtggacataatgaaatatgagctgtttaacagcaccatgaagaattgggacagcttaaagaccagttccaccggagcacagaaattctgcatttccttcatactccttgcagtgcttcttgaatacaagaggtttgacgaaagatacccggaaagaagctctcttggaaaggtactggttatggacaatccgtttggagagatttcagaaaacaccttgcttaaaccggtatttgaactggctgaaaagcttaaaattcagataatatcttatacacatatacagaatcaggctataagggacaggtttgacaagatatatcttcttaaagtaaataaaacagcttcgggaagggaaatagtaaaacttgaaacctataaagacaagattactgaaagagcttccgtaagtcccttctttttagagcaagttgcctttgattccatataa

SEQ ID NO: 52216 - DNA, 723 bp, Clostridiales bacterium oral taxon 876 str. F0540
ttgagcacaggggggataaacatagataccatcaagataaaagaaaaattacttatacatagaaaaaaagaaaacagagctaaaatagaacttgaagagcttaaagatattattgatgatgaatataaaaatgtagttaagactgtacaggagcttgtagatgaaaagtttcttgaaccagtaaaacgctacggactaaacagcatggcagacgctctttataaaaggtatagaatagtatacgatgaaagcaacggcgctctagaggaagaaaatgaagagcttatggaagagctgaacggccatctgtattttaaaataaacatagatgtctacaaacagaacttgaagctttacaagaagcacaggagttatgtgaggcttttcagtgacttcatgaagaagaactcaaatcttttaaaaatccagtgttccataaatgaaagatcctttgaggtctttggggacgagaaattcctcaaggaagattcccttgcaaaagagatgttcaaggctatggatttggatatgaatatactgaatttttatatggctccggagcctttctttttttataagtccgatgccaaaacaccacagaacatacttatagtggagaataaagacactttttatacagtaagaaaacttatgcttgaaggaaagcagatttttgacatggagtttcaacggttatatacggtgaaggtaaaaagatactaa

SEQ ID NO: 52217 - DNA, 1467 bp, Salmonella enterica
  subsp. enterica serovar Indiana str. ATCC 51959
atgtcactagggtttttggagcaggctcgtaatgaatctatggcacgccgcgagctgacgattcaatctcacgcgttgctggtagttcggacgctggattcaatatacagcgccctacagcgcaatccgtttgatggcttcgagcttgatgcactggcggcaattatgtatctctttgacgccatgctttattatgctgaccgcgagcgccagccaggtatgacgcgtaaagaagcggaactatgtctggttgggcacctcaatgaagcctatccgggacaagaagcgtccgactacgcgcaagttgccagcaagatttttgcggcgatcaaagaccctttccgtctcagttattacgacttctcgcaacgaacgcattccgaagagcagatagtccgtctggtacgctatgaccagctatccggctcagatgatattctctggtcgctgaccgatgaaggaatgctgttctataccctccgtttggatgaaacaccgatagaacgcgctgcgattctggcctggcgcacgcttaaaaccatccgtcgcggtgagatcgacaaggcagtacaccagatccaatcaacgcagcggcaactggagcaatatctgattgggatgcggatgaaagtgcgtgctgcccagtctggtgatttgagtgcatcttatgcacacgatatccgtcccgtactcaatgattcctttgataaaacccgagaggttttggaacatatccagaactcaatgtcggccattaccgaaatgttggttgaaggaagttcgaaattaaatcccgacaaattaaataagctacgtagggcacaggagatttttgctgaggtctgcgcttttacgcagcgctatcaagactgcttacttgatgttaacaaagattttgagcgagctcgtctgaaactcattattcccagagataataccctcttccgggaaacactggaaaaaggtgcactcaagcccttgctgtctcattcccccgacactgtcgaaaaggaaatcgatggtctcaccgcacgcctgttggctccccgaagacaggatgatgatcggcacattctgtttgaccttgaggcgctgctgaacctttatctcgatagatttgaacaggcgcttccacatgagatacaggaccccactgatcagcctgtagctattgaaaccaacctgcgaggtattcctgaatctgtcattaaaaaatgcagcgattgggttagtgaccgattgaagaattgggggcatgtgagctttagagatgtttttgacgcctatgagtgcgaagaattatccgaacaagaacaacagatttgtttacttcatattggcagcctggcagctaacagcgatcccgcaatagaagtggagatagacgacgctatcgaaacaacgctctggcgggctaacaatgtcaaactgttaacggtcgctcccttatacccctttgaggagtag

SEQ ID NO: 52218 - DNA, 4437 bp, Salmonella enterica
  subsp. enterica serovar Indiana str. ATCC 51959
atgtggctgattaaacgggtttatatggatggcgcaggccatgaagaagctttctacaaggacctcacactggactatattggcctgtctcaagcggtcggtagccctgttgttgaaggcctgcgctcgcccgtcagaaatgcgaaggtggtgaccagtacttatcagcagcttgtaaatgggggcggtaagtcaacctacatcgcgctgctgttatcgatttttgagccgtccgttagtgacttcacccaatatctggcaaatcatcgccagagtgaataccactaccgcaattacttctataaagaactctctgttgttttggttgagatggtcaatgaatcaggacaaacgttattactgggacatgctcatcagcgtaatggagatgatgttgaccgcacactgtttatttgtgatgcgcccgactccctgatgggcgcgccgtttgatgaagtcccttcttattcccgcgcggaacgcaattctgagctgcgcccctatgccaatagcctgcgcagttttgatagctggcttaatctcaaggccggtagtgaaggcggtatgcattggcgtaaaaccaccagacagaacgagtggcgcgcatttttactggaacaacaaattaacgttgatcttatcaaaacaatggtgaccttcaactccgaagaaggtggcctgacccgttttattgaatacaaaactgaacatgatttccttggcgcgttcttcgcctgcaccatgtctaaagatgcggctgagcggctgcgggaactggtagcgcatgaagttgaacgtcagggagagttagaggggatccgtcgtaacgagtccttcctgaaggatgtgctggctaactggctggcatttcttgatccggctaaacagctggaaagcatccaggcgcagcagcaactgctggatgatggcttccgagaagcaatgcgcgatctcgcagcctttgtcggggatgctcaggttgaacagacgcagcttgaagataacatggatagtttgcaaacgcatattggccaggcgatgtctctgcgtgagcagttaggtaagcgcagagcactgcttgaatatgatctcgtgcagcatcagttcgacaaacaaaaagcgatagtcgatgcgcttcaagacgaagccgataccaatcagcgccagattgagattactcacgctgctatagactacaaagcctatgctaaggccctgaatgagtaccgccaggcagatgaagatctgaaggtattccaaagtgaaacggaaaggccgctacaggtgattttcgagcgtactgctggcgaagccttgggcacattagagtgggcaatcgacagacatcgacagcaggaggctacgcttgagaaagaattagggcagatggatagggaaagcaatacccttaaacaatcatacgacgatctacaaaagatgttggatggcctggaggcggatcgtgagaggtataaaagagacaaacggcagggtgaatcgcaacggaatgaattatgtgaagcagggttgatccaaaagggtgaaacaccggtagcagcccaataccgactggaattaaccttacgcgatgcacagcagagtgaagaattggctaatacaattcttcatcagaaagagcaggcgctggaagcacagctgaatgttgtgcgggaggcatcaattgagaaaagtgaggcccagcaaaaactcattctggctgaacaaaaacaccagtcagctgtggatagtgccttacttttagcaaaaacctatcaaaaactgccaacgtcaacgcaacatgatctagatattgaagacacgagttggcacagcgagctgtgtggattgcagctcgacaaagtattgaatgcgaacgctcaaacgctgaatggaatgaaagagcgtttactgcaagcccggcacgaactggacgagttaaggatgacgggacatgaactggtcgctaagctggtcaatcaggcacttgaagcgttttatgcggcgggcattgcacgggataagctctggatatttccacattatttggcctctgtttacaacgatgatgcacaaaagattgcagcggtgatcgatcaaaaccctggccgctacctgagcctagtcgcactcgacaatgtaacgtttgaacaggtccataaaattagtgagatcctgccctggaagaaggcacctattgctatttacttgctggatgaagcacaagatctccgccgagaaacgtctgaattagtacaggtcgtcctctcaaaccccgataagcacggatatagtcaggccgcttacgaagcccggctgcaagacctggagaatatcgtagcgttgcaggaagtcagtgtgaaggctgcggagagcgcccttaatgtactgaaatctttcaggaatgactggcgtctgcattacgaacagtatggtaagcattgggcgggactgcttgaccaacgggagctggctctcttaatactggaaaatgctgatgcagcacttaagcaagctgagcatgatgagcaaacactgcgtgacgagaagagagatgtccaggtgcggttaaacaacgcccgacagcagaaaattcaggcagaaaaagcgcatgataaactgagtctttttgtagaaacagaatgggcgaagcgtgaaacggcgataatgaaactggagcagttagctgcacagattcaacgaagcaagggcactctttgcacccagagagagaaactggaacgactgagcgagatcgagaagaacaagctctccgagaaaacccttttaaatatccagatgggcaactggagtaatctgtgtaacgagccgttctattcagagattatggcgactgaaggtatggaaggacgaagccccgaagatgcccatgagatggcagctcaggcgcacaaaaaattgctcgaagcagccaacggtgatcaagtgaccgctctcaagcaacaactgaaagatgctaaacaggcacaacgttacgcctctgagcgtttgaccgctcaacccacctacaatacatatccggacgaggtaaaagcggcggccatcaatgaactaacggtaattaataatcgcatcgtacgcctcaacaaacagcagaagcaattcacgcaaaatctaattaattctcaggtaactctgcaaaatttttcccaaagctgtgaggaggctagtaaagcaattgacgaggattttgtctgggaagagaagcccattgagatagagacaatccaaacgtctctggctgaaatcgtcaacagcctccatgaaattgaataccagctaaaacttcaactggagcaaaagaagctgcagttgcaaaagatggaaaatgtgaaagagcggctgcagaacgccaaaacagctcaagcgatgattcagcccattacgccgacctctgcggcgggtctacctggcaggatccagagcatcactgaatatactgacgatctggttacacaatgccaaaagtatgccggtctaaatgaaacgctaaaacagcaaaatatacgcgtctctacggtctggggaaaattccgcaaacggatcgaagaagagttggccaaggatccagatgcccgagccagtcaggaatacttacggcagttggactcaatcgcaacttatcatgaagtgctgggcgatttggacagggtcggtacagggatcacgcaggtattcgaagctgtgcaggacagcctggaacaattccagcgttcgattgatctgactgtcacccatctgactgctcatctggagggggcgattaaacttctcaagcgcgcgatgtcggtcaaaattcctgaggattgccccgtactgcctggtcggcccattatcaaaatgaccgatcggctgaatgatgttgccgctgatctcaggggttttgccagcagccgcctgcagcagtggatagccaagggacagataccccgagcgcccaatcgggacgccttgacagctgatttggttcagtcggtatttggcgaaggggagctggaggtgcgtttgctgaagacgaatgccagccgtccacaatggactcctgtcacccgacttgaaggttcgggtggacagcgccttacatctgcctttttactgtttgtgacggttggtaaagtacgagagtacgatacgggtatttcaagtgcaggattcttgttagccgataacccgctgggtaaatcgaatgccgatgatctaatgcgaattcaaacccaaatggccaaagcctataaaatccagctcatctacctgactggtatttcggatgaaaacgcccaatcaatgtttgataaccatctcttcctgaataaatttcaaaaactgaggcggcgcgatttggtaaccgttgataaagaacgccatgccctgtgggcggcttctctggctgctaagccacagttcgctcccgtcatttaa

SEQ ID NO: 52219 - DNA, 1044 bp, Salmonella enterica
  subsp. enterica serovar Indiana str. ATCC 51959
atgatctggctatcccgactggagtcgacagccaataaacatcgtcttgccgctggtaaggccgcccgtacagtgaaagctaatgtggtgctggatgaggtgatacgcgtccacaaccaggaggccttggctcaggatgcacctgatttgctcagtcaggctgttacgcaactgcttctgaaggactggcgggctcagcctaagcgcaaagtgagttggcagcgctattggcggggtatgagcctgccaagtacttttgtttacgaaggtgccatcgttcctacgaagacaatatcagaagtagcctggcatccctggttagcgcaacgtattacaggacaactgacccagccaatcaaggcacgcttacaacagctgaatacatatctttttcgccaaaccgagggcgacaagtcactattcccaggcttgcttgggcatcgtgagcggtctctgcttatatttggtgacgaaaaagcgctggactccttgccgcctgatggctggaagcatgtcattctgactttggctgatatgggcgcgtttcgacgtgcaccgcctttaccgtatgagtcatcatattgccatgatcttccggctatcattgttgaaaactccgatgtgtattatcgactatgccaacttaatcgagttcagactcgctggtcactggtcatttacggcgcaggtaacaaagtatccggccaggcggagtgcgtgtcacaacttcttgaggtcgaaaaggtagaacagctactttattttggcgatctggatgttgcgggcttaaaaatcgcccatcagttgcattgtaagttgcttaacgattacggtatcagcttgcatttagatgaatggctttataatgaactgatatcaaatagtctgatgacagcagaagggaacgccaacaacgaacggtttgatttcgaattacagtgtggctggatgccacagtttgttttacgagaaatgaagactcttctggcgatccatcagcgtctacctcaagaaggcgtggcttctttaggtttagtcatatag

SEQ ID NO: 52220 - DNA, 1467 bp, Escherichia coli 907672; identical to SEQ ID NO: 51723

SEQ ID NO: 52221 - DNA, 4437 bp, Escherichia coli 907672; identical to SEQ ID NO: 51724

SEQ ID NO: 52222 - DNA, 1056 bp, Escherichia coli 907672; identical to SEQ ID NO: 51725

SEQ ID NO: 52223 - DNA, 1034 bp, Escherichia coli 908525
atgtcgctagggtttttggagcaggctcgtaatgaatcaatggcacgtcgtgagctgtctattcagtctcacgccttactggtcgtgcggacgctggattcaatatatagcgcccttcagcgaaatccgttcgatggtgttgagcttgatgcgctggcggcaatcatgtatctctttgacgccatgctttattatgctgaccgcgagcgccagcctggaatgacgcgtaaggaagcggagttatgtctggttgggcacctcaatgaagcctatccgggacaagaagaacccgactacgcacaagtggccagcaagatttttgcggcgatcaaagatcctttccgcctccgttattatgatttctcgcaacgaacgcattccgaagagcagatagtccgtctggtacgctatgaccagctatccggctcagatgatattctctggtcgctgactgatgaaggaatgttgttctataccctgcgcttggatgaaacgccgatagaacgcgctgcgattctggcctggcgcacgcttaaaaccatccgtcgcggagagatcgacaaggcagtacaccagatccaatcaacacagcggcaactggagcaatatctgattggaatgcggatgaaagtgcgtgccgcccagtctggtgatttgagtgcatcttatgcacacgatatccgtcccgtactcaatgattcctttgataaaacccgagaggttttggaacatatccagaactcaatgtcggccattaccgaaatgctggttgaaggaagttcgaaaataaatcccgacaaattaaataagctacgtagggcacaggagatttttgctgaggtctgcgcttttacgcagcgctatcaagactgcttacttgatgttaacaaagattttgagcgagctcgtctgaaactcattattcccagagataataccctctttcgggaaacactggaaaaaggtgcactcaagcccttgctgtctcattcccccgacactgtcgaaaaggaaatcgatgatctcaccgcacg

SEQ ID NO: 52224 - DNA, 4437 bp, Escherichia coli 908525; identical to SEQ ID NO: 51724

SEQ ID NO: 52225 - DNA, 1056 bp, Escherichia coli 908525; identical to SEQ ID NO: 51725

SEQ ID NO: 52226 - DNA, 1467 bp, Escherichia coli BWH 32
atgtcgctagggtttttggagcaggctcgtaatgaatcaatggcacgtcgcgagctgtctattcagtctcacgccttgctggtcgtgcgaacgctggattcaatatatagcgcccttcagcgaaatccgttcgatggtgttgagcttgatgcgctggcggcaatcatgtatctctttgacgccatgctttattatgctgaccgcgagcgccagcctggaatgacgcgtaaggaagcggagttatgtctggttgggcacctcaatgaagcctatccgggacaagaagaacccgactatgcacaagtggccagcaagatttttgcggcgatcaaagatcctttccgcctccgttattatgatttctcgcaacgaacgcattccgaagagcagatagtccgtctggtacgctatgaccagctatccggctcagatgatattctctggtcgctgaccgatgacggaatgttgttctataccctgcgcttggatgaaacgccgatagaacgcgcagctattctggcctggcgcacgcttaaaaccatccgtcgcggtgagatcgacaaggcagtacaccagatccaatcaacacagcggcaactggagcaatatctgattggaatgcggatgaaagtgcgagccgcccagtctggtgatttgagtgcatcctatgcacatgatattcgtcccgtactcaatgattcctttgataaaacccgagaggttttggaacatatccagaactcaatgtcggccattaccgaaatgctggttgaaggaagttcaaaattaaaacccgacaaattaaataagctacgtaaggcacaggagatttttgctgaggtctgcgcttttacgcagcgctatcaagactgcttactggatgtgaataaagattttgagcgagctcgtctgaaactcattattcccagagataatacccttttccgggaaacgctggaaaaaggtgcactcatacccttgctgtcccattcccccgacattgtcgaaaaggaaatcgatggtctcattgcacgcctgttggctccccgaagacaggatgatgatcggcacattctgtttgaccctgaagcgctgctgaacctctatctcgatagatttgaacaggcgcttccatatgagatacaggaccttaccgatcagcctgtagctattgaaaccaacctgcgaaatatccctgaatccgtcattaaaaaatgcagtgattgggttagttaccgattgaagaattgggggcatgtgagctttagagatgtttttgacgcctatgagtgcgaagaattatccgaacaagaacaacaggtttgtttacttcatattggtagcctggcagctaacagcgatcccgcaatagaagtggagatagacgaagctatcgaaacaacgctctggcgggctaacaatgtcaaactgttaacggtcgctcccttagacccctttgaggagtag

SEQ ID NO: 52227 - DNA, 4437 bp, Escherichia coli BWH 32
atgtggctgattaaacgggtttatatggatggcgcaggccatgaagaagctttctacaaggacctcacactggactatattggcctgtctcaagcggtcagtagccctgttgttgaaggcctgcgctcgcccgtcaggaatgcgacggtggtgaccagtacttatcagcagcttgtgaatgggggcggtaagtcgacctacatcgcgctgctgttatcgatttttgagccgtccgttagtgacttcacccaatatctggcaaatcatcgccagagtgaataccactaccgcaattacttctataaagaactctctgttgttttggttgagatggtcaatgaatcaggacaaacattattactggggcatgctcatcagcgtaatggagatgatgttgaccgcacactgtttatttgtgatgcgcccgactccctgatgggcgcgccgtttgatgaagtcccttcttattcccgcgcggaacgcaattctgagttgcgcccctatgccaatagcctgcgcagttttgatagctggcttaatctcaaggctggtagtgaaggcggtatgcattggcgtaaaaccaccagacagaacgagtggcgcgcatttttactggaacaacaaattaacgttgatcttatcaaaacaatggtgaccttcaactccgaagaaggtggtctgacccgttttatcgaatacaaaactgaacatgatttccttggcgcgttcttcgcctgcaccatgtctaaagatgcggctgagcggctgcgggaactggtagcgcatgaagttgtacgtcagggagagttagaggggatccgtcgtaacgagtctttcctgaaggatgtgttggccaactggctggcgtttcttgatccggctaaacagctggaaagcatccaggcgcagcagcaactgctggaggacggcttccgagaagcaatgcgcgatctcgcagcctttgtcggggatgctcaggttgaacagacgcagcttgaagatgacatggatagtttgcaaacgcatattggccaggcgatgtctctgcgtgagcagttaggtaagcgcagagcactgcttgaatatgatctcgtgcagcatcagttcaacaaacaaaaagcgatagtcgatgtacttcaagacgaagccgataccaatcggcaccagattgagattactcacgctgctatagactacaaagcctatgctaaggccctgaatgaatactgccaggcagatgaagatctgaaggtattccaaagtgaaacggaaaggccgctacaggtgattttcgagcgtactgctagtgaagccttgggcacattagagtgggcaatcggcagacatcgccagcaggaggctacgcttgaggaagaattagggcagatgggcagggaaagccatgtcctcagacagtcatacgataaactacaaaagacgttgggtggtctggaaacggagcgtgacggatataaaagagacaaatttcagggtgaattgcaacggaatgaattatgtgaagcagggttgatccagaaggatgaaacaccagtagcagcccaataccgactggaattaaccttacgcgatgcgaagcagagtgaagaactggctaatacaattcttcatcagaaagagcaggcgctggaagcgcagctgcatgttgtgcgggaggcatcaattgataaaagtgaggcccggcaaaaactcattctggctgaacaaaaacaccagtcagctgtggatagtgctttagttttagcaaaaacctatcaaaaactgccaacgtcaatgcaacatgatctagatattgaagacacgagttggcacagcgagttgtgtggattgcagttcgacaaggtattgaatgcgaactctcaaacgctgaatggaatgaaagagcgtttactgcaagcccggaacgaactggacgagttgaggatgacgggacatgaactggtcgctaagcaggtcaatgaggcacttgaagcattttatgcggcgggcattgcacgagataagctatggacatttccacactatttggcctctgcttacaacgatgatgcacaaaagattgcagcggtgatcgatcaaaaccctggccgctacctgagcctggtcgcactcgacaatgtaacgtttgaacaggtccataaaattagtgagatcctaccctggaagaaggcacctattgctatttacttgctggatgaagcacaagatctccgccgagaaacgtctgaattagtacaggttgtcctctcaaaccccgataagcacggatatagccaggccgcttacgaaacccggctgcaagacctggagaataccgtagcgtcgcaggaagtcagtgtgaatgctgcggagagcgcccttaaagtactggaatctttcaggaatgactggagtcggcattacgaacagtatggtaagcattgggcgggactgcttgaccaacgggagctggctatattaatgctggaaaatgctgatgcagcacttaagcaagctgagcatgatgagcaaacactgcgtgacgagaagagagatgtccaggtgcgtttaaacaacgcccaacagcagaaaattcaggcagaaaaagcatatgataaagtgagtctttttgtagaaaaagaatgggcgaagcgtgaaacggcgataatgaaactggagcagttagctgcacagattcagcgaagcaagaatacactttgcacccagagagagagactggaacggctgagcgagctcgagaagaacaaacgctccgagaaaacccttttaaatatccagataggtagctggagtaatctgtgtaacgaaccgttctattcagagattacggcgactgaaggtatggaaggacgaagccctgaatatgcccatgagatggctgctcaggcgcacaaaaaattgctcgaagcagccaacggtgatcaagtgaccgttctcaagcaacaactgaaagatgctgaacaggcacaacgttacgcctctgagcgtttgaccgctcaacccacctacaatacatatccggatgaggtaaaagctgcggccatcaatgagctaacggtaattaataaccgcatcgtacgcctcaaagaacagcaaaagcaattcacgcaaaatctaattagctctcaggtaactctgcaaaaattttcccaaagctgtgaggaggctggtaaagcacttgacgaggattttgtctgggaagagaagcccattgagatagaggcaatccaaacgtctctggctgaaatcgtcaataacctttatgcgattgaacaccagatcaaggcccaactggaacaaaagacactgctgttgagaaagattgaaaatgtgaaagagcggctacagaacgccaaaacagctcaagcgatgatccagcccattacgccgagctctgccgcgggtctacctggtaggatcctgagcatcacagaatatgctgacgatctggctgcacaatgccaaatgtatgcaggtttaaatgaaacgctaaaacaacaaaatatacgcgtctctacggtttggggatacttccgcaaacggatcgaagaagagttggccaaggatccagatgcccgagccagtcaggaatacttacggcagttggactcaatcgcaacttatcatgaagtgctgggcgatttggagagggtcggtacagggatcacgcaggtattcgaagctgtgcaggacagcctcgagcaattccaacgttcgattgatttgactgtcactcatctgactgctcatctggaaggggcgattaaacttctcaggcgcgcgatgtctgtcaaaattcctgaggattgccccgtactgcctggtcggcccattattaaaatgaccgaccggttgaatgatgttgccgctgatctcaggggttttgccagcagccgcttgcagcagtggatagccaggggacagataccccgagcgcccaatcgggacgccttgacagctgatttggttcagtcggtatttggcgaaggggaactggaggtgcgtttgctgaagacgaatgccagccgtccacaatggactcctgtcacccgacttgaaggatcgggtggacagcgccttacatctgcctttttactgtttgtgacggttggtaaagtacgagagtacgatacgggtatttcaagtgcaggattcttgttagccgataacccgctggggaaatcgaatgccaatgatctaatgcgcattcaaacccaaatggccaaagcctataaaatccagctcatctacctgactggtatttcggatgaaaacgcccaatcaatgtttgataaccatctcttcctgaataaagttcaaaaactgaggcggcgcgatttggtaaccgttgataaagaacgccatgccctgtgggctgcttctctggctgctaagccacagttcgatccagtcatttaa

SEQ ID NO: 52228 - DNA, 1044 bp, Escherichia coli BWH 32
atgatctggctatcccgactggagtcgacagccaataaacatcgtcttgccgctggtaaggccgcgcgtacagtgaaagctaatgcggtgctggatgaggtattacgcgcacacaaccaggaggccttgagccaggaggtacctgatttgctgagtcaggctgttacgcaactgcttgagagggactggcgggctcagcctaagcacaaagcgagttggcagcgctactggcggggtatgagcctgccaagtacttttgtttacgaaggtgccatcgttcctacgaagacaacatcagaaatagcctggcatccctggttggcccgacgtattacaggacaacttacccagccaatcaaggcacgcttacaacagctgaacacatatctttttcgccaaaccgggggcgacaagtcactattcccgggcttgcttggacatcgtgagcggtctctgcttatatttggtgacgaaaaagctctggactctttgccacctgatggctggaagcatgtcactctgactttggctgatatgggcgcgtttcgacgtgcgccgcctttaccgtatgagtcatcacgttgccatgatcttccggctatcattgttgaaaactccgatgtgtattatcggctatgccaacttaatcaaattcagactcgctggtcactggtcatttatggcgcaggtaacaaagtttccggtcaggcggagtgcgtgtcacaacttcttgaggccgaacaggtagaacaactactttattttggcgatctcgatgttgcgggcttaaaaatcgcccatcagttacgttgtaagttgcttaatgattacggtatcagcttgcatttagatgaatggctttataatgaactgatcttaaatggcctgatgacagcggaagggaacgccaacaacgaacggtttgatttcgagttacagtgtggctggatgccaaagtttgttttacgagaaatgaaaactcttctggcgatccaccggcgtctaccccaagaaggtgtggcttctttaggtttagttatatag

SEQ ID NO: 52229 - DNA, 1491 bp, Streptomyces albulus PD-1
atgtctgaagcgggacttcatggccgcgacacgctgggactggcaacccgtgtgaaggcactcgcggtcgccgacccggtcctcgacctggaacgccgcaagccactgctcgcctcacgcgggtgggccggctaccaaatggaggaattggcgctcaccgccatcgacaccgtcacactgaagatggacttcgacgacggtgcacgacacgaggacattgtggccgccatggcacgtgtcgcagggcttcagatgccgcagcacgaccgtgacgagcacaccgccgtggccggctgggtcctcgacaacctgctgaacgttggcaccgtcgaccgcgacttcagccacctctacggaatcgtctccaacagcacctacaccgcgcatgccttctccttcaagctgctgcgcgaagtcccaggacccgacggacggccacggctgcgcgcctccaacgaagcgatcgcggtactcgtcggcgcggtggacctcgacatcgcctccgaacaggtcgctgccgacgccaagctcgaagccctggtgcgacgagggcggctgaccgacgcccaccgcgccgcggagatggcgctgcgccgcaccgtgcaatacaccgaacacatccgcacacgcctggaaggcatgcgccgggacatctgctcggttgactgggtccgtgacgtgcaacgcatgcagaccgaagcgctggaacacatcgaggaccgcatcaacgccgaaaacaccatcaaggacaacctggtccggatgatggaaaacagcaccgaagacaccaccccggcccaggctgccgagctgatcgcgatcctccaggagtgcctgcgtagacacgcgtcactgcaggcgaacctgcaggaagtaggcgaacggttccgcgccgaacaagaacgccagagtttcgtgccgccccccagccgagcccacgtcgccctcgaacgccagctgctcgtaccggccctgcaactgccagtacggcatgcctatccactgctcagcacgttcgcgacggcggtgaccccgccgcaccgcccggcgatcatctacctcccggacctgatcgccggcctgatgacgtcgccggccgaacccgacggcgacgacggcctgatcatcgagcccgaattcggcgatgcgctagacaccgccactttctccgacgagcagtacacggccgtcgcctcactgctgaaacagaccgacaccgacggcatccgactgtccgaccttttgaacgcagcacgccagcacggcgtatcggccggacagcgcaacctcgaccatctgctggccttgcacgtactgggtctgttcggcgcaccgcgccacgaccccgagcgcggcacagtactggcagccttggccgacgaccgcgaactggacgacgaccggttcgcgggccacgacctcctggtggtccacaacccggcagcctccgtccagccggccgccaacgatctcgaggagggcgcggcgtga

SEQ ID NO: 52230 - DNA, 4497 bp, Streptomyces albulus PD-1; identical to SEQ ID NO: 52068

SEQ ID NO: 52231 - DNA, 1086 bp, Streptomyces albulus PD-1; identical to SEQ ID NO: 52069

SEQ ID NO: 52232 - DNA, 1506 bp, Bacillus vireti LMG 21834
gtgaacgaatcatgggaaggcttcgcaggaagaatgcagcgattaaatccattgtttgagcttgggagggggatggatgtaggagagctgaaaccctatgttcaaacgattctcatgcaagtgctcctcgccatcttttaccgggaattaaatgatgatgagcaacgaaaaaagtctgatattaagtatatggtggaagatgcgattaaacaaatgaagctgcttgcagacgataagcaaattgagcggatcactagcgggcttttatattccggaaaagaagagtacagccagccgtttgaagcgttatattacgatgaaatcaggcaggtctgggagactcaggtatttcgctatgtcacaatggatgagttatacacgaatttagagatgggcggatccattgtttataaactaaccgagatttcacaggaaatgatttttatgagcagggaaatggcggaggaattctcgataaccatcgaacaactctacagtatgcagctgattaaaaacggaaattttcgtaaagcgactcgaaacctcgatcacctcatttcacgcgtcaaccgcttaatggcaaaagaattctcctttcaaaaggaaatgatcaacaatccgaaaatcttattgatggaagaagaaatgcaacgggcagacaatcgtgctgaaatcgaaaaccaatttgaagaggaaaaaacacatttccggaccattacgagtatgattgaaaaaacgaaacgaagaaatgaagaagatgatgatgtccaaaaagaattgcatcttctccaagaaaaagtgggccatacgagacaactgcatgatcgttttgcgaaactcgttattcaaaacatttcctatgagatgaaattaaaggcggaaaatccatcgttattttgggaaaatagcttggtgtcattccgcgagcatttttatgaaaatctgttcatgaaggaaggcgttcgttcttttagggaaatcgaaaccgtactgtctcctttgttttcaccgaaaaatgaattcatcctgccacttgattggatttggggtgaacaagaattcgatgataaacaagtgaccaatgtggtcatcgaagaggaggccgaggaagaaattcctcaggtacgtgtgacggattggaattctgttagtaaggcttggagttatgtttttcaacaattacaagcagcgggggagttttcattagctgaactatccacctttccattagaagtgcaggatctatggctggaagaatcggaaacaatcgatctatggatgatgtttgacaagaagccgcttaaggttcaagtgctgcatcgaaaggaagaaaccttaagcgatgaaagggaaattcttctttataaactaatgaacgaatacccgcaatttcaagtgtttgaaggcatgaagctctatacgacgtttgatcatcgagcggagcctttactgtggcagcgaacgaaaataaccccttttaaactatgtattcaggaggcacgataa

SEQ ID NO: 52233 - DNA, 747 bp, Bacillus vireti LMG 21834
atgagtgctgaaacgaccaagagagcagcggctgtctattttactctattaaaagataaagtgatcgatgaatatagtgaacacttccagacgtattttgagccggaggtacgacaaaccgttctgttattagcagacgaatctggtacctatatcatagaatcgcctaaacgcattcagttggttgtccagccaaccggctccgtctttgcgaccaattttacgcatatgaaggaaaagcataagcatatcgagacgaaaagacattttcatctgataagcattgtgattatgtcctttttagccagcatcgaccgcaaccaagcagccaaaatccggacgcagcgggaagggattagctattatacattagagcggcaagtaaatgatctaatcatgaattgggacggcattctgaaaacaaaacctaactttggtgaagaagagcgcattgatatgaaggaagttgtcaccatgtggaaatacatggaagtggaaacggacgattatggcgccaaaaaagccaatcgccgaacgagaatcgggttaattgccggtgcaataaggttactggagacggaacggttagtagtgatactggatcgggacgatattccaaaggtgatcccaaagcaagagctttttgaacggattgaatacctgtatcatgattatgaccgctacgaattattgaaacaattaatgacattagaggaggatgggcatgccgaagattcatcgaattag

SEQ ID NO: 52234 - DNA, 4464 bp, Bacillus vireti LMG 21834
atgccgaagattcatcgaattagaattgttggccttaagtacgatggcatgcaaaagcaatataaagataccacgtttaacttccataatgaggaaacatcgacaaatggtctcatttcgatgatgaacggcggtgggaaaggggtattccttcagaccatcttccaaattctcaaaccaggaacggcgtgggggaaacaaaacaatcgctattatcagcaattcttctttaataacaaggagcaatttattccttatacctttcacgtggtgattcagtgggaattagatggggcggaccgccgtcatctcgtcacggggggaatgttctcagcagaacagcggctcgcgataaatgaagaaagtggaaatgaaagcaggacactggaacaggaagcaaaaatcctccctgtttttacgttttatacaagagagtttgaacggaaagaagaggcggccctcgagcatattccgcttgttgaaaatgaggaagttgcggacacggaaagcttgaaggactatttaaaatggaacggatatgatgtttacaaagatacgaaaaagcattatcggattctggatacatacggaattaaccggaaagactgggatatcttgaaggacattaacaaggatgaaggcggtgttggaaaatactttgagggagcagaggatgatcattccttgttccaaaaacgaatcattccaacggttagtcaaatcttacatcgaacagaccatcaaaaaaacgatttagtagaaatcttcaaaagccaggcaagtattgcaaaggacctgcctgtacttttaaaaagagagcaagcccataaggagttcttagaggatattgtcccttttgacgagcacctagcaaaggggattgaacataaagaattcatagaaaatagcattaaagttggccggcagctgctgggtgctttagagcatttgaaaaaaacagaggaagagacgctccttaccttagaaaaagacattgaaaaattaaccttaaaacaagcaaatttacgcttccaaaaagacaatttggagtttgccaaagcgcatagagaagtactagattgggagaagaaattaaaagaagaacagaagaaacacacctccttacaagaagatgtgaaggaaaaacaggaacgaagagaagagcttgcctttcagacaattttaaaagagtggtatgaatacgaacaaacgattcgctcactttcccagcaaattgcgaaactggagcaaaacagcggcttagtgcaggttaatcaaagaatggatgaaattaaaaaggaagcgttactgcaatgggaaacttcttaccaatcgatacaagaggccatgaagcagtatgatggctaccaaaagttcttaaagaaaaaagaaaccgaactgtcccgccaggataaacacatgacgaaggagtttgctcagctcagcgctgaaattgatcgtctctatacgcatatgcatgcgttcgaatctaaggaagaaacgcttataaccgagtttggcgaccgcatcacctatgatttacagggtactatcgaaagcctatccaaacaaattgaaaacaaaaaggttcagttagatgagctggataccaaagatcaagaatctacggaaaagcaaaagcagttagctgcatcacacggtacacttgcacaatcgattacgtttttagaagaaaaatgtgaagagttaaagcgagcaaatgaagtgcaaacgcaaaaagaagcaaaactagttgagaagcttcgtggtttactcatggatgtcacggtgccgttaagtcacgctcaattatcgaagtatgcccttcagatagaggaactgctgggcaagaataagcaccaaggggaacaaataaaaaaagagctatgggaaacacagctcgaccattccttaaatgatgagcctttctggattgccaataaggatgtgaaagagttaaaggaatggattgatgaaaaaacggggattgatgtgttttatggaacccaatttcttcaatctttaagtcctgaggatctagcgaaatacctattgacttatccgctcctcccatatggtttggtcgtcagccagcatcaatggcaaaaaattaatcagcaggttctttccggaagattgtttaatagtccagttccgatcttcctgcgtgaggaaatgaacaaagaaaaggaccaagcttcctttgtcattattaacggaaccgaaaatgcgctattaacggataaaaatcaattcactagctggaaaattagtattgcgaaacaaatagaggaaaagcaagaaacgcttgtagaaatggaaaaaacagaagcgtccttccgtcgtatcttaaaagaaatcgatcgattcctatcaagcgagctttccattgatctcgaacgaacgctcagtcaggaacagaatgctctcctttctgagaaaacaaaactgcaagaaattatcacccaagtggaaagagagaaggaattacagcttcagttaaaaaaacagctggaaaaaacgaaacgaaaacgtaaagaactttctactgatgtggaaacattagctaaatttgctgaagaaaaaacgcgtcatcaagaaaataaacaggtgaagctagagagagagaaccaaaaggaagctttgaccatcaagcaggaggaaataggtaaagagtaccaaacgtttgttgaattgcaaagcaagtggaagcaaacctattttgaatggaagctaaccatcgaacaaacgatcaaagaaattgccgcatttatcgaggtagcggcatttcctgcagaggaaaaagcggacctaagtgaagaggttccgcgtctttcaccacatcttttagaagagatgaatggcagtattgaagagttaaagcagctgcaaaaatcaaaagaagagcaagctagtgaattattggtgattcaagcgacaaaagaatcagaacaaaagcagcaaaagaaattagagaaaaaactgatggctcatcctcaggattggaaagaagttcctgaaccagatgaaccgattagtatattggaaaatatgctgcaaaccgcacagaaggaagcaaagacagcggaaaaagaagaacgtgatcaaggtacggctgtaacggtagcagaaacctccatacagcatgtgatcgagcagcgtgaaaagttagcaaaaaaggtcgcaaaacatgaattgcagcctgaagaatgggaagatcttgacttagaagttaaggccgtagaaattaatgaccaaacgaaaatcgcgaaggatgaattaaagaaaacagaaaaacagctaaaggaaacagaagccagtattacaggctttgaaggagatttgttaaccttatccgttattcttaaggaggaagcagccgtattcacggatcaggatgtcgaaaaaattaagaatcaaggtaaagcgtgcatcttgtcctggtgtggagagcatcaagcgattcaggaagaaggcaaagagaagcatgcgaagatcgaacaatcgttgcgcaatttaaagcttgcgattgaagggaaagattgggagattcggtttaaaaaagaagtgttaacaacacttgaccatatggatacaaggcattattcccatattcaaaccattgttaaaaatatgaagcgtttttcacaaagcggattggagcaattagaacgggacaaagaacgagctgaaaaggcacaaaacttctgggccagccgtgccagcatgaaggtgatgagtatttcagagtcgattcgttcgatgattgcgaaaatgaagctgaaaaatgaacgaggaacgtttccactggtccagctcaaagaggacatcctgccgaaaagggcagaagagatcgagccattactgaagcagcattttgtaacggccattaacaaaattaccaaacagtttgatatgattgatcacaacaatctctcattagatcaagaaatcaaacagcttattagtgatgaacaaattttatttgtatcgcttcgaaatcgatatcctgaactgcttgtttataacatgcgaacggataacgcctttatgtatggtaagccaaaaagggagcattattcgacctggcagacgattaatcaaggatcgaagacgaaatcggacggaagcggcggacaaaagctttccgctcggatggtcatgatgatgatgttattgtcagtgaaaagcgaaaccgatcaaagctgggtgcctttagtctgtgataatccatttggacaagccgcatctgcgcatgttcttgacccgatcttcgctgtcgccgagaaactgaaatttcaattcatcgtcgtcacaccacctgaactggtgaaaacggaaataagccaacgattcgatgcctactataaattggactttattcgggaaaaagggaaagaaatcgtttcagacaccattgttccggcatttcggatctatcagggggaagaagttattcaatag

SEQ ID NO: 52235 - DNA, 1074 bp, Bacillus vireti LMG 21834
gtgggcacaatcgacatcattgaaacacgggtgagaggttttattgcagatatccaacaccctagtcaaaaaaagagaatcaatatgaatgatttagaactgcaattacgcaagctgatggatgattattttgaaatggatgggtattcgctattttttaagaccattcaaacgttacaagcggaaggggagctgatcccgattcaaaataaacaatacaacgggaaaacacccgcgcttgcattgtattactgggtgaatatcaaagctcaagcagccaaatggaatcgtcttgagatgatgaaattaagtgatcagtttgatttttcctattatgaacggcatcccgaatggcaaacgaaagaggaatggaatcgaatccagaacgtctattcattcttacaatcgagtcatcagcgggaatgggtgtcagtcgaagaaagaagcttggagctttttggccatgaaaaattcctgctcgatggtgaacagttttcggagggcagaggctttttaacgagaataggtatcacagatgctcagcttaaaatggtgagctacggcgagccatttgtgttttggctgaagcaaggaaaagcaatcgatgagattcagcggatccttatcgttgaaaatctatcattcttccatacttcgattcaattattggaagcaggccagttggattatgagcctgatttacttatttatggggaaggcacgaaaattgaacgaagcttttcgtttttctttcgcatgtttccgccgaaaaattatcttttttattatgcaggtgatcttgatgcggcagggtgcggaatccttatccggctgattgaaaaatatccagacagttgtattcagcctgccttaaaaatatatcgcaaaatgcttgaatgtcttgaacaaaaaaatgatcaaaagcgaggtcaaacacaaaatccaaaaactcgtgatgccttctttcagtggtttacagaggaggagcaagccttactcatggggttatggcaggaaaataagcgaattccacaggaagtcctgacaatcgaatcatggaggcgatggatgtga

SEQ ID NO: 52236 - DNA, 1497 bp, Clostridium butyricum DORA_1
atggacattgaatataaaagtgtagtagaaaactacagagaaagaattggaagacttgcattatttgatcctctttatagtttatcaaaaaagaaaactatggacaaaagtaacaaagaagtagattattttggtttgggaatgctcagtcttcttttcttttttgaaaatatgctcatgaggaataaaaaaacaggagtaaaggaattagcagaatttctgcatgttaatactgtggaatttataaatttggatgaacagggttttgagaaagtagcgagaacaataatagaaatattcaggccagcaagtgggaaaagaagctctaaatcattttttaattatgaaactaaatccattgataatgtacagtattcaatacttaaggcaggacgagctgaccttcagtctaatgtgcagtattatgtcctggatgaacagggtcttgaacttatctttgctacaaaagagtattttaatgaatttcagctctcaataaatcagcttgtattgagaaagcagcttgaaaagggtgagtttgcaggtgccttaagacagataaatgaaatgagtcttgatgtaaagaatctccaggatagaataattaaaataaagcatgaagttaatagaaatattatttcaaatgaaacttatgatcgatataaaaatataatcgaagatattaataacaggcttactcatgaaaatgaagaatttgatgaacttcgccaatttgtgcatgaaacaaaggaaaaggtagcagcagaaaaaacaagagatgaagataagaaagcatatacccttatattgcggatagataaagaacttgggcaggtacattatgatcatagtatgcttcttaaagaaagtattgttcttaaaacatcagcacttgaagctgcacaggaatgtttatattatgcaggaatagattcttttaattttaacaatgaaataacagcaagggtattttcatcacctctgccattacatagtataagaactattattaatccattcttatatcttgaaagaaaaaaatcatggtctccattgactgttttttcacctcagagaatcgaaaatattgggagaagtgataaagctgaaaattttatggaagtagatgaaaaatacaaagatgacaatgattttataatgttaagtaaacagttttttaaatttggagaaattatctttgaagctttaggagaggacaaaaaaataactttagaaaatttaataatgtatattcaggataaaaagaaagatgtattgtatatgcgaagtttttatgatttatggatgatattgcatcaaaagtctcctattatacttgaagataatgatgaaagtgaagaagatcttctttcaaagttttattcagtatttaaagataaatgcagaatattaagtattgaagaacgaaaaggaataatcaaggcaaacaatcgttttgaaattaaaaatatgatttttagaatggaggatgagtaa

SEQ ID NO: 52237 - DNA, 738 bp, Clostridium butyricum DORA_1
atgcagtacaataacgaaaagattatgaaggcttttaaattatatctcattttgtctgcaaaaggatatgcagggaaggatgaattgagactttatatagctgatgatacaatacgtgccctggtggaacagtttgcaaaagaagcagactgcacaattttcagtgcaggtgataatatatatatgattcctttatctaaggattcagtatttcatgtttcaaatgatactataaaaaaggaatatcttacatcaaaagctgtaaacctagatatatatcttatgtatctttcaataatagtattaattggtgagttttatgacagctattcatctacagagcctacccgtgattttattacaatgtcagactggcttgaaagtataaatgaaagaattgaatctttaaaagaacataaagaagaagaactgaaaacacttgataaagaatatgattataactggtctgccatggcaaaaaagtggagcgatatggatgaaataaaagaaacagctaaaaagcaggatgcaagaacagtgagcagagtcagttttttaatacaggtaaagaatttcttgattaagaatgagcttgtatctgatataggaaacaatgaaattgaacttacagaaaaagcaatgataatagttcagagatattatatggaatatgattataacagagaaatacttgattttatgtataatctggataacaaagaggagagtgagtcttaa

SEQ ID NO: 52238 - DNA, 4461 bp, Clostridium butyricum DORA_1
atgccatcgatttctaaaattagatttaccaatgttgtttatgaaaatggggataagagatataatgatgatatttttgaatttgacggagaaaatggtgcagtacttctggaaaatggaggtggtaaaactgtttttgtacagacagcccttcaggcagttgttcctaatgtttctgtatctgatagaaagataaaaaacacccttctccttgaaaatagtcctgctcatatagcagttgaatggattataaatgaaaaaccacgtaaatatgcgcttacatctgtcacactattcatgaaaaatggagaggctgcaagttataaatatgtatatgaatatgatgagggtgatgatgaatccatagaaaatattccatttgtaattgaaaatcaggatgcaggtaaaagagcaagcagtaaagatgagataaatgaatattatgtaaagatgtcacaaaataggatgaatgcacatacatttgtaactaaaaaagattactgtgattatattgaagataattttaagatcataccttcagaatggcagaagatagctgaaattaatggtgcagaaggcggagttgaagagttctttgatgcctgcaaaacaacaggtcagcttgtggataatcttcttattccaacagttgaagatgctttggcaggggaaggaactaaagcttttgcagatatttttgaaaagcagcgtgaacatttgaaacaatcaaagcagcttagaacacagattagtgaaagcagaactgtatgtgacagaatcaatgaatatgtaaatgtatataaggatttttcaggttcgcaagaagaactagacaatagaaaattatttctgaaagctatatatgattttgaaaataaagaaaaagatgaaaatatcaggaaaaatgctgccaatataaaagaaaatgaagataattttcagaaagaacagctatacaatatgaagagagcttcttatgaattaagaattttagaagataaaaagaatgaacaatataaaaagtacaaagattttagtgaagaatatgagaatttaaaaaatatcaatcatgaacttttacaaaaatattcggatctccagaatgcagcatttaaatataagattaaaagcgaagcagacatagaagaagctgaaaaaagaaaactcagagatcttgaacagaataaagaaatgacggatatacaatcagaactaaaagaaaacagtgaaaagctgaatggttattttaagaatgaagaaaacaaacttaagtcagcgagaaatgaatataaagaagaactgtctcaaaacaatacaaggttacagaacatagagaaacatttaaaagaggcagaaaaaaagaataatgatttaaacagtgaaaaaagtaaaaatgaaggtcagataaaagtattggaaaatgatatggtaaaaatagaaaatgctattctttccaataaagataaagaaaacattaaagatcatttgttaatattaaagaataaggttgaatatcttgaaaaaaatctatatgattatacaagttcaagaaacgttttgaaaaatgaaaaaataaatgaaaataataatttaaatgatttgagaaaagatttagacaaagaaaaagaaataaattcagaatttgcttctgacataaagaatatagaaataaaaatggaagaaattttgaaatacataaaggaatttaagtccgggtggttcaattatgataaagagaatatttacttaaagcaggagagtatattatcacagatagaaacaagagttgaaattcttcgtgatgaaaaagaaaaatgcattataaatgaaagaatatcacacagatatagtgatgattataaagatagtgagtattttactgctgacttttatcttgaaaggctgattaaaaaactgagagaagatataggatatgttgaaagtggaagtgagtatattaagaaatattctagaattcatgatgtaagtatagacagtctgactgacacctttaagtactggcccataacgttgataacttcggaaggaaatgtttctaaaatagttgatatagcagaaaagcttaatgagaatatctcttatcctataatagtgatgagtgaaaaagaagcaaaaaaagagattacagaagagaacactattttattttcaaatgtagtaatacctgggttgtggaaaaataatagtgacaagatactgttcgaaaaatggaaaagtgaaatattaaataaagcttcagagtcaactaaaataagaaaagacaaggaaactgaatttaataatgcatgcgaaattctaaagaaggtaaggggattttatgagtactgtccttttgaacattacaaagaaattaatgcactcataaaaaactcaaatgaaaagattagaacactacagaatactgttttagaaaaggaaaatcatattaaagaaatagatgaagaaattgagagaataaatcttaaagaaaaacatgataattctgaaatatctattgttgaggggcagattcaaaaatgctttgactacattggaaaatataatgaagtcaatagtcttaaagaagttataaaacgcattcagaatgaaatagagggtgtcttattagaactggaaaaattaaaaaaagatatagattatataaaggatagaataaaagaaaaagaaaaggatatagatgaagttgagagaaatataaaagagttgaaaaaagatgttgtttataatgaagttaaagattatgaaccagtgctttctgataaaagtgtagaactgttaaagcgtatcagacaggatataaatgatagactaaataaaaagaataaagacagaagcagtatagtagaaagaattagaagtgcagaagaaaaaagagaaattttttctaaacaatatgaagattttaagaaaaaacttgatgaggatataaatataaatataaatgatgctttagaaactaaacaaggggatgaagcagaaatagaaagactaaatgaaaagattttaaaccttaaagaacctttaaggaaaaaacagaacgaagttgttaaaattaaatcattatatgatacaagttatggaggttataatactcagaaggaaaaatatttaaatgaatatgaaagaattatagaatttgatgtttcatgtgaagaaatatcaaatatgttatatgaagaaaagaaggaaatagatagtaagacggcagcacttctcaaagaaggaaagaaaatacaaaaggaaaaagatgagatagaaaaagcgttatataaactggaagtagcaaatggaagcgagaatttcctttttgataacacaaagtcatatgaacttactgaagaggaaaaacaaaatattccttataagagaatttcaagtgtagaagaacatataaaaaaatacaaggatattttaacaacactatataacaagaaagaatatgtagtaaaagaaaaggaaaaattcataaaattctgtgaagataaaattaatgatgtaagacttaaagaaatgtctgtttctggtgtgagaacaaaagatactcttcaggatattgaaaaatggcagtatctcatgaacgaacgaatactaagggctatagaaatggcggaaaatgatattcgtgaacatgataaagaaatacagcagtttataaatcatattcattcatatcttgttacagtatgtgaagaattaagaagtataccaaagaaaacaagaattaaaatagacgatgtgtggaaagaagtattcatttttgaagtgccttcatgggaagaaaaagaagggcgaaaaaatataagtgaatatattgattttgtaatatctgcattggaagatgataagtttaaagatgagaataaccttgaggatgctggaaaagtgagaaaggaaattgagaaatatcttgttacaaaacagctattaaaaatagtaatgggagataaggatataaaagtaaagtgtaggaaggttacaaatgatggtaaaatgcgaagtgcaccattttcatggcaggtatccaattcatggtcgggtggagaaaaatggagtaaaaatatgagccttttccttggtatattaaactatactgcagaaaaaagacagcatataaaaccttcttttaacaaaaaacattataggagcgttatagtggataatccttttggcaaggcgtctagtgaacatgttttaaatcccgtattctttattgcagagcagcttgggttccagattattgcacttactgcacatgctgagggtaaatttataagaagctattttccagtagtgtacagtcttaaacttagaaattcaaagaataatactactcagataataaccaaagaaaaagaaataaaatatgcatattttaaagacagagatagtgaaacacttgttagaatgggcggagtaaagcaaacaagttttcttaattaa

SEQ ID NO: 52239 - DNA, 1011 bp, Clostridium butyricum DORA_1
atgtcagatagtattttacaaaaatttttaaataaccataagaaaaaaacaattttattaagtgaacttgaaaaagctgtaccaggcaatatatcatatgatgaatttgcggaaagcatcaacaaacttatagaaaataatattttaacagttgttaactctaaaaataataatggaaaaagcattcctttatatatgaaatacaaaattaacaagtatgaacttaaaaaagaaggcattgaagaaattaaggagatgagtctaaaagtacataatgatattaatcttgaagaatactacaaacttaacatagaagaatttgaaaaggataagaaatacatagtcatgatagatgattatcttaaagaaaatggaattcctcaaagttatgtgacaagccctgaacgttcctttaatataactggtgatgaaaaatggattgatgaaaaggaaggaaaaaaactgctacagcgtttaaaaattaatgatttgttaaaaatcattaatataagtgatccattaatgttttcaataaattataagtgtattaatgataatattcattatcatcttatagtggaaaataaggcaacattccttgcaatgacagattatataaatgaaacaaaattcacttcattaattttaggttatggatggaaaataaatggaaatatattcatgttaaataggcagcttaatttaaaaggaaaaaatataatatattattttggtgatttagataatgaaggcatatctatatacaattcgttagatacgagaactgaagttacacttgcagataaattttataaagcattattgaaaaagcctgtaagtttgggaaaagaaaatcagaattttaataaggaagcagtgaacaagtttttgaaatattttagtcaacaagaaagagagtatattttagatatgcttaaaaatggaaaatatatgccgcaggaagcgttgtcaaaagaagaattaaagactatttggaatgaaattatataa

SEQ ID NO: 52240 - DNA, 1461 bp, Paenibacillus larvae subsp. larvae DSM 25719
atggataataaattaatatcgattttccagaataacgaatgttcacccgaaatgcttcagtcgatgagggatatatcttatttatcaggagtgttgagtgatctgggatctcagaatgcattccaaacacctgctgaaattttgaagtttttacggattattcaattgattaatgaagaagcgcttgggcttgacgaccagatcgagaattcggatacgctttattaccgctataggaaccgttatagcgatccggatccgccaagcaggagaaaggtagagcaaattatcaatgtgctcgtcaaatacaactggatttccaagcaatcaaggcagttgaagatgagagatatcggaaaacggatgatggatgctcttattcgattggctaacgattcacttgcttattacatgcatgacgatattgggcgttcactgtttcaggctagacgggatgcggagctcagcgaagcctatgatgatcacggaatatctggcggcaataaaattgccagcatgattagaaatgttgagaatgccattcaattgatgtatgagagggaactggagatgcttgccgaccgcaacgccttgccgcaacttgaaattatccatgaactcatgcaggaacttgaggtgaagcttacggagcgttttcgccagttccagacgttggaagatagcctcgttcttagtaatctgatgcagcaaggtacggctgttcttgcggagggaacgaatcttagcatcgggatgatcaataaatatttgaagtttacgacgatgcagcaaactgtgctcttatcgaccattaatcctgaaaaggtaagggagttcatcttgcggatgtatgatcctccactggaatcggatattccgaacgctcatcagcttatgagctttatggagcagaatcaatataaaggggaatcagcagatggattatgggtacccgttaagtttgcagcacctatatcggcaaatgctattcgtgaatccgtgcattacttggaaacgtatgaacctgtaattaatccgttaagggaagaagagacggaggtggagtatatggaagaggaaatatatattgatcaattgagcgagctgatgggggaatcacagtggatgcttacgaaatcgatgattcagactgatgccattgaatcatatatggaacaagtcgaagtggcgccgatggagcaggtgatgatcgaagcaacctctgcagaatggggtgatgccatcaatgcgttgactgctattgcagccttggtcggtaacaagaaattgatgatcgatcaggcttcaaagggcgtaactatcgatcagccgctttacgagaaaaagtgggaatggatgagccgggatgatcgatatcagcttgttaggaaacggaacagccgggtacgttcagaccagaccgagactcaggggaatggaggaaacaaggaagatgtctga

SEQ ID NO: 52241 - DNA, 762 bp, Paenibacillus larvae subsp. larvae DSM 25719; identical to SEQ ID NO: 51839

SEQ ID NO: 52242 - DNA, 3219 bp, Paenibacillus larvae subsp. larvae DSM 25719
atgatacctaggaaaatgtggtttagtggcattcgagactatgagggtacaaaaatggatttatcttatcagcaagagcatgttcttattactgggccgaatggttctggaaaatcaacgataacgtattgcatgggggccgtattgtattcttccaaggtagatattgaaggcttgaggtcgcgcaatctggccccggatgaaatctggaaggcacaaatccggctgctttttaagaatgagggctatgcacgaatcgatgctccggattatgttgagttttcactttccatccttcaggagccaggacagcccgtcaagaaggaattcatcatttccaccggagatgatcctgaggaatgggaggagaaaattcgttatacctctggcgaccgccaatataatttcagcgcttacaagaaggatctccaatataagtacaaaatcgatccggatatgttttatcttatctggtatcaacaggaggtcaatcagtttgcggttatgcatcctgaggagcggtttcggatatttgcagaaatgcatggtatcgatcaggtgcagcgtaactgggaagagagtatggagaagttaaaggagacgcaggagacactgcgtgtggctgaaagcaatgtggcaaataaaaagcaatggttacagatcaagaaatctgagctggatcggtatgaggataatcagcagcgattgcttgaaggtggaaaatggtatgcacattctctgcttcaactggaagcctattataaacgcgaacaagagcaactgaatagtcaaattgagcagtttgagctagaaaaagaacaacagcaggagcatataggtgaaatgaaggggcgggaagctgaagtcaacgtgaagatgacggctcttcagaaggagatcgatcagttaaaagctgaactgtctcaatgtgatgaacagcttcaggcattggatatcgtgatgaaggaaaccaagacggccataaccgagctggaacgtgagctgcaggaagtcagcaaagagaaggaacgcattacacggacagaagacgaagtaaagcagcagttgaccgacgttaccttgcaattgaacgatacgttggagcaagatactaagctgaactttgagattgagaaaagcgaggtaagaaatcaagagcttacaggagtcatatccaggctggaggctttaatcgagcgggatcagaaagaggagaccgagcatcaggaacggcttcgtcagtttgtaagcagtcatcatgttcaggaagagctgaatcggctagaacaatcgcttcttatcgctaaggataaaagacatgagcatttaaattgcgttcgtgatttaaaagaggagcttgcccggcttgaagatgagcgtgattggtcacggcggcaaatggattctttgacatatttcagttcgagagggatccgggcatatgcattacgtgaactggtggagctggatggttccgcgcagctcaaatcagaagagcgctttaactccatcaagtacacgatattttttgatggacatatggttgccgttccgaatgacctgtaccatgttccgctgcgcaaggtggtgcctgatcgttcggtgacggagcttatgccgcttcaacttcgggtaaaggaaggattggatgaggaagtgtttcctcacgcagtcaaagctttgtggtgggttgagcagttttttaaggacggtgacattcggattgaacatggtgttctggtagatccgatggggattcgcgggccacaggaacaaagccgttatattttgagcgcacgtgccctcattgcccgcaaggaggaagttgcgaggagcattcgtgagctgtcgctgaagctggaggaactcgatgaatcgatccggcaagatacaaaacgaatgcaagagctaaacagcatcattcatttggttcgggaagcagaggcatttatgacgagggagcatgagcgggccagtagagtcataaaacaggaagaggaaacagcgagacgagaagaacttgtggagcatatacgggagttgcgaaaagttcaaaaagagcttatagaaaagcggctgaagttggaacgcgatcagggcgagctgaagggagaagccgagttttatgtgagacttggtcagcagaaggagaaatatcaagatctgaacgccaagcagcggtatcttcgaagcttgagtgggcagcatgaagaactggaacatcagcatgagaattgtgaggatcaactggacaatttagagaaggagcttcgaaagcagcagcgtgagctgcaggacatccaggatcaacaggagcgcgaggaacgcaagttgcgccagattcataatcaactgcagtcaagaatcgactctcttgacactgtgaagggagggtatgtgagctcgattcaggaattggaagagtttaagcggttagctccgcatatttacaacgaagtggcaaggggggatagtttgcagtcagtcaacccaagccaactttcttccttatctcaaatccgttcggaccttgaaacaggcaaagtaaaattcaaccatgcccgaaatgaaacgggtatcgacccagaggcgccggaaaattataaggtggttgaaaaggaatatcaacgtcatcaagatgaatataaacggacgagcgtattgttcgagcaggaccaagaacgtaccggccaactgaaggaccagttggagactacgattaacatgagagttctcgaaataaaacagcgtttcaaatcctatatgggtttgtttcaattcgagggagaaattgaatgggatcaatttgaggatcgtcgggggcggacacatttcaatctgtatattaaagcgcgcaaggagggacacagaggaactctggaagatgtcagcgttaaggctcgcggcggcaaagtcggcaagggtgtatccggcggcgaggaatccttgagttccctgctgttcgcactcgccctactgcaaaatttgcaaacgaccccgggattcattgtattagacgagttcgacagcgccttggacgagcagcggaagttgaaggttttcgatctttatggacgggagcttgagcgaaagctcatcatacttacaccaaaatcccatgagaaatcgtacctcgaccgattctctaaagcgtacattgtacatcatgatccgactgtaccccgaagtaaagttacgggaataataaaaaaatattaa

SEQ ID NO: 52243 - DNA, 1305 bp, Paenibacillus larvae subsp. larvae DSM 25719
atgagcgcaatagaaaacatcttttcatatatatcgcaatatatcttaaagaacggcgagcaattggatacaaattataccaggattatatctttggttgatgtcgatatcgtaaaacaaacagcacgtaccttccggagagttggtactttaactctatcactggatgcctatgcgcaagaggatgcacaaatcccggacattcctttgttaaaatggactcttggcaagcgggcgattctcgatgatttacaagcctttgagtggcttaataagggatggattatgaaggaaatgcgctttaagcaagacgggaaaacgatagaacgagttcactatcggatgggttaccgtttatttgtatatttgcagaaaaaaacggatcgagaacatcaggagaagataagacagtttgcgagctatcaattagatgcccaaaaggtgctaagagggctggtctttgatgataaagagcgtgcagttcttttatcttcgctcacgcatcatgtatcagacagcatttattggaagattgaagaactggccgaatcagacttgtttccttcgagttggagtgcgctaaagagaatcaaatgtttaacttttctgttagcattcattatgatatccaatcataaagagttgttcgattggaaagaaatcggtgcgcaatattatggcgggatcggaggatctaaagcatttgatgattacaaagaagaatttatttgtgttctagaggagtggagtaagcaatcggtagaaatcttggggatgattagccctgggaaaataatacctttatattttgcgggacatctgaggggggaacggtcgtgctttcaggcgggtcctgtttatgcattgacggatctttctatcgcacaggatcagtacagtacggatgcaacgacactgtggctggtcgaaaatcgaggaattttaacaaggttgtctgctgagcgtaattttttgcgggaaacaggctcgctgattgtatgtgtagatggtcaccttaggagcgtacataaaagattcatccataacttgctcaaaaacagctgcattcgtcaagcgatcttctggagcgactacgataaagatggtcttctcattgcgggagaaatggttgaagcggtttcggtgtatcctcttacgttgaaatggatttgtcacgatcacaaggtgattaaaaattggtcagaatatcaacagtatatgggggctcttcttcaggaagtttgtctggagcaggaattgatattagggaaggcagaggattggagacgatggataataaattaa

SEQ ID NO: 52244 - DNA, 1263 bp, Bacillus wakoensis JCM 9140
atggaacgtttttcactttcaaaggaaatatatgaaagtattgctagaaaattaatccagacgtttcgaccgacgatggggaaaaagcgaacggtccatttttataattgggaaacacgtgcagaagaagagatacagttttcctatattcgcgacaatgactttaaagagggtgttcaatactatgctctcgatgaagatggacttgaattactgtttgcgacacgagaattttacagtgagtttcaattgtccattcatcaattaatgctccggaagcagttggaaaagggcgaatttaaaggcgcactgagacaaatcaacgaaatgagaattgatgtagaaacactgtatgaacgaatcacaaaaattgaacttgaaatcaaacgaaatattgtttctgatgaaacctttgcaagatatgaaacacttcttaatgacatttatggaagactgacaagagagaacgatgaatttgatgaattagcagattttgttacggaaactagaaaccatctgtattatcaagataacgataagaaagaacggaaagcgtacaccttacttttgaaaattagtaaagaactagagcttgttcatgctgaacatggtggtttattaaataagagcgtacatcttaaacaaacggcattaaaagcggcacaagaatcattatactatgctggagtagactcctttaattttcagcaggatatcacggctcgtatgttaaattcccctgctgcggtggaaacgatgaaaggaatggttgctccttttcttggtattgaacaaacaaaggtttggtcgatgctgtctctgtttgagaaacaggtggtgacaaatcaggacaatgaacaggaaaaacaaacaacgttcctcggcttagaaaatgaggatgaagaacagctttatgtcagttatcaaagagagatttatcagaaatatatgacgttattaatggaatggtatgagtcaaacgaagttcgcgaattaacgagttttctctcctttttacgaaccgagggacaggccgatgtcttacacgagcgtatgttttatgaattctttctagtgttgcatcaacggtctccgcttgttcaagatcagtcgtttgatgaacaaagtcaagcgcagtatgttttaacagaagtgatggaaattttagggggaaagacactctatgttgaagaattaccggatttacttcaggtgaccgagcgctattctattcaaaatatgttgattagattggaggagtaa

SEQ ID NO: 52245 - DNA, 738 bp, Bacillus wakoensis JCM 9140
atgttactagaagaaagtgtcgtcatgcgggcgtttactgtgtttagggagctaacaaggaatggattcgttgaaggggaaacatttgaggaatatagctcggaaagtcagattcgaagattagttgaagcatatgcggaggaagtggattgcaaagtggttgcagcaggggatcgattgtatcttgttcccacgactaagttgtctccttttcatataacaaatgaaacaatgaaaaaaacatatttaaaaagcaatgcaacaaacgcggatatttacacaatgtatttggcaacgcttgttctttttggtgaattttatgatagttacgctacacgagaagcaacacgtgatttcattcaaatcgatgattgggtaagagctgttacgaaacggattgactttttgaaagaacatgacttagaacaattgaaagagctagagcatgaatactcgtacaattggattcaaatcgtcgaaaaatgggatagcctagacgattataaagaaacagcgaaacgtcaatccggtcaaactcaatcgcggctgagctttatcgattcggtgcaacgttttttaaaagatcaagaacttgtcatggagattggaaacggcgagctacgcctaactgaaaaagcgaaaacaattgtccaaagttacttcatggattatgagtacaatcgcgggatacttgattttctttatcagcatgaatacaaggaagaggaggaggactaa

SEQ ID NO: 52246 - DNA, 891 bp, Bacillus wakoensis JCM 9140
atgccggccatttctaaaattcgttttacgaatgtaatctacgaagatggaaataagcgctacaatgatgacatgtttcactttgatggagaaaatggggcgattttacttgaaaatggaggcgggaaaacggttttcattcaaacagctctgcaagcgattctcccacatacatcgctggcagatcgaaaaatcaaagaaacgctcaagctagaggaaggtccagcacatgtaggcattgaatggattgtatcggataaaccaaggcgatatgcggtgacagcggtctctttgtttttaggacaagacaaggtcgactcctaccggtttgttgatgaatatcgtgaaaatgatccgaatagtctggctgaaattccatttgttcaagagtcctcagacgggaagagaccagcaggaaaaggtgaaattcatgattattataaagggcgtacatcttcaagtggcgagctgtttgacacattaacgagttttaaagagcatattgaagatcactatgggattattacaaaagaatgggaaaatattgtaaaaatcaacagtgctgaaggtggagttgaggcttattttgaccaatgcaaaacatcaaagcaactttttgagcagctgttaattccgacagttgaaaacgcattggcagccaatgatggggattcgtttgtggacaccttttcaacgagacggaaagggttcaaggagtatcaacagtttcaagagacgatacaggaaaataaattgatacaagaaaagctcgagcactatgtagatgtttttgcgcgaaaaaaagggcgttggatgtgtatgaaaacgaaaaacgtactggaaaagcctattcccttttttatcagaagcgtcttgaacaagttgagttaa

SEQ ID NO: 52247 - DNA, 1008 bp, Bacillus wakoensis JCM 9140
atgaaagaagttattacatcgtacttgctctcttattcaagaaagacgattgctttagaagagttagagaatatcgcacaaggtgaaggtaaatcgtatctacattttgctgagttgattttggagctagaagaagatggaattcttgaatgtgtgaaagcaaaaggaagaaccattaagaagccacaacttgcctattcctatcgaatcaaccaagcgattttaaaagatgaacatttcaatcggcttcaacgtgcccgctccgttttacacaagcgcattcaacttgatcgatattttcaacttccccctgtgcaatttgaacaagatcaaccttacctccaaaaaattagtgaataccttcaaaaaaacaatttgccgcaggatcgagttccagcacctgaacgtagctttgagctaatcggtgatgaaaaatggatgacagatggtagtggagttgaacttttaaaacgaattagcttatgggacgagatgcgagtcattcctgtcgcagatccgttgatgcttgctgttgatgtatcgaaaagggaaaattcaattcattttcatcttatcgttgaaaacaaaacgacgtatcaagggttgttgccagctttacgtgatacggaatttacaacgttaatttatggttcagggcgaaagatcctacgaggaatggaccattttcatgaacaagttccgttaacaggtcagcaccacttttattattttggagaccttgatttagaagggattaacatttggtcggagctttcagagagtatagatgctcgacctgccatccctttttattctgcctgtttaacatatgcatcagtcgctgggaaaagaaatcaccgtcgagttgaacaagccctcgcaaattttttgaaatatatgagtgatgaggataaacaaaaggtccgtgagatgtttgaaaaaggacattacttgcctcaggaagtattgaaaacaaatgtgctacaagacttatggaggaattggtga

SEQ ID NO: 52248 - DNA, 1470 bp, Photorhabdus temperata subsp. khanii NC19
atgtcgctagagtttttggagcaggctcgtaatgaatctatggcacgccgcgagctgactattcagtcccacgcattgctggtcgtgcggacgctggattcaatatatagcgccctacaacgcaatccgttcaacggcgtcgagcttgatgcgctggcggctatcatgcatctctttgacgccatgctttattatgctgaccgtgagcgccaacccggtatgacacgtaaagaagcggagttatgccttgttgagcacctcaatgaagcatatccgggacaagaagcctcagactacgcgcaggttgccagcaagatttttgcagcgatcaaagacccttttcgtctccgttattacgacttcacgcaacgaacgcattccgaagaacaaatagttcgtctggtacgctacgaccagctatccggctcagatgatattctctggtcgctgaccgatgagggaatgctgttttataccctccgtttggatgaaacgccgatagaacgcgcggctattctggcctggcgaacgctcaaaaccatccgtcgcggtgagatcgacaaggcagtacaccagatccagtcaacgcagcggcaattggagcaatatctgattgggatgcgtatgaaagtacgtgccgcccagtcgggtgatttgagtgcatcctatgcgcaggatatccgccccgtactcaatgactcctttgataagactcgggaagtgctggagcatattcgcaacacgatgtcggccattacggaaatgctggttgatagacgctcagatttacaccccgataaattaaataagctgcgcaaggcgcaagagatttttgccgaggtctgcacctttacgcagcgctatcaagactgcttactcgatgtgaacaaagattttgagcgagctcgcctgaaactcattattcccagagataacaccctttttcgggaaacgctggaaaaaggtgcactcaaacccttgctgtcacattcccccgacattgttgaaaaggaaatagatgatctcatcgcacacctgctggctccccgaagtcagaatgatgatcggcacatcttgtttgaccttgatgcgctgctgaacctctatctcgatagatttgaacaagcgcttccaaatgaaatacaggaccccgccgaccagcccgtagcgattgaaaccaacctgcgcggtatccctgagtctgtcattaagaaatgcagcgattgggttagtgaccggttgaagaatcgggggcatgtgagctttagagatgttttcgacgcctatgagtgcgacgaattatccgaacaagaacaacaggtttgtttacttcatattggcagtttggcggctaacagcgatcccacaatagaagtggagataggcggcgacgctgtcgaaacagcgctctggcgggctaacaatataaaactgttaactgccgctcccgtacacccctttgaggagtag

SEQ ID NO: 52249 - DNA, 4437 bp, Photorhabdus temperata subsp. khanii NC19
atgtggctgattaaacgggtttatatggatggcgcaggccatgaagaagccttctacaaagacctcacattggactatattggcctgtctcaagcggtcgatagtcctgctattgaagggcagagctcgcccgtcaggaatgcgaaggtggtgaccagtacctatcagcagcttgtgaatgggggcggtaagtcaacctacatcgcactgctgttatcgatctttgagccatccgttagtgacttcacccaatacctggctaatcgtcgccagagtgaataccactaccgcaattacttctataaagaactctcagttattctggttgagatggtcaatgaatcaggccaaacgttattactgggacacgctcatcagcgcaatggggatgatgttgactgcacactgtttatttgtgatgcgcctgactccctgctgggcgcgccgtttgacgaggtgccctcctactctcgtgctgaacgcaattccgcgctacgttcctacgccaatagcctgcacagctttgaaagctggcttaatctcaaggcgggcagtgaagggggcatgcactggcgaaaaaccacccggcagaacgaatggcgcgcatttttgctggaacaacaaatcaacgttgatctcatcaaaacaatggttaccttcaactctgaagaaggtggtctgacccggttcatcgaatacaaaaccgagcatgatttcctcggcgcgttcttcgcctgcaccatgtctaaggatactgcggagcggctgcgtgaactggtggcgcatgaagttgaacgtcagggggagttagaggatatccgtcgtaacgagtccttcctgaaggatgtgctggctaactggcaggcgtttcttgaacccgctaaacagctggaaagcactcaggctcagcagcaactgctggatgatggtttccgcgaagcaatgcgcgatctcacagcctttatcggggaagcacagattgaacagatgcagctagaagatgacacgggaagcttgcaaaaacacattgaccaggcggtgtctctgcgtgaactgttgggcaagcgcagagcgctacttgaatatgatctcgtgctgcatcagctcaacaaacaaaaagctatggtcgacgcgcttaagggcgaagccgacgtaaatcagcgtcagattgaaattactcgcaccgctatagactacaaatcctatgcgaaggctctggatgagtaccgtcaggcagacgaagatctgaaggtattccaaagtgaaacggaaaagccgctgcaggtgattttcgagcgtactgctggcgaggctctgggcgtattagagtgggcaatcgacaggcatcgccagcaggaggcgaagctcgaagaagaactgggacagataggcaaggatagtaatgtccttagacaatcatacgaccaagtacaaaagacgctgggcggcctggaggcggatcgtcgcatatatcaaggagacaaacgccaaggagaatcgcaacgggacgaattatgtgaagttgggttgatccagaagggagaaacgcctgcagccgccttatatcgactggaattaaccttacgcgatgcacagcagtctgaagagcaggctaatactgcccatcaccagaaagagcaggagctggaagcgcagcagcatgtggtgcgcgaaatgtcggttgagcaaagtaaggcccatcagacgctcatcctggctgaacaaaagcaccaggcggcggtggatagcacgctggccctagtaaaaacctatcgaacactcccagcgtcaacgcaacatgatgttgacgttgaggacacgaattggcacagcgagcggtgcggattgcagctcgacaaggtattgcatgcggacactcaaacgctgaatggaatgaaagagcgcttgctgcaagccaggcacgagctggacgagttaaaactgacggggcatgaactggtcactaagcagatcaatcaggcgcttgaagcgttctatacgactggtattgcacgggataaactctgggcatttccacactatctggcctctgctttcaacgacgatgcccagcgtattgcagaggtgatcgatcaaaatcctggccgctacctgagcctggtcgcacttgacaatgcaacgcttgatcaggtccacaaaatcagtgagaaactggcctggaagaaagcgcccattgccatttatttgttggatgaagcacaggatctccggggcgtcacgcctgaattgatgcaggtcgtactctcaaatcccgacaagtgcggttatggtcaggccgcttacgaagcccggctgcaagagttggagaacaccgtagctttacaggaagccagtgtggaggctgcggaaagcgtctttaaggtactgcaatctttcaggggtgactggcgtttgcattacgatcaatacggtaagcattggtcgagcctgattgaacaccgggagcaggcccgcttaacgctggaaaatgctgatgcagcacttaagcaggcggagcattatgaacaaacactgcgcgacgagaaaacggatgctctggcgcggttaaacagtgcccaacagcagaaaattcaggcagaaaaagcacatgataaactgagccgttttgttgaaatggaatgggcgaaacgtgaaacggcgataatgaaactggtgcagctagccgagcagattcagcgaagcgaggagactcttgtaagcctgagggaggagctggaacggcagagagaactcgcggagaacaagcgcgccgagcaaacctatataagcatccagattagcgaatggaataacctatgcaacgagccgttctattcagagattacggcgaccgaaggtatcgaaggacgaagccccaaagatgcccatgagaaagctgctcagtcgcacaaacaattgctagaagcaactaagggtgatcaggtaatggctctcaagcaacagcgaaaagatgctgagcaggcacaacgtgacgcctctaagcgtttaacggctcaacctgcctacaaggtgtatccggatgcggtaaaatcggtggccctcaatgagctggcgttgattaataaccgcattgcacacctaaatgaacagcagaagcaattcacgcagcgcctgattgcggcgcagggaactatgcaatatatgtccaaaaaatgcgaggaggctagcaaagcacttgacgaggactttgtgtgggaagagaagcccatcgagatagaaacgatccaaacgtctctggctgaaatcgtcaacagcctacatgaaactgaataccagctcaaacgccaactggagcaaaagacgctgcagttgaaaaagattgaaaatgtgaaagaacggctacagaacgccaaaacagctcaggcgatgatccagcccatcacggtgacctctgcagcaggtctgcctgtcaggatcctgagcatcactgagtatgctgacgcgctggccacgcaatgccgaatgtacgcaagcttaaaagaaacgctgaaacagcaaaatatatgtgtcgctacggtctggggacgctttcgcaaacggatcgaagaagagtcggccagggatctagacgctcgagccagtcaggaatacttacggcaactggacttaatcacaacttatcacgaagtgctgggcgatttggacagggtcggtacagggatcacgcaggtattcgaagctgtgcaagatagcctggaacaattccagcgttcgattgacctggcagtcagccatctgactgctcatctggagggggcgattaaactcctcaagcgtgttatgtcggttaaaattcctgaggattgccccgtactgcctggtcgccctatcatcaaaatgactgaccggcttaatgatgttgccgcagatctcaggggttttgccagtagccgcttacagcagtggatagccagggggcaggtaccccgcgtgcccaaccgggacgccttgacagcagatttggttcagtcggtatttggcgaaggggagctggaggttcgtctgctgaagacgaatgtcagtcgtccacaatggactcctgtcacccggctcgaaggttcaggtgggcagcgcctcacatctgcctttttgctgtttgtgacggtcggcaaagtgcgtgaatacgatacgggtatttcaagtgcaggattcttactggccgacaacccgttgggtaaatcgaatgccgatgatttgatgcgtattcaaacccaaatggccagggcctataaaatccagctcatctacttgactggcatctcggatgaaaacgcccaatcgatgtttgataaccatctcttcctgaacaaagttcagaaactgaggcggcgcgatctggtaaccgttgataaagaacgccacgccctgtggtcggcctccctggttgctaagccaaagtccgagccagtcttttaa

SEQ ID NO: 52250 - DNA, 1044 bp, Photorhabdus temperata subsp. khanii NC19
atgatctggctatcccgactggagtcgacagccaataagcatcgtcttgccgccggtaaggctgtccgaacagtgaaagccaatgcggttctggatgaggtgttaggcgtacacagccaggaggctttgcgccaggatgttccaggtttgctgagtcaggccgttacgcaactgcttgaaggggactggcgggctcagcctaagcataaagctagctggtatcgctactggcggggtatgagcctaccaaatacttttgtttacgaaggtgccatcgtccctacgaagacggcatcagaaatagcctggcatccctggttggcgcatcgtattacaggacaactgacacttccaatcaaggcacgcttacagcagttgaatacatatctctttcgccaaaccaagggcgacaagccactctttccgggcttgctcgggcaccgtgagcggtctctgcttatatttggtgatgaaaaagcactggattccatgccgcctgacggctggaagcatgtcacactgactttggctgatatgggcgcgtttcgacgtgctccgcctttaccgtatgagtcatcaggctgccgcgatcttccggctatcattgttgaaaactccgatgtgtattatcgactatgccaacttaatcgagttcagactcactggtcactggttgtttatggcgcgggtaacaaagtgtcaggccaggcagagtgcgtatcacaacttctcaaggtcgaacaggtaaaacaactgctctattttggcgatttggatgtggcgggcttaaaaatcgcccatcagctgcactgtaagctacttagcgattacgatatcagcctgcaattggatgagtggctctatgatgaactgatcttaaattgctgggtgacgcctgaaggaaatgccaacagcgaacggtttgattttgagtcgctgtgtggctggatgccgcgctttgttttacgagaaatgaagatgctgctcgcgacccatcagcgtctgcctcaagagggggtggcatctttaggtttggtcatatag

SEQ ID NO: 52251 - DNA, 1470 bp, Paenibacillus sp. FSL R5-192
ttggatgagttggttggcaacagtatgatctcaattctgggcgctgataccccggaccatcttcaaaaggaagcgctaagggatatcgtcaagctggcaggtgtgttaaccgaactgcgtgaatatttcgaggagccgctgaaagtgctagaggttctgaaaatgttgaatctcattcaacgtgaagcccttggactggacgagccattggaggatctggaggctttgttttatcgctttcggaatcgttatggaactgagccgaatattccgatggagcgtttgctaaatgtgttgcaaaaatataactggatcattcgcggcaagaaacgtttgacgatgatggatgcgggaaaacgcatgatggacatgctcatccggcttgccaatgattcactcgcgtattacatgcaggatgaaattgcccgttccttgtttcaggcgaagcgagatgcggacctaagtgaggcctatgatgacaaaggcatttcgggaggtaatcggcttgcaagcatgattcgtaatgttgaagatgctgtagagaaattgaaagaacgccaactggaatttctcgctgatcgacatgcgctgccacagattcagatcattgtggagcttatgcaggaattaaatgcccggatggatgaacgtctggaacggttttctacatttgaagaaggttttacttttgcgccgattttgaagagggggacggaagtcatgttcgaggggactcaagtatcgatggggacgttgaacaaatttctgaaattctcacacttgcagcagacggaggttggacaagagatatctccacaagcgattcgtcaatttattattcaatcatttttcaagcgttcagattcggagttgccgagtggtcatgagattttgagctttctggagcaggatcgtatttccggtgagagactggatggcatgtgggtcccggttcagtttgcttctcccatctccaaccgtcaactggccgataccgtgcactatctggagaattatgttccttctacggagcccgttcaggaatacgctgagccgcagtatattcaggcagaggaatggacggaagaggaactggaagctaggttgcaggaagtggaatggcatatgaccaagacgaacattcgaacggatgaagtggagcgtgtattggaggagaaagagcgtttgggattacaggagctgttgctggaggcgggatcgcatcattggtcagatgcagtcaatgcgttgctcgctgtcgcggcacttactggtgctcagaaagcatcgattgacgagagtacagaagtacagcctgaaagtttaacggaaggaacaattcaggacaaagaatgggagattgtagagagaggaaggggtaaatatgccgttcaacgaactggaggaaacacacaggcagcttccattgggagcgatggaacgactgaccgcggtactgagcccggatga

SEQ ID NO: 52252 - DNA, 639 bp, Paenibacillus sp. FSL R5-192
ttgggagcgatggaacgactgaccgcggtactgagcccggatgaggaatatgcgtttgtgcagattatgttttcttcttccgcatccgtgcgaagtgacagttttggattgtccaagcgtgaggtgatgaagattttgaagttaaagcaggaggatgagcaaggacttatttcttttttgaaaagggtaaaccaatccattagccgctactttcaggtcgtctatgatgaacgcagagaccggatcgtggccctgattcatgtcccagccagacaggccagagatttgctttcatctgaaagccttgcgctcttgatgttcattttttatcatcaggaggttttacagaatgaatatacgttatttgcacagctgctcgaggccttcgggcatgaatcgctggacgtgcggcgtaaaattctgatgaacctggatgcgctgatgaaacttggggcagttgtgaaatacgagaatccctccaacgaggaagcttacgcgctgacaacgattggaagtcgtctgttctcggattcgtatttgaaacggtttgccgaatttagtcattctcagcagcttcatatggacgatgtgttgaagttcttcaaacgttacaacctgacggcaggtgcagactcatga

SEQ ID NO: 52253 - DNA, 3240 bp, Paenibacillus sp. FSL R5-192
atgacaccttgggctattcgttttagcggcattcgggattttgtggatacccagcttgaactgggtgatcgtcaagatcatgttctgattggaggaccgaatggatcgggtaaatcgacaatcagcttttgcataggcgctgtgctggcttctcaaaaggtgctagtcgatggtttgcgttcccgtaacttgccacctgatcaggtctggagagcaacgatcgaactggtgtttgagaatgtgggcaatcatcaagtggaagctgccggttatgttggttttcggcttaatatggaacaaaaacctggagatcccgttaagaaagagttttggatatacgaaggagaagaagcgtggaactgggataaggaaactcgctatgtcacaggtgatagcaccaaccatctacatgaatatcgacatcaattgcaacataagtacaaagttgacccggatacgttttatctcatctggtatcagcaggacgtgaatcagttcgcggtgatgcgtccggaggaacgattccgtatcttcagcgaaatgacaggtattgaccggatgcagaagcattgggagagtgtaaaagaagaacaaaaagaagcgcagcaagcgttacagaccgcagaaagcaaccagcatcaacataagctgaatttgggcaattggcagcaggagaaggaacgtttactcagccgtaatgaacgtcgcttacttggtctgcagcttacgttaacggcctctgctacactccgtgagaaatatgaacaggaatatctcaggctgaaggacaaattggaagagatcgaggatcgtcatagtgaggaaatagacaaatgggtgaagctggagagtgaccataaacgttatgacgaggaaatgaagcaacgcactcaggaaaaagaggtcatggattgtgtactggatgagttggagatccaggtgaatcaccttaacgaagagcatgatgcgcgggtgctggagcaccgaaagttagcggatcagctacaggagctgcaagagcgcattcagaatgtaccctatgcagaagcagaggtaagagaacgattgcagatccatcaagctgaacttgatcggctggagcaagagctcatagaaaagaaacaggcgcatattcatgcggatgaaaagtgggatgcgctaacgaaggtttcggccaagcttgattatgaactcaggcagcatgagatcaaactaacagaagcagaagcgatggttgcgcagtatggctcaagcagcagcctggagctggaagcgcagcaactagagaagaaacgcattgaattacaggatcaacggcgcaagcttgaagatatgctgcaattgctccgtaaggagagacaagcattaactagggatgaagtcagaagcattagacaagatacatcgattcggagtttggaagaacggggactcacggtgtatacgttgagggatttgcttgagatggatgagcattcgccgctggaactggaaaaaaggctggagcccgtcaaatatacgttgtttgtgaatgggaaaggcttccgggcgccaaccgatctgtatcacgtcgaattgccagaggttgtacccgaaagagcgctcgatgtgttagatgagcagggtctgagggtcaagcagggactggatgatatacgatatgcggctgcgcagaaagccctgtggtggattcatactctgcattcgcaagtgaaagaacagaaatcaggtttacaggacggacagcttctagattcatggggccgccggggagcgcaggaaaaagagcagtggctgcttaatccgcgcggcgttgcgctccgaatcagacaaacggatgaagaagtgctcaagctggagcaacgtctggagggtgtccatcagcaatatgatacatgcgaagagcgcttgaagtcgattcgatccatactgcatcagattcggacagccgagggtgtgatcgcggatgtggctcgaagagattgggccaagcaggagtgggaacgtacagttaatgaactccaacgatggaaagagaagagagatcagctccaactggagcaagaggcattaagtcagcctattgtgatgctgcgtttaaagctccagacgttgcaagaatacatgagcatttatcatgaggctagtgatcagaatgtggaactggagcgtctccggcaattggggcatgaactggaacgtagcaagtcacacgttaaacagctagagcgcgagttggaggacaagctggcggagagcgatcagttggagcgtgcgctggaatcaacggcccgaagacttagggaaaaagcgcagtttatcacagcaaccaatcgggttctggacgatctgaagctggaaaagaaacaggttagcgagcgttgtggtgtagcggagcaagcttatgcagccgaacaacaattttatctcaattgggcagagcagcttcccgccgtatttgcagctattacagaagagcagccggactttcccgtcaagatgcaatggaacgaagcggaagctcgacatgagaaggaaatggctttaacgcaattgcagctcgcttgcagagaggcgatagatgagaatgcacttgaaaattatgagaaagtgaaacaggaatatgaccggggagctcagggggtgctggaggcgcgttcgcttttgcagcagctcgaagagagtctggaggacctggaggaaaagctgatgaataccattcattatgaagtaaggcgaattcatcagcgctttgtgcattatatggacaagttctccttcgatggtgaagtcagctgggacatgcaggagcagaaacaggggaacgttaagtatttccttcatattaaagcacgcaagcaagggcatcggggtacactggaagagatcagcatgaaaggtcgaagcggcaaggttggcaagggtgtatccggtggcgaggaatcgctaggttcgttgctgtttgcactggcactcatgaaaaccattgacgcgaatccgggctacattatgctggatgaattcgacagtgccttggacgagagcaggaaagccaaagtatttgaactgtaccgtgacgaattggcacgcaaaatgattattctatcccccaaatcccacgagtccgattacttgaactatttcagcgaagccttcgctgtgtaccacgatgccagaataacacgcagtgcattgatacgaatcaagaaaaaagcggagatacaagaacagggtcattaa

SEQ ID NO: 52254 - DNA, 1434 bp, Paenibacillus sp. FSL R5-192
atgaatcccgagatgaaagagtttatatataagcattatctgaagaaaggtctggagcttgaagacaatccagtcacagacgctggaataatatatgcattggatgtctatcaggtatccgctagaatcaggaaaagagttgctagaattacggctatgatgatggaggacgatgaagatcatagcctaaatgcttttagcgacatagaagagagggcaattcatttattttacagcacaggtgttcgaaaaacagacacggatctgaagcgaagcggattactggaatcagatatacaagcgttgttgcaccgaggttttattttacgaattgtacgatatgaacccgacggaaagacgggaaaacaaagtgaatacaggatgggctacaggttataccaactgctggaactgaaaaagttgcaagaagaagaaaaaagccaggagttagttgaggattggtgcagtgctttaacgactgtactgaatgctgtaaaagaggaccccaacattttcccagaagactcagcgaaaacgaatcaaatatatgagtaccgccaagccttctggcgctttgtggagaagttcgtttcagtattgaagcaaacatctggcatgaacgaaattgctgactctttggagatggatcgttcagcctggacccataagaaacttttactgtatgtcgagttcgttatagctgttgccgagattgtttccatcaagacctcttttgactggaaagagattggggcacgacattatcgtacgattggtggctccaaacgttttgatatacacaagctctcttttttggagcaattcgagcaaaatctcggatttccgttgcatgtcatcggtttgtccagtcaaggtgtgattacacctgtctattttgcaggtcaattaagcggaacgggtggatttcagtatccacagggtttcctgcatgcgacgacggatctgacggtatttagcactcatttctatacgacatgtcgtgttctgtggattgtggagaatcgtgcggttgttacacgaatggtagcagagcctgattttctgatgcgttcagacagtttggtgttgggaatagatggtcaactacgaggtggacaccgcaaatttattactgacgtgctaacacattctaaacacttggagcaagtggtagtctggtgtgacatcgatcatgcgggattcgttatcacgaaaaatgtggaatccttgttgcagtctcacacggctttaatcaccaaatggattcttccgatctcgtccgccaatcaaagggagcaatttcaaggtgaagctcaccaatgggcatctttcgagaccgaaatggagaaaaggcttgctctcgggcacgctggagaacaggaagccgagatgggaggtgcggagcgttggatgagttggttggcaacagtatga

SEQ ID NO: 52255 - DNA, 1506 bp, Paenibacillus sp. FSL R7-269
atgaactggaatgatttcggagaacggaacaagcggctgaaccccttatggagtctgggcgcaggcatgaatctgggtgaactgcagccgtataaggaaatgattgcgcttagtgtgctgctacaggtctattatctggagctggaatcgaatgaacagcgggccagggaggatctggtggatctggcctggagctcgctggagcgcttcggcattgcgaagtcgggcagcccggaatcggtcgaacggctgatagacggactgctgtggagcggcagcggcggggatttcgaggcccattattatgatgaccacacccggcagatcggggtccagaaatacaaatatttcaccgtggatgaggatgctacacgtatcagctgggaggagaacgggacgaccatctaccggctctccgagtatgcgatggagctgatcttcatgagccatgagattatcgacgagttccaggtcagcatcaagctgctggagattcagatgcatatcaagcatggacgggttacccgggcaatgcaggatgtcaatgagctgatctcccgcgtgcgcaaaatgacccagcagcagcaggagtaccgcaatgccctgcgccgtaatccgaagcacatcttcagcgaatacggcgcccagcggcatgagcggctggaggagatccaccagcaatttgacgaggaacgcaagcatttcgacaatatccaccgctcgctggcccggctggccaatgatgagaaggatgtcattgatttcaatgagctgcgccagctctccgagcgggtggagctgtcccggcgggtgcatgacgagctggccgaggtcgtgctgagtatcttcgaagcggagacgaatctgcggctgaacttcccggagttattctggggagcagcaggcttcaacttccgcacccatgtatgggaggaatgggtgaagccggaagggctgcgggatggggatagcctggagatgctgatcagcgggctgttctcgcccagccaggatttcatctatccgctggcctgggcctgggaggagcaggaggtcggcttcttgccggaggatacgcaggatgtgccggaggaagccagggaagaagaggacatccattatgttcccagaggtattccctggaccgaggtatgcgagctgtggctgccggttatagccggagtggctgcgcacggcagcttcaccttcactgcggaggcgttcacggagcaggagcagcggcgctgggcggattgcccggatgccgtggatttgtgggtacaatttttccataccgtaattactgtcgaggagcaggaagcggagggccatggcgtggcggacgaatgccagaagctgcttcagcggctgatgctggaccacccggagctggaagtgctgcgcggcacaaggctccggaccactatctctgcacagcagcagagcagcatccgtatccccggccttgagatcagcccttataccattaatatagtagagaagtga

SEQ ID NO: 52256 - DNA, 759 bp, Paenibacillus sp. FSL R7-269
atgagttattccctagagcaagttcagcaggcttcccggctgttcttcgacctgcttcggcgcaaggtgattccgctggatgatcccgctgccgccgaatgtctgcaggataccgctgcttatgatgccctgcaatacgtagccaaagaagccggctgccggattatgaattccggtcaccgcctgcacctgctcgtgagtccgatcggctccgggttcgccagcaacttcactcagctgcgtaataaatattcacggattgagcgcaagacgcatttacatatcattaacgttattatcctcgtcttcctggcggagatggatcaggatgagcagcacttcaagccgggacaggacagcatgtcctatattcagttgtcggatcaggtatccgagctgttccaaggctggatcggcatggatgaagacggcagcttcagcaagcagtggcggctggatatccaggcgatgcacagagtgtggaccagcctctatatgcagacccgaagccaggaggagggcgattcgctgacccgcggcgcaggctcccggattggcctcattcacgaaggaatgaagctgctggaggaggagcatctggtgttcatttccgagaatgagaagcggattttcccaagggaagagctgtatgagcggatgcgttatctctaccacgatgtggaccggtacaaagagctgaaggctctagttggccggacactcagcgaacaggagggggaagcccatgccgcgtattga

SEQ ID NO: 52257 - DNA, 4524 bp, Paenibacillus sp. FSL R7-269
atgccgcgtattgagcgaatccgcatcgccggactgaaatacgagaagatgctgaagaaatatgaggatatgatcctcgatctgtgtaatgaagaaggcccggccaataccctgattacgctgatgaacggcgggggaaagggcgtgctgctacagtcgattttccagttgctgatgcctagagccgcctggggtaaggataatgagaaccaggtcgaggccttcttccataatcacaaaaaacagctgaaaccctacaccttccacgtggccatcgaatggcggcttgacgataaggagcgggcggagtatatcaccaccggaatcgcgatgactgcccagcattccatggaccagcttgagatcaaagtcgattatctgctgtacgcgttgctgaaatatgaagagacggctgagcttacactctccaccctgcctttatatgatcatgagctgaatacgcccgcgagcttcgaagcgattcagcagtttgtgcgggagcggcgaggtgagattaatgtctacggcagcagcagctccgatctgaagaaatattatgcctacctggctgaccatgatatccatatcgatgaatggcgcaatatgcgcagaatcaacggggaagagggcggcatcaagggctatttccagaaaaatgatgccttcaccaatcataatctcttcgagcggctgattatcccggagatcggttccagtctgggagggagcctgcgtgaggatgaaggctcgcttcagcggatgttcgtggataccgctacggttgcacagcggctgccgatgctggagcagcgcgagcgggcttttgccgagttcacctctcttgcggctcctttgtatgaagcggtgaaactcggaacggaggcggacctcagcttccgggagaccgagcggctaggagcgcagctctataccgttattcatgatgaactgaagcaggcggaagacaagcgccgcagaacgtcagatgagctggccgggcattatctggaagcgaagacgctcagattcgagagcgataacctgaagtacctgcggctgaaggaagagcatgatggcaagcaagagcacttcagagcggtctcggacaatcagacacgggccaagcagcgtctggaagaatcgaagcagagagagaagttgctggaggtcgcccattatctggcccggcgcaagctgcagctccgccagatggagcaatggcagaaggaaattgaagccatcgaagggtcgcttgcgatgaaggaacgccaaaaggtgattcaaggggccaagcaggagctgcggatacagtgggagcaggtataccggttatggcaggcgaagagcctgtactacagcggacagcagcggtcccatgcagcggaggagcagattctgcgcaagggccgggaggagctgctgctggagctgggccgggtggatggtaagctgcaggaattaacagccatgatccgtcagtatacagaggatctgggtgtgttcgcttcccgccacgggcaggaagctgcccactcgccggcaggcgcccttcagcgcgcgctgattgcggccagagggctcattgagcagatagatgccttgaatgaacaacgcaagaccgctgaggaccagaagctgcttctgcatacgcagcatacccggctggccgagaagctgctgggggccgaggttcaggcagaggagctaaccgggcgaatcgaagcccagatgaacaaggagtcgcagctctggtcacagctggtagtgctgctggagatgtacgaggagcatcagctgcttggcgcgacagctctattcgaagcgaagcctctaatccaggagcggttcatccgcaggctggaggataccgagcagcagacgaagcggctgcggcgggattattatcagcagctgctggatgtcgagctgcaacaggaagcctactggctgcctaaccatgatatcgtaacggtgaaggacacgctggatgccctcaaaattagctccatgaccggcaccatgtatctgaacgatcagccttatctggtccgcgaggaggagctggaacgccatccgctgcttccttacggactgattgtcacgaagcgtgaagcggctaagcttcagccggagctgcttaaggagcttctgcttaaggctccggtcccgatcttcgtgcgcgaggagatggcggagggtggtacagacgccttcctgctgctcgcgcatcaagggccgcaaatggtcttgcagccggatcatttccaggagtggaagcgggggatggcttccagactccgtgagcaggaggaggagcttcaggcggaggaagcgtatcttgccaagctgaggtccgcccggcaagaatatgaacgtctgcatctgagcgagcatactgcaagtctgcggatcagacagaagagtgcggagactctgctgcaggagcttcgcagccagctgaatgaaatgaacgcagaacaggcacgctatgaggaggttctggatggaatttccagagacctgtcagcctgcgaagcggataagtccgagcaggagacccgggcggcggcactgcgggagtggagtgagcggagccggaagcacgagcagaactatacagacaagcacaagtctgtggagcagaagaataatctcaccaaagagattgcagttaaggatcagcaacttaaccggctgaaggcggagatggacagcctcgccttgcagcgcgagaaatggatcggggatgcccgttattccgtattcccgcgcctgcagaactggttccctgacgttgagttccccggtgaatctgcgggtgcgaaagttcagggttcagttgttgaggcggatgctaaggcagatgatgctgctgccgatgaagcactgaatgagacggtacaggacaagctgctgcagctactcagtacagttgagagtcttcagcagtctttaagccagaatgagctggagatccgcacaagaacagcccagatcaaggcggccagagaacagctggctgagctggaagctgctgtgcagcaggtagatgccggatggccgtctgcccctgagccgcaggaggcaccggatatgattcagtccgccagagtccgccagaagagcgacacgatgattctggacgaggattatcagcagctccgtgactccttcatccgctgccagaccgagcttgacagcctgcgcaaagagctgggcaagtccgagaaggcgattaaggagaagcatgagcggacggtagagctatggcatgagccgctggaacagaaggaggaagagatcagtctgcgggtccgggagaatgagcatctgctgaatacctgtaagcaggctctggcttccatggatcaatggctgctcattctcggcaatcagagccggatcatggatacccatgtcgagaaccgtgtgccgctccgggaggtgccggaagaattgcagctgagtgtgcgggagagctgcgagacgctggtggaggattggctgcagcgcagcaaggagagccgcagccagcgggcagaggtctcccgcaaggtgaaggaagagaagactgagctaagcggcaaggtggccaagtccggctggaatgcggagcttgagaccaagattcaggaacgcctgaacaacgttcattgggatgatttcgctatcgccttgcaggtgcttgattccatgcttcagagctctcgtgatcagatggagagcatccgcagcgataaagaggatatggagctgtcccgcaagctgtgggtaggccgggcagccaagcgtgtggtgcagatcgttgatattctgaagcggatggaacgccggatgatcattcacaacgagaacggccatgccttcccgctggttaagctgaattacaagaatattaatgttccacggactacagatgacatcgaaccgctggtcagcgaatatttcaaccgctgcatcagcagcctgctggagcggttcccgaagatggagcaggttccggcttcagccgtcagagagctgattaacgacggacgcatggtgtacgcagcgctgcagaaccgcttcccggtgctacaggtgtataagccggtgacggagaattacttcctgtatgccgctcccgaggactatcattattctgattgggaggttatcaaccgaggcgcgctggatgaggcggtaggcagcggcggacagcgccagtctgttcagctgctggtggcgatgatgatcatgacgcacaagcgcgttaaccgggaaaataaaggctggacggtcttcctgtacgataacccgttcggagagatggtctcaaataacgtgcttgatccggtcttcgagatctcgaaggcgctgaagttccagtggctgatcgtcacgccgccagagctggtcaagaatgatgtcagcatccgcttcggcgtgtactggcagctgtattttggcggagataaaggggatgctctggattcggtcctgatcaaaggcgggcgcaagctgatccctgcttcattattctaa

SEQ ID NO: 52258 - DNA, 1467 bp, Paenibacillus sp. FSL R7-269
atgaacactgaagtctgggatggatttcgggaacgggtgtccattctaaatcctatttcgatgttgggtaaaggaatggatctaggcgtcgcattaaatccttatctgtttcaaatctgtttggcagtcctcctcgaggtgttttatcgagaaatcaaagatgacgatcacagacatttttatgatataaaggaaatcgtaaatcatgtgatcgaggagcaagggttggaagcaaccgaagatcacgtggagcgtatagcaaacggattggtatcttttggtccaccccaaagccgccaatcgttcccgggtaaagtttttgatcctaacaccggggagtttgtagagaagccgttcttttatcttacgattgacacagcctatagcaaaaaacgagaggcggtatataagttaactcaaatctcccaaaatatgattttcttaagtcgagaagttattttggaattttccattgaatttgagcagttgtatactcttaaactcattcgaaacaagaacttcaaatcagcccttcagtctctcgatatgttgataacgaaacttcgttttctaatttctcaagagatggaataccgccgtcaatttttgcgcaaccccaagattatgatgggaccggataaagaagtcaggtacgaaaagcgcaaagaaattgaacgccaaattaaagaagccgatgaccggtttgaaagtatgctacgaatgttgcaaaaatcggatttggccaccctcgaggcaagaggtcaaatcatggagatggaattaaaggttcgtaaaagctcggaattaacgacgagcctgcacacccatatgtacgaaaatatcgaactggaaacctcaacgagaaagaatcgcccgtctgcctttatgaagaagagaaccacatcatttaaaacagatgtatgggagaatgagttgctggccaaaggcataggggcgcccgatacgatggagctacttctctcacctctattttccccacgtcctcctttcatttatccattgggttggatttgggaggaacaaaacactaaacagtctgaagatgaactcgaagcggagcaagtgcagatggagcaggcggtagaaaaaccgaaacgggattggtctctgttgtgtaggttgtggggtcccgtatttaaagaattgttacgggatagctctgttagattaggttcccgtccggtatctgaatggactctggaagcactggaaatgtggatgatctttaagacggaaccaatgcacgttcccctctctttgggagaggccaaaccctatcccgatgaacggatggaattaatccgacaattgattttgttagaccctgcatttaaggagatcgcaggaaaaactattcgggctgtcttcactaatgaagcaccgctgcaatttatgggtgtccgcatctcccctattacaatttttatcgaaccccaggagggataa

SEQ ID NO: 52259 - DNA, 744 bp, Paenibacillus sp. FSL R7-269
gtgactacaacatccgagcagctgcaccaagcctctgccgtttattttcatttgcttaaaaaccatatggtagataaaaaacatgacgcgcttaacccttattttgcggatccagctattcaggaagctgttcatatttttgcgaaacaatccggtacgcttgtactggagacatttactaaactccacttggtagtggaggcccagggaagcttatatgccagcaatttcagtcacttaaaagagaaccacggaaggatcaaatccatccctgaaatgtacatggctcaccttttgctcatggtgttgctgagtgagatcgatggagacatgaccattcgaaatgaacgagaattgagcggagtcggcttttacaagtgggttgaattgatggaccaaacctttgctaaatggactaaagatttgacagaacgaccagagcttgaagaccagtggggaatcgccattacaacggttatggacatttggaatggcaaacatatgcacgacggggatgggaaaatatcagcaggtacaaaaaccaaatttcacttttgtatgttagccgcgaaactgctagaggaagaaaagttggtacgccttttggatgatcgggaacaaacgatcgtctatccaacggacgatctctatgaacgattggatcttttatatcatgaccaggaacgatttaaacaggtaaaagaaatactggctctcaggaggcccaactatgccagccattga

SEQ ID NO: 52260 - DNA, 1062 bp, Paenibacillus sp. FSL R7-269
atgagtacaaagtggataaaaacttatttagaaagcctaaagcggcaaacgtttgatattttttctctagaaaaaacggttcaaaaccatattggtatgaaggcatttgagtatgcttctttcgcaaacgatattaaagctctagaacgagacggagtcattgaacctgttaaaagcaaaatgaagaatcatcaaaacggaagattcccagtccttcctatctactggcgtgtcttgagaatgaaagaggagccgcggtgggatatgcggaaaatggttcaactcgcggcagtgatcgatttatcattttatcaatctcatccggaatgccaaaccgaagagacgtggcgacggattgaatccgtagccgctttttttatggacctgactccaaaatcatgggtggaacgggaagaacgaagttatcagctttttcacgatgaaaaatggctgaaagagaaaagtgcggaatttttgagaagattaaaactttccctttcagacctttacgttcaagtaagtccggagccatttgttcattggcataagcccggcaagttgctggaggacacccgggaaattctgattgtagaaaaccgagcaatctatcatacctgtcttcgcatcatgcgtgaggggttgccagtatgcggctttcgcccggacatgctgatctatggagaaggaaaccatatccatacttctcttccttatttgatggaactcggcgtacccgttggcctctgcactattttttattcaggcgattttgatccaagtggcttttggatttacagcaaacttagaaggacatatccagactacccaatccatctagctctttctctttatgcaagtattgcgtatcacgcccgtgttcctgtggaagtcaaaccaggccaacctaagggggaagacgatgtacaaatattttttgaggactgctcaggctatcaagatgtggaactggcggcaaggcggtcctggaaggagcgtcaccgtttgccccaggaggcattatcttatgaagttttaaaaggagaggttcctcatgaacactga

SEQ ID NO: 52261 - DNA, 1509 bp, Paenibacillus sp. FSL H8-237
atgaaatggtcggattttggcgaacgaaacaaacgattgaatcccctgtggaatttgggggctggcatgaaccttggcgaaatccaaccgtacaaagaaatggtgtctttaagcgttctgctgcaagtctattatctggagctagaatcgaatgagagaagatccaaggaggatattatagaacttacttggactgcactggaacgttttaatatcgccaatcttgggactaccgaatccgtagagcgtctcgtggacggtttattatggagcgggaatggtggggatttcgaatcctttttctatgatgatgtgacccggcaaatgtccgtgcagaaatataagtatttcacggtggacgaggatgcgacccgcagcagttgggaagagaatggcagaaccatctatcgtctctccgaatatgcaatggagctcatttttatgagccatgagattattgatgaatttcagatcagcatcaaactgctcgagattcaaatgcatattaaacatgggcgcgtaactcgggctcttcaggatgttaatgaactgatctcccgtgtccgtaagatgacccagcaacagcaagaataccgcaatgcgttacgccgcaatccaaagcatatttttagtgaattcggagtggctcggcatcagcgactcgaagagattcatcatcagttcgaggaggaacgcaaacattttgatagtattcaccgttctctggccaggctggccaatgatgagaaagacgtaatcgacttcaatgagatccgtattctctctgaacgagtcgagctttctaggcgtgtacacgatgagctggctgaggtagtgttgaatatttttgagatggagaccaatttaagattgaactttcctgaattattctggggagcagccgggtttaacttccgtactcacgtatgggaggaatgggtgaaagaagagggtctgccaagcggtgacagtcttgaactgctgctcagcggattattcgctccgaatcaggacttcgtttatccgcttccttgggcttgggaggaacaagaggtagggtttatccctgacttagtgatggatgatttcgaagatgaggtggacgcagagcctgttcaatatattcctaaaggtatcccatgggcaaaagtagtggatctgtggaagccggtttttactgccttggctgagcagggaagctttacctttactgcagacgctttttccgccgaagaactgacagggtgggcaaacacaccggatgctgttgatctgtgggtgcagttttttcatacagattttttagtgcaggaacaggcaccagaaggtggtagcggcgtttctgatgaatgccaacagctaatccaatatgtgcttgcagaagatcttctgttggagagtttacgcggcaaaacgctgcggacgagcattgctccagaaccagcctcaagggtacggtgtcctggtctggatatgagtccatatatgattacgattgtggagaggtga

SEQ ID NO: 52262 - DNA, 759 bp, Paenibacillus sp. FSL H8-237
atgagttatacattagaacaggtacagcaagcttcgcggctattttttgaattgctccgtaaaaaagtaattcctcttgatgaccctgcagcggcagaatgccttcaggatgcaggaacttatgatgcacttcagtatgttgccaaagaagggggctgtcgggtgatgaattccgggcaccgtctccatctgctagttaatccgctggggtcagtgtttgcaaccaatttcacccagttaaagaacaaatattcacgtgttgagcgtaaaacacacttacatattatcaatattattattctggtttttctggccgaaatggatcaggatgagactcattttaagtcggggcaggacagtatgtcctatattcaaattgctgatcaggtgtcctcgctctttcagacgtggattcagatggatgaggatgggcgatttagccagcagtggcagcttgatatccaagcgatgtctaaggtatggaccagtctgtacatgcagactaagagtcaggaagaaagcgatcttctgaccagaggcgcaggctcacgaattggactgatccatgaaggcatgaaacttctggaagaggagaagctcgtattcatctctgagacagagaagcgtatctttcctcgggaagagctgtatgagagaatgcgttatttatatcatgatgtcgatcgataccaggaattaaagagcctcattggaagaactttagctgagaaagacggtgctacctatgccgcggattga

SEQ ID NO: 52263 - DNA, 4482 bp, Paenibacillus sp. FSL H8-237
atgccgcggattgaacgcatacgaattacaggacttaaatacgagaagatgctcaagaaatacgacgatatgattctggacctctgcaacgaagagggacccgctaatacgcttattacgctcatgaatggcggtggaaagggagtactgctgcaatccatttttcagctgttaatgcccaaaacaccatggggcaaagacagtgagaaccaggttgaggctttttttcataatcataaaaaacaacttaaaccgtacacttttcacgtagctatcgaatggcatctcgacaacaatgagcgcaatgagtatatgactacgggaatcgctatgacggcacataattcgcttgatcagcaggatatcaaagtggattacttgctgtacgcacttacagattacggtgaagcggctgaacttacgctatcaacgttgccgttatttgacgaagtgactgctgaacctacgagttttgaaacgatccagcaatttgtacgcgatcggcggggggagattgtaccttttggcagccatagctcggatttgaaaagatattatgacttcctggctatccgggatatccatatcgccgagtggcgaaatatgcggcggatcaatggtgaagagggcggtatcaaaggttattttaaaaagaatgatgccttcaccaatcataacttgttcgaaaagctgattattcctgaaatcggatctagtctgaatgaaggattaaaggaagacgacaatacgctgcagcggatgtttatcgatacagcaacagtggctcagcgcttgccgatgcttgaacagcgggagcaggtctattcagagtttcttggtatggctgcaccgctttatgagctggtgaaacttggcgtggaggcggaaaacgtagtacaagaaactgaactacgtggacgccaaatctatacggttatctatgaagagcagagaaatgcagaagttgagcgaagtaagattgctgatgaactggctggacgttatcaggatgcgaagcaactgcgctttgagacagacaatcttaaatacttacgcagcaaggaagaaacggaactgaagcaagaagagtttaagaagctcagtgatgatcagagccgtgcgcgtggtcggttggaggattccaaagcgcaagagaagaagcttgaagtagcttattttctggctaaacggttgctccatacccggcaaattgagcagtggcaaaaagaaattcaagctatcgaaggttctctggagatgaaagaacggcaagaggtcattcaggcagccaaggaacagctgcggaaacagtgggatgtggtgtttaatctctggcagcaaacgattagagagtttgagacagcgcagcaagacctgacggcggaagaaagggaattgcgcaaggaaagggaaagtttcttggtagagctggcggggctggataatcagatcaatgaattgaccttatctattcggcaatatacggaagaactcggagcattcgcagcccaatatgggcaggatgccgcccattctccggcagctgcgctgcagcgtacggtctcagcggccaaaacgattcttcaagacattggagacttggaagaacagcacaagcaggaagagattcggaagctggcactgcataagagtcatgctgagctgagtgagaaacggcgttcttatgagcgtgaagcggacgagcttggggttctgcttgagtcacagactcagaaagaatcccaattatggtcacagctcgttgtactgctggaaatgtatgaagagcataatcgtttaggagctactggcctttttgaagaacaagatgttatcccggcacgttttatccgaaaaatagatgaagtagagcaacagactaaacgttccagaagggattactataatcagctcatggatgtggaactacagaaccaatcctactggctacccaattcagatattctgacggtcaaagatacactcgattcgttaaagattcaatcaacgctaggtagttcctacttaaatgaccgtccgtatcttgaacgtgaggaagaactggagcaatatccgttacttccatatagtttgattttgacccggcgcgaagctgataaaattcagccggaactgatgaaggacaccttgctgaaatcagcggtgccgatctttatccgtgaagagatggcagcttcgcatcaagcatccttcatgctttttgcgaatcaagggccgcaaatggtcttgcagccggatcgtttccaggattggaagagtagtattcaggggaagctcaaagaacaggagcagatccttcaggactctgaagcttatttatctaagttaaaatcggtgcgtcaggaatatgaacgtttattccaaaacgagaataccatgacgcttacaaccaagcatgaggcccttattaaactgcaggctgaacttcagcagagcattatcaatctgagcaatgagatgaatgagaacgaagggacgcttacccggatcggacgggagctcgcggagaacaaagctctaagtgtggagcatgagcagagagcgggggttctgcaagcttggattgaacggacgaagaaacaggaacaagattataaggaaaaacaaaaaataatcgaacgaaagaatctggtgagtaaagagttagcaggtaaagatcagcagcttgaacacctaaaggtgcaaatggaaagcttgagcggacaacgcaataaatggacgagagaaaccgaatatgcgatgttccctagactgcaacgatggtttcctgagattgttttcccaacagatcgccagctttctgatgaaggagaagtcatacctgtagatcctgtagagcagaatcttctcttgcagcagctcagtaccgttgaaagcctgcagcaatcacttaccgaaaatgagctggaagttcggacaagagctgcacagattaaggcagcaagcgagaatctggctgagcttgaatccagcctgaatcaagtagatgtgaattggcggaaggcgactgaacctacggaaacgtccgagtctattatggctgcaagaaatcgccaaaagacggatactacttcgttagaggaagactatcagattgttcacgacggttacatccgctgccagactgaattggagaacttgcagaaagagttgcgcaaagtagagaagggtatcaaggagaaacatgaacgtgccgtggagctttggaatgaggcgctagaggataaggagacagaaattcaggagcgctgccaagcgaatgagcttatgcttaaccagtgtaaaagatccttggatcgaatggatgtcctcatccagactttatccaatcaaatcaaaataatgaatgcgcatattgaggatcgcgtcaacctacggagtgtaccagaagaaataacgctgagggttagagaaagctgcgagcctctagtagccgactggcttctccgcatcaaggatagccggattagacaggatgaaatctccaaaaaggtgaaggaagagaaaaattcattaaccgaaaaacttgcgaaaaatgaacggaactccgaactggagaccaagattctagatcgattgaatacggtccattgggataatttcgctattgcactgcaagtcctagattccatgctacgcagttcgcgtgatcagatcgagagcattcaaagcgataaggaaggcatggatctctcccgcaagatgtgggtaggccgggcttctctacgtgtggtacaaatcattgatattatgaagcgaatggaacgccggatgattattcataacgagaataattatgccttcccgctggtacgtctgaattacaagaatatcaatgtgccaagaacaagcgatgaggtagagccgatggtgagtgactacttcaatcaatgtatcaatgaattgctcaaaaagtatccaaagatagaacaagtgccggcactggtaatcaaagaggttattaatgacggacgaattgtctatgcggcgctgcagaaccgctttccagttcttcaggtgtataaaccggtaacggagaattatttcctctacgccgcaccggaagattatcattattcggactgggagattattaatcgcggcgcactggatgaagctgtcggcagtggggggcaacgtcaatctgtacagctgctggtcgcaatgatgatcatgacgcataaacgggtgaatcgtgagaataaaggctggacggtctttttatatgacaatcctttcggagaaatggtctccaataacgtgcttgaccccgtcttcgaaatttccaaggcactcaaattccaatggctgattgttacgccgccggagcttgtcaagaatgatgtcagcgtgcgttttggcgtgtattggcagctttattttggaggcgtcaaaggggacatgctggaatcaaccctgatcaagggaggaagaaagcttattcctgtctcgttgttctga

SEQ ID NO: 52264 - DNA, 1455 bp, Paenibacillus sp. FSL R7-277
ttggagaagctggatcaaccattaatttcaatttttcagactgacgaatccgggccggaaatgcaccaggccttaagggatattgctctgttgtcaggggtattgaatgatctgggctcccagaactttctgcagacgcctatcgaaattttacggttcttacgtattattcaactgctcaatgaggaggccctggggctggatgaaccgattgagaacgtagataccctgtattttcgttaccggaaccgctatgaggaccttgacccgccaagcaagaaaaaggttgaacagattgtaaatgtcctggtgaagtataactggatatccaaacaaaccaggcagctaaaaatgcgtgatgtagggaagcggatgatggatacgctcatacggcttgctaatgattctttagcctattatatgcatgatgatattggtcgatcgttattccaggccagacgggatgccgagcttagcgaagcctatgatgatcatggcatttccggcggtaacaaaattgccagtatgattcgcaacgtggaaaatgctatacaattgatgaaggaacgtgaattagaaatgctggcggaccgtaatgcactgcctcagttagagattatccatcagttgatgcaggagctggagatgaagctgacagagcgtctccgtaagtttcatacattagaggacagtctggtgctcagtgatttaatgcaggcaggaacatctgcgcttgccgatggcacgaatctgagcatggggatgattaataaatatctcaaatttacgatgatgaagcaaacgatgctcttgtcctcgattaatcccgaaaaagttcggatgttcattactcaaatgtatgacccgcctccagaatcggacattcctaatgctcatcagattatgagctttatggagcagaatgaatacgagggggagtccatggatggtctgtggatgcctgttaaattcgccgcgccgctgtccggtgcagctattagtgaagctattcattatcttgaggactatgagccgctagtggatcgaatgcaggaagatatccaggagacccaatatatccatgaggagattgatattacacaattagaggatatgatgggagattcagcgtggttgctgacgaaatctatgattgagacggacgccattgaaggattcatgcaggaagtggagcaagctccgctagagacggtaatcattgaagcaacatctgcggagtggggcgatgcgattaacgcacttacggcgttatctgcgttagtaggcagcaagaagctgacaatggaggaagcggcagcggaatcagaatccgaagccccccgatatgacaaggaatgggactggatgaatccgaaggatattaatcaagtcgttaagcataacaaagcttcaatgaacaggcagaagaggagtgacgatgagcttgacggatga

SEQ ID NO: 52265 - DNA, 675 bp, Paenibacillus sp. FSL R7-277
atgagcttgacggatgaattaaatgtaaatccgcttaatgtcatgcaggcaatcaaaggcatgctaaccgaggcggaagagatcgtgttcatgaatcttttattctcatcctctgcaacaatacgtgtgggcaatttcggcttatcccggcgcgaggtagagaagcagttaaagatatctaatgatgatgagcagttcaattcatttttaatgcgggttaatcaggcggtaagccggtattttaaagtaatctatgatgtgaaaagagatcaggtgatcgtgatgatgcgggttcctgcccgatccgcacgcagtacattgtccaaagaaagtctggccattctcttgtttatcttttatcagcaagaagtgttgcagcatgagttcacgctattcgatcaattgttaaatgctcttggacatgagacgacgaaggcaaatcagcgtttgattctaaatattgaccaattgaaaaaaatcggggcactcgaagaatatgataccaattcaaatgagaaggcgtataccatcactggaattggggctaatatgttctcggattcctttctgcggcgtacggttgaattcagtcaatccaatcaattaaacaaagaggaagttctgaagtttttcaaacgatataatctgtatcaggaaggaactgacgaagcataa

SEQ ID NO: 52266 - DNA, 3222 bp, Paenibacillus sp. FSL R7-277
atgataccttggaaaatgtggtttactggcattcgggattatcagccaacgatgatggacttgtcaggacaagaatcacatatcttgatcaccggcccgaatggagcagggaaatctaccataacgtactgcatgggggttgttttgtattcttccaaggtagacttagagggtctgaaatcccgcaatctccttccggatgatacgtggaaagctcacattcggctattgtttaagaatgagggaagcgtgcgcatggatgcccctgcctttatcgaattctcgatttatattgtgcaggaacctggacagccggccaagaaggaatttatcattcaatcgggggatgatccggagcaatgggatgagactattaagtatacttcaggtgaccggcaatacaatttcactacgtacaagaaggacctccagtacaaatacaaaattgatcccgacctgttctacctgatttggtatcagcaggaggttaatcaattcgcggtcatggacccgcaggagcggtttcgtatttttgctgaaatgcatggcattaatcaggtacagcacaactgggaagaaagtatggagaagttgaaggaagtgcaggagagtctaagaacagctgacattaacgtttccaataaaaagcaatggctgggaattgctaaggcagcgctggaacggtatgaggataatcgcaagcgtcttgtacaaggaggccggatgtacgctggagcactgctgaaattagaaaccttttataagcaggaacaacagcatttattagccaagcaagaccaattgctcgtggaccaggaagcaacgaaagacaaccttgacctattacaggagcaagccgagcggattacttatgagctaacgcaggtccaagcggaaaaagagcagattaacgaggaaatcactttattacaggagaagctatctcttgttaataatgaaataaatgaaaccacgaacgttattaatgaattgaaccaccagctgaaggagctgaatcaagaaaagtctggaattacgcgcactgaagaagaggtacaggcgcagctcgaggcaatcactttacagcttcaagaacggaatcgtgacttggcgaaggctgatgcagacatccaggaatccgagggtatgatagcgcaattaatgaattcaagctatattctgcatgcgcagattcagcaggataaggcactggagtatgaacaccagggacggttatggcaatatcacagcagttatgatgtggataagaatattgcagcattagagcaaagaattcgagactttaagcatgaacgagataagaaggcgaagctgcttcaggcattaacggaagagggatttcagcttgagcataatcaattatggtcggaccgccagagggagtcacttgcgctatttaaagcgaatggggtgcgtgcttataccttaaatgagctggttgaattagacgagtccgcccggcccgcagcagaggagcaattcgaagctattaaatatacagtattttttgatggtatgcatgtacaggctccgaatgatttgtatcatgttcctctgcgaagtattgtgccggatcgatcggttactgacattcaggagcttcagattcatgtgaaaaaaggcatcagtgatgatgtattcccgcatgcagttaaagctctatggtgggtagagcaattctatcaggcaggagaaatacgtgtagagaacagtctgctgattgatccgagggggattcgcgggccacaggagaagaagaactatatcctaagccagaaggctctgcagaaacgtaaagaggaaattcagaagaacattagccaattaaatacagtgcttgcggatatcgaggactccattaagagtgatacacagactatgcaggaattgcatgcgattattcaagctgttcgtgaatccgaagctttcctcaccaagaagcatgaacgtgaaggacgggctgcgaaatatgcacttgaagtgctacgtcttgacgagcagaagcagcagcttcaggaaataaaggttgtgcacaaaaaaatcctcgagaaacaggtcaagctggagcatacacaggaaattttgcagcaggaagcggatttttatgtgcgcttgggacagcagaaggaacagtatgagacgttgcagcagaagacaaagcaccgccagagcttagccgcgcaacaggatatgataaagcagcaatctgacactcttgaagaacagcttgatcgtatagagggtaatgaacgccgacaaaaccggaattttgccaagaatcaagacgatgttgaacaggtaacgcgtacgttgcagcaaatgaatatccaattaaaagatacccatgaggcgcttgagacatcacaaataaatctgcttacggccatcgaagaaattgagaatttcaaaggaacagcaccatttatttatgatgagctggttaacgagcctgcaccagaacttagtaatgtgaaaaaaacgcagtcgtttaccaagctccgtcaagaatatgagtccgggaaggttacatttgataatgccaggtatgaatcgggtctagaccctgctgcacctgagaattacaaagtcattgaagaagaggttcaccggctgcaggatgagtataagcggacaagcttattgtatgaagagaatcaagaacgggctgagacgctcagggatcaattggagacaaccattaatatgagagtgcttgaaattcagcagcgattcaagaactacatgagcggttttcagttcgaggggcagattgattggaagcagcaagaggatcgcaagggacgggtgctgttccatttattcataagagcccgtaaggaagggcaccggggaacgttagaggatgtcagtgtgaaggcacggggaggaagagttggtaagggtgtctctggcggggaggagtcgcttagttcactactgtttgcactcgctttgttacagaatctgcaaacggcaccggggtttattgtgatggatgaattcgatagtgcgttagatgagcagcggaagttaaaagtatttgatctctatgcgagcgagctaaagcgcaaattaattatcctatctccgaagtcacatgagaactcttacctggaccgcttttccaaagcctatattgtgcaacatgaccctaccgtaccttggagtaaggtgacggggttgattctaaagcgtgaatga

SEQ ID NO: 52267 - DNA, 1308 bp, Paenibacillus sp. FSL R7-277
gtgaatacttcagatgatatcctttcgtttataagccgaaattatttgaaaaaagatgagcaactggagatgccaacagtaataagtgatgattctcttgttgatatagatattgtaaaaaggactgcccgtacgctacgaagagtagggatcattacccttgcatggcaggatggcttaagtgctgaagaacctccggagcagcagctgttacgctggacagtggggaagcgtgccttattagatgacaatcaacaaacttttgactggctgagtaagggatggattgtgaaggaggtccggttcaagcaagacgggaaatcggtagaccggatatattaccgtatggggtatttattatatgttcaactgataaataagcaaaaagacacagaaagggatataatagatcaatttacgttttatcagtcagaagctgcccggagaatggaagaaataatgtgtgtaccgggcgaacggatgcttcagttaaagggtttgacagtattcttaacggagagtttagcgtggagtattactactctgaaggatctggctgttttccctgcgaattggagcgtatctaagagaattcattcattacactttttactggcttttggcatgatttcttgtaccaaagagatatttgactggaaagaaattggcgcgcggtattacccgggtattggaggctctaaggcatttgatctgtctaaaatagagtttcttaacatgctggagacgctaagcggtcagccagcggaagccttaggaatgataagcggagggcagattacacccatctatttcgcgggtacgattgaagggaaatggtcaaatttccaggcaggtcctgtccatgccttaacaaatatttccgtttcccaagacgagtattcaaccgcagcaactacgctatggttagtcgagaatcgggctgttttgacgcggatgtcagcagaaccccatttcctgcaagagactaattctataattgtatgtgtagacggccatatccggagtttgcaccggtattttatcaggcaattaatgaatagtagctcaatcggtcaagtgatcttgtggagtgattatgatgaggcggggctgcaaattgcacgagaaatgtaccagtcgcttagtggacatgatgtgcggcataaatggatctgccctgatcactccatactaaccagttggccggagtatcaaaagcgcatggaggatttgctacagtatatgaagttggaacaagagattgtgttaggggaggcagaggattggagaagctggatcaaccattaa

SEQ ID NO: 52268 - DNA, 1524 bp, Paenibacillus sp. FSL R7-277
atgaactggaatgatttcggagaacggaacaagcggctgaaccccttgtggagtctcggtgcaggcatgaatctgggtgagctgcagccgtataaggaaatgattgcgcttagtgtgctgctgcaggtctattatctggagctggaatcgaacgaacagcgggccagggaggacctggtggatctggcctggagctcgttggagcgcttcggcatagagaagctcggcagcccggaatcggttgaacggctggtagacggactgctgtggagcggcagcggcggggatttcgagtcccattattacgatgatcacacccggcagatcggggtccagaaatacaagtatttcactgtggacgaggatgctacgcgtatcagctgggaggagaacgggacgaccatttaccggctctccgagtatgcgatggagctgatcttcatgagccacgagattatcgatgagttccaggtcagcatcaagctgctggagattcagatgcacatcaagcatggacgggttacccgggcgatgcaggatgtgaatgagctcatctcccgcgtgcgcaaaatgactcagcagcagcaggaataccgcaatgccctgcgccgtaatccgaagcatatcttcagcgaatacggcactcagcggcacgagcggctggaggagatccaccagcagtttgacgaggaacgtaagcatttcgataatatccaccgctcgctggcccggctggccaatgatgagaaggatgtcattgatttcaatgagctgcgtcagctctccgagcgggtggagctgtcccggcgggtgcatgacgagctggccgaggtcgtgctgagcatcttcgaagcggagacgaatctgcggctgaacttcccggaattattctggggagcagcgggctttaacttccgcacccatgtgtgggaggaatgggtgaagcccgaagggctgcgggatggggatagcctggagacgctgatcagcgggctgttctcgcccagccaggatttcatctatccgctggcctgggcctgggaagagcaggaggttggcttcctgccggaggatacgccggatgtgacggaggaagctggggaagacgaggacatccattatgtgcccagaggtattccctggaccgaggtatgcgagctgtggctgccggtcatagccggagtggctgcgcacggcagcttcaccttcactgccgaggtgttcacggagcaggagcaacggcgctgggcggattgcccggatgccgtggatttgtgggtgcaatttttccataccgtaattactgtcgaggaacaggaagtagagggccacggggtggcagacgaatgccagaagctgcttcagcggctgatgctggaccacccggagcttgcggtgctgcgcggcgcaaggctgcggaccaccatctcttcacagcagcaggaccgcatccgtatccctggtcttgagatcagcccttataccattactatagtagagagaagtgagatgattcggatatga

SEQ ID NO: 52269 - DNA, 759 bp, Paenibacillus sp. FSL R7-277
atgagttattccctagagcaagttcagcaggcttcccggctgttcttcgacctgcttaagcgcaaggtgattccgctggatgatcccgctgccgccgaatgtctgcaggataccgccgcttatgatgccttgcaatacgtagccaaagaagccggctgccggattatgaattccggtcaccgcctgcacctgctcgtgagtccgatcggctccggattcgccagcaacttcactcagctgcgcaataagtattcacggattgagcgcaagacgcatctacatatcattaacgttattatcctcgtctttctggcggagatggaccaggatgagcagcacttcaagccgggacaggacagcatgtcctatattcagttgtcggatcaggtatccgagctgttccaaggctggatcggcatggatgaagacggcagcttcagcaagcagtggcggctggatatccaggcgatgcacagagtgtggaccagcctctatatgcagacccgcagccaggaggagggtgattcgctaacccgcggcgcaggctcacggattggcctcatccacgaagggatgaagctgctggaggaggagcatctggtgttcatttccgagaatgagaagcggattttcccaagggaagagctgtacgagcggatgcgttatctctaccacgatgtggaccggtacaaagagctgaaggctctggttggccgcacactcagcgaacaggaaggtgaagcccatgccgcgcattga

SEQ ID NO: 52270 - DNA, 4524 bp, Paenibacillus sp. FSL R7-277
atgccgcgcattgagcgaatccgcatcgccggactgaaatacgagaagatgctgaagaaatatgaggatatgatccttgatctctgtaatgaagaaggtccggccaataccctgattacgctgatgaacggcggggggaagggcgtgctgctgcagtcgattttccagttgctgatgcctagagccgcctggggtaaggataatgagaaccaggtcgaggccttcttccataatcacaaaaaacagctgaagccctacaccttccacgtggcgatcgaatggcggctcgacgataaggagcggacggagtatgtcaccaccgggatcgcgatgactgcgcagcattccatggaccagcttgagatcaaagtggattatctgctatacgcgctgctgaaatatgaggagacggctgagcttacactatccaccctgcccttatatgatcatgagctgaatacgcctgcgagcttcgaagcgattcagcagtttgtgcgggaacggcggggtgagattaatgtctacggcagcagcagctccgatctgaagaaatactatgcctacctggctgaccatgatatccatattgatgaatggcgcaatatgcgcagaatcaacggggaagagggcggcatcaagggctattttcagaaaaatgacgccttcaccaatcataatctttttgagcggctgattattccagagattggttccagtcttgggggaagtatgcgcgaggatgaaggctctcttcagcggatgttcgtggataccgctacggttgcacagcggctgccgatgctggagcagcgggagcgggcttttgccgagttcacctctcttgcggctcctctgtatgaagcggtgaaactcggaacggaggcggacctcagcttccgggagaccgagaggctaggagcgcagctctataccgttattcatgatgaactgaagcaggcggaagacaagcgccgcagaacggcggatgagctggccggacattatctggaagcgaagacgctcagattcgagagcgataatctgaagtacctgcggctgaaggaagagcatgacggcaagcaggagcacttcagagcggtctcggacaatcagacacgggccaagcagcgtctggaagaatccaagcagcgggagaagtcgctggaggttgcccattatctggcccggcgcaagctgcagctccgccagatggagcagtggcagaaggagattgaagccatcgaagggtcgcttgcgatgaaggagcgccaagaggtgatacaaggggccaagcaggagctgcgggtacagtgggagcaggtctaccggctatggcaggcgaagagcctgttctacagcggacagcagcattctcatgcagcggaagaacagattctacgcaagggcagggaggaattgttgctggagcttggcaggctggatgggaagctccaggaattaacagccatgatccgtcaatatacggaggagctgggtgtgttcgcttcccgccacggacaggaagccgcccactcaccggcagccgccctacagcggacgctgattgcggccagagggctgactgagcagattgaggccttgaacgaacagcgtaagaccgctgaagaccagaagctgctcctgcatacgcagcatacccggctggctgagaagctgctgggggccgaggcccaggcagaggagctgagcggacgcatcgaagcccagatgaacaaggaatcacagctctggtcacagctcgtagtgctgctggagatgtatgaggagcatcagctgctgggcgcgacagctctattcgaagcgaagcctctaatccaggagcggttcattcgcaggctggaggataccgagcagcagacgaagcggctgcggcgggattattatcagcagctattggatgtcgagctgcagcaggaaacctactggctgcctaaccatgatatcgtaacggtgaaggatacgctggatgccctcaagattagctccatgaccggcaccatgtatctgaacgatcagccttatctggtccgcgaggaggaactggaacgtcatccgctgcttccttacggcctgattgtcacgaagcgtgaagcggataagctccagccggagctgcttaaggagctcctgcttaaggctccggtcccgatcttcgtgcgcgaggagatggcggagggcggtacagacgccttcctgctgctggcgcatcaagggccgcagatggtcttgcagccggatcatttccaggagtggaagcgggggatggcctccagactccgtgagcaggaggaggagcttcaggcggaggaagcgtatcttgccaagctgagatccgcccggcaggaatatgaacgcctgcatcagggcgagcataccgcaagtctgcggattagacagaagagtgcagagaccctgctgcaggagcttcggagccagctgaatgaaatgaatgcagaacaggcacgctatgaggaggttctggctggaatttccagagacctgtcagcctgtgaagcggagaagtccgagcaggagacccgggcggcggcgctgcgggagtggagtgagcggagccggaagcacgagcagaactatacagacaagcacaagtctgtggaacagaagaataatctcagcaaagagattgcggtgaaggaccagcagctcgaccggctgaaggcggagatggacagtctcgccttgcagcgcgagaaatggatcggggatgcccgctattctgtattcccgcggctgcagaactggttcccggacatagagttccccggtgaatttgcgggtgcgaaggttcagggtgctgatgctgaggcggatgttaaggcagatgaagctgctgccgatgaagtactaaatgaggcggtacaggacaagctgctgcagctgctcagtacggttgagagtcttcagcagtcgctaagccagaatgagctggagatccgcacaagaacagcccagatcaaggcggccagagaacagctggctgagctggaagctgctgtgcagcaggtagatgccggatggccgtctgcccctgagccgcaggagtcaccggatatgattcagtccgccagagtccgacagaagagcgacacgatgattctggacgaggactatcagcagctccgtgattccttcatccgctgccagaccgagcttgacagcctgcgcaaagagctgggcaagtccgagaaggcgatcaaggagaagcatgagcggacggtagagctgtggcatgagccgctggaacagaaggaagaagagatcagtctgcgggtccgggagaatgagcatctgctgaataccagtaagcaggtgctggcttctatggatcaatggctgctcgttctcggcaatcagagccggatcatggctacccatgtcgagcaccgtgtgccgctccgggaggtgccggaagaattgccgctgaatgtgcgggagagctgcgagacgctggtggaggattggctgcagcgcagcaagaccagccgcagccagcgggcggagatctcccgtaaggtgaaggaagagaagactgagctaagcggcaaggtggccaagtccggctggaatgcggagcttgagaccaagattcaggaacgcctgaacaatgttcactgggacgatttcgctatcgccttgcaggtgctggattccatgcttcagagctcgcgtgatcagatggagagcatccgcagcgataaagaggatatggagctgtcccgcaagctgtgggtaggccgggcaaccaagcgtgtggtgcagatcgttgatattctgaagcggatggaacgccggatgatcattcacaatgagaacggccatgccttcccgctggttaagctgaattacaggaatattaacgttccacggacgaccgatgacatcgaaccgctggtcagcgagtacttcaaccgctgcatcagcagcctgctggagcggttcccgaagatggagcaggttccggcttcagctgtcagagagctgattaacgatggacgcatggtgtatgctgcactgcagaaccgcttcccggtgttgcaggtgtataagccggtgacggagaattacttcctgtatgccgctcccgaggactatcattattccgattgggaggtcatcaaccgcggcgcgctggatgaggcggtgggcagcggcggacagcgtcagtctgttcaattgctagtggcgatgatgattatgactcacaagcgcgttaaccgggaaaacaaaggctggacggtcttcctgtacgataacccgttcggtgagatggtctcgaataacgtgctcgatccggtcttcgagatctcgaaggcgctgaagttccagtggctgatcgtcacgccgccggagctggtcaagaatgatgtcagcatccgcttcggcgtgtactggcagctgtattttggcggagataaaggggatgccctggattcgaccctgatcaaaggcgggcgcaagctgatccctgcttcattattctag

SEQ ID NO: 52271 - DNA, 1596 bp, Bacillus weihenstephanensis FSL R5-860
ttgaacacgaacattgaatctatgctagaaggttttaatgagcgaatgaagcatgtagcgatgttttcacccatcctgcgattagaacaaccaacgaagtttaaagaattgcctattcctacggttgctctctatatacttctttatatgctcgaaaacaaactagcatttaataaaaacacgacaaaagaagaattacaatatgtcattttagaagtggtccgacgatattggaacaagaattttaccaaagcagacgcagacgagctcgaagattggttggtttctaaaaaccttcgaaacagaggaagagcccacacatttacgtattacgatttcaataaaaaagacgaaaaaacttattattttcatctaattgaatatggagaaggaatgaacgtttttagtgatacagaagatcgtgtagacgattttacattatcttcaacgggattggagctgctattcaaaacgaaagaagtatttggagaacttcaaatcactatttctcaattattcttcaaacgacaatttgaaaagggacttttcaccgatgctttaaggagagttcacgaaatgcatacgttgatagaagatgaaaaaaagaaaataaaaaaattacaaaatactattatcaaggatgctcttggtgtttctcaacgttctgaacttgaagtcatgataaaaagaattgatgaaactttaaaatcagaacacgaacaatttgatgatttaagaaaattggtagaagaaaaaattgatgaattctatgaaggtagtctaacagaaaaagaacaagaaggaatccatataatccaagaaattgaagggaaattacttcaagcaattagtgtgcatgaatccttatttactgaaaaacaaaaaacacaaaatattatgagcgaatcacttgaatcttccatcattcacgcattttcagttcatttagattttgaaaacgaaatattaagggaactaatagaaacccctgctacagaagaagtattaaatgctatttctaaaccatttctacctttgaggcattataaaacgtttaatccgctacttgcattagttcctcaaaagagatacaagaaaaaacaactaaaagaagaagaaattgttgaagtagatgaagaaaaaatgaggttgcaagaggaagaagaagctaggaaaaaggaagaaatcgaaaacaaagaatatcgatatataactgctttattgaaacacttggttgagaaggataagtatctattaagtgatattttccaaatgattgaaactcaagatgaacgtctttatgaggatattctgtacaatccagatccactgttggggttaattgcagaactacatcagtccgaatacaatcgttttgaaaaagtgacttcagatgtgtggaaaaacctcccggatgataaaaagattaatagaatgttaataagactatcaaatgaatttgtaacattacaagagatagaatcctttagtttattagaaacaggtagatctcactatatcggaactatgaaatacaaggatatgttaattacaaggggtgatttttatggagtggacagaagaaatcgtaagtaa

SEQ ID NO: 52272 - DNA, 753 bp, Bacillus weihenstephanensis FSL R5-860; identical to SEQ ID NO: 51701

SEQ ID NO: 52273 - DNA, 4374 bp, Bacillus weihenstephanensis FSL R5-860
atgccacgattgatgaaagtgagaatgaccaatatccaattagatgaagggaagaaaatcatctcaaacagcttgtgggaaccaaatgccaaagatgctctattcatcttagaaaacggcggaggaaaaacgagttttattcaactagttactcaaaccgttcttcctaactccaatttaagcaaacgtttattaaaagaagtggtgtataaaggtacaactggtcatattatgacggaatggaaactagatggagaaaaccttccgtacaaatacttatgtttagggtttacttatatgaatggggaaacaaaaacagaagaattaaattatttcacatatttgttcacctataacagaggggacacattaaatattgatacccttcctaccacagtaaacgggaaagtaacaagactaaatgaataccgtaagtttttaagacaaaatgatattcgtatatttgacgtcaaccgtgattataaaaaggaattaaaacgatttcaccttattgaagatgaatggaagatgatacaaaagattaatggagatgagggtggagtagataattacttcaaaactgcatccagcacgtatgacttattagtgaaacttcttatcccagaagtcgaaaacactatatttgacagtgaagaaaagaaaaaggaaatccaaacgtactttaaagaatacagtaaaaatctattaagtattccggatatgaaaagagacttggatgatttccaaaggataaaaaattgtgctgaagacatggtaaaagcggtagaaaactttcaagtaaaaaagaaatcctttgcggaagcacaaaagcatgtagttacgttaaagaaaagcattgaacttcaaattgcggataaggaagaaaaaattgatatcttaatggatgatatcgagaaaaatgaagcattgatgtatgaagcggattggaagattgacagctataagtctcatattttaaaaggacagatcgaagcaaaagaaatagagctagttgctgctgaaaatgaacttaaaataaaaacagaacaattaaaacaagcaaaagcattactacaacaattggaagcaaaaaaagaatatggagattatctagatattcataaaaaggtactacagttaaatgaagacatatcttctttaacagcaagtaaaccagagttagaaaagagaagaaatgaatctaaaactctcttaacagaggcgttaaattttctcatagaagaacaacaatttgctttggatgatattaacaacaacatcaaatttatgatagaagaagtgaatcttaaagacgcagaacggaaacgattagagaaggaaaaacaagatttatatggagagtacaaggatgcagaaaatcatttgaataattaccaagaaggtaaacaaaaactgatagatgaattaggagaagaagccggatatgatccatctgtcacgttcaaatcactacatgaacaacaactacaatcttcagtgactattgcccaaaaagaagagaaaagtcgattaaataaacaggatatggatgaaaaacgtgagtttgtaacgggtcaaagaattgctatagacaacaaaaataacgaagttacttcgttaaaggctgaacataccacatttgaaaaggagaaatataacttactttcacttctttcagacgatgggaaaaatacgataaacatattcgaagatatgcaggagtttcttcggtattatcaatattcaaaagtggaagcggaacaaaaaatagataaacttaaacagtatattcatgatttagcaaaaaaacttagcctttgggaatcacacgatttctttgttcctgatgaaactttattaaaggttcaacaacatctagaacaaaaaggtgttattactatgttaggtagtgaatggctatcggaactttctagtgaagaaatgaaaagccagtaccttaattcctatccattgcttccttatacgttattggttgaagaagcaaacttaacagaagtcaaaaaatccttgaatagcttgaataaagaactgttaaacgtaccgttactgttttatgtaaagagtaaacttcaaattcaaacaaaatcagtagatgcaaaaatagatgaacttttccctctatatgatgagttatatctctatcatcagttagatgttcagtggttcgcatctagagctaaaatccaagaaattattgatgggttaaaaatggagctttctcaatataaagaacaattaacttttgcacaaataactctcaataattacaatgaaatattaactgcattagaaacattccatactcgttattctagtacattctcggaatccaacatgcaagctgtccagaaattatcagaagatataaaagagattcaccaacaaataaatgataccaatgaacatattaagatgttagaaaatgagaacgaattaattagtaaatttatctcagatgaaaaagtaaaaatagaaaaaagagattctcatataaagcgttttcaaagctttatggacctttactcaaaccccgaagagctagttgaaaaagtaaaatatttaaaagaccaacatgaccaatacgggacaaaagttaatctgtgtgaagaggaagtaatagagcaacgtgaaacattagatagacagaaagataagaaacgaagcgttgaatctgttatggatggattagataaagaaagaaaacaccaccaattggacaagaaccttgaaccttctgatagttacactagtgaagaaaagaatgagtacgtagcccgttttactgcagttcaaaaagattacgcggacaaaaatcaagcgaaaaattcttttgaagaaaatctttcagataaaaaaaatgaacttctaaaatctgaaaaacgaatcaatgatatcggatttactctagaagaagttaaagtgttctattctcaagaaatcaatctagaagagttaattacaaaacaaaaagagacagttaacacactttctatttctgaaagggatattgagatcgaaaaaggaaaagtaggagaaaatctaaaagagaaaaccaaacaattagaattagctaagaaggagattgatgagaagtacggaagagaagtattcctttatgaatgggagcatgaagaagaacttaaccgtttcaagcagtcaaaagaacaattgggcgaagctaataaagcacttgtaactaagaaggaattgttaagaaattctataatagatgctgaaaaagcaatggtacatttgcaaattgaaaatcttcctctatataatgaaagattcggtttaatacttgaagaagaaattatttcaaagtcaaaaacatatcaaaaatatgcacaaactcatgctaatgagcacgtaacaaagttgcaaaagtttaaagagggcaaaaaaggtgtatacctatcatttgaaacgtatttaaagaagattcaagaatctaataaccctaagactgaacaatttgcgaatggtttgtcaaaattgaaaacaagtgatcaaatatttgagttagagtttattttagaatcgtttaatcgcatctttgataccattaatgcctttgaagaagatttaaagcgaaagataacagaatgtgaaaaggataaggtaaaactggtagacttatgttttcagcgagtagaggctatttataagaacgtgactgaaatcccgaaattctccaaagtgaaagtatttggttatgaattgcaattgattaaaatgagatgggaccgttttgatgatgaaaccactcatagtaatttacattaccatgttcaaaccattctggaaaccttacaacgaatgaagagagagaacaaactagaaaatgaattgaatgaatacctagtacaaaaacttgatacagtggtattattagataaaattgcacctatcaagaaatgttttgttagtatatataaaccacgaaaaaaatcacttatgacgaccagtccagaaaactggaaaccttgggatgaagtttctaaatggtctggtggagaggaattcagttcctatatgtccatgtttatgatacttgtaacgtatttgcgtaaaaaagttaacgctagagacgattcttggaaagtgattattgcggataatccttttggtaaagcttcatcagaacacgtagtaaaaccaataatggaactagctagaaatagtaaaatacaactgttttgtctaacagctcataacaatgaagacattcgttctcattttgaatgtgtcatgagtaatcgttattacaatacagtaggtattgaactacttcaagtggagcatagagaaaaaggggtttcacttggaatgtttgcttatgagcatgattaa

SEQ ID NO: 52274 - DNA, 1077 bp, Bacillus weihenstephanensis FSL R5-860
atgagaaaatgggaaacgtttatcatagactatatgaataaatctaaaaagacctttgtgaaaacgatagatattgaacatcatcttaaaacattactcaaacaagaatatgatgacgatggtggatattttaaatattcttctacgttgaagaatatggtagaagaagagaaaattcaaccagtaaaagcaagaggacataaccatcagaccccaccggtatttaatgaatatagattagtaaaaaaggaaagaagaacgaaccccactcatattaaaaagttaatgaccgattatccattgttcaatatgactgctttttatgatgaagcagaatttgaaaaatggaagttctatatagatcgagtccatgcttttctcacacaaaacagtgataccaaaaataatattttaaaagcaaatgaacgttcttttgaactattcagaaatgaaaagtttcttttagataaagaaggaacaaaatttttagccaatttaggactcactctatcggatttaaactgtcgaagaacttatgaaccttttgtagagtaccaaccaaatccctcaaaaaagccaaaaaacattttaattattgaaaatagagatacctttgattcgataaaagagttaatgatagatggcattgatacatggagccgaattacctttgatatggtgatatacggggaaggggataagatacaaagaagcttctatttcttagaagaatacgagctagaagattacgaagtctattactttggggatttagatgcaagagggattcatatttgttccgaattaatcaaaatagataatagagtaaaaccatttattcctttttatatagaacttttaaatcgttatggtcatgagccttcaacgagaaccatcgaaagaaaattgaaacaaactattattgacgattcgttaaaattattttcatctttttttgaaggtgattatattgatgaactcaaaagatataccgatattattcagaatgttcaaatatatatcccgcaagaaggtttgaatttagtgattctccgtaaattaggggaaaggaggtag

SEQ ID NO: 52275 - DNA, 1002 bp, Clostridium straminisolvens JCM 21531
ttgtaccagagaaatgactttgaaggaacttctttggattgtcttaaggattttaggcagagaatgaataatctggcaccttttatacacctagcgcgaaagctcaccggttttcagaaatatggcgaagtagacatgatttccgtaggattttctgttttgctttttatattggaaaatatgctaatcgggcgagaagaatgcagcattgacaacattgccgattttttgcagctccttttaaaaaggtcctatgatatcaatatgactcaggaagagtcaagagaaatggcgttttacataagggattcaatagcaggaagcggcggcgaggtagttgatttcaagttccgaaacttagagaccaataaagacgaatccatttcgataaagcttattgatacttcatattacgagattaaaaaatctgcaagatataagcttacagaccaaggtatggagctcctctttaaaactcgggaaatatatacggaatttaggattaacataacccagctgtatttaaagcagcaaattgaaaaaggaatattttccggggccttgcagactgtaaacgagctgaatctccaagtaagacagcttcgggaaaaacttgaaagcctccttttgaacatacggcaaaatgtgctgggaattgattttgaagatttaaagcagcttttctcaaggataaaggagcaatttgagattgaaagacgggaatttggaaatataaagaggatattaaaagagcatagggaaaacattgagaaaataaactattttgagcttgaggaagatgaactaagaaagctcgagcaaataaaagtgctttcagaaaaactcaatattacaaccgccgaacatgacagactatttagcgaaaagcttgacattgtaggggagtacttgaaaactatagaaataagcttcgccagggagtcagcgaatttattgactttgaaaaaagtatctttgatgtatttatttcaaaaaatttaa

SEQ ID NO: 52276 - DNA, 714 bp, Clostridium straminisolvens JCM 21531
atggagaatttctcgcctgattcggtaagaaaggcattttctttgtttatgaacttgattgaaaaatccaaaatatcaaaaaaggatgaacctgaactgtttatgtcctatgaagatcctgaaatatcatatattatgaggatatttgaagaagagtccggaattatggtgcttcattcctcggacaccttgtattatactccgagaacggataacagatttttcggctttaccaacgaagagttaagggataaaatgggttttgccaacaatacggaactatatttgtcctacataataatcctatctatcattataaaattctttaacggcgagaactacaacaataagattcgcaccatgctgaatgtcgaagagctcgaagcatatataacatccaagcttcaagcggttgaagccatggaaaacaatgaagaaatcgatgaagccctgaattttaatttcaggaatatatcaaagctatggcttgatatgcctgcctatgacgaaaaaataaaaaacttcagccagtctaaaggcactagaataagctatatatacaggaccatcaaatttcttcaggaacaagggcttgtaaatttagacaatgacagtgaaatttataccaccgacaaaatggatactctagttataagctattaccccgaaagtaccagaaagagagaaatcctctctttcattgaaaggatatga

SEQ ID NO: 52277 - DNA, 1677 bp, Clostridium straminisolvens JCM 21531
atgccgagaataaacagatttagaattgtaaattttaaatatgacgacgataaaaaatgtatttcaaacgaagtgtttgagtttgatggaaaaaatgccctcctaaaccttgaaaacgggggaggaaaaagtgtcatacttcaattggctctacaggtcgtactgcccaatacaagcatgggaagcaggaattttagcgactatttcaaacccggagcttctcctacccatattatgatggaatggaagcttgacggccccattgccgaatatcttctgacaggtatttgtgtgtccaaaaattccgacgggcttagatattttacctatactcataaatataccttgccccatgattttgatataaaaggccttgaagcaataaatgaaaaaaagcaggttatagggtttctagagtaccagaactatttaaagaaacttatctctgatatgcggctcaatattaatatatactctcgtgaccgccagagggaatacagggacaagctttatacttttaatttgtttaaggaagaatttgaagctataaaggttataaaccagactgagggcgggattgataaattttttgaaaatgcgagaaagtctaggaatgtaattgaaaagcttattattccaaatattcctcagagagaaggggaaacttccggcatattggccgagactttcaaaaagcatctcgaaaacttaaagaacatacccatttaccagcataatataaagatgtatgaagctttttgcgagaaagcatcaaagcttctttcagagctttatgactacggtgtgactgtagatgaaataaataacatcagccgggatttactgaccctttcaaatcttataacaattgcctcaaacaggctatatgacgaaagtgaaaacctaaaaaacaatgaccgcgactatttggcaaaaattgaagagctttcatataaaacggaaagccttgagtatcagaaaatactcattgaacttgaatctttaaaagcaagacatgagaaagttttaagagaaatcaataagcttgaggataaaattcaaaagtgcaaagagaaaatcaattttatggaatctgctgtcatgtatcaggaagtcattagtacaagaagtgagatttcattatctaaagcacagcttgatgccctttcaaaagaaaaagaagagattgacaaagaatatcaaaactatatatatcatgcaaagattttacttgaggaagagataacgaaaattcaaaaaaccatggaagacttgaagaatcaaagagatgtgttgtcaaaggagaagaaggagctgggaataaaagtcaaggaaaaagatatcgaaagggatagtgtaagggacaatatttcttccattcgcacaaagcttaaggataagaaagaaattctaggccagctttcatcatattttaatttaagggatatgacaattttattagctccttcggaagaacttttaaattttacaaagcaaagggatgaacttttaagcaaaatagaaaatctcaaaaaagaaatcgaagaaataaacgggttaatggaagatttatcgataaaagaaaacaggataaatgaaagcacagcagctttgcgtcagcaaaaagacaactcgatgaaaaaatccaaatttttgaaaataaatactcaaaaataa

SEQ ID NO: 52278 - DNA, 420 bp, Clostridium straminisolvens JCM 21531
gtggtaaagtttatggaaagaaagcctaagcggcaaatttacgggataaatgtagatatgctgatttacggtgaaggaaagaagataataaatagctacagctttattgaggaagttgcaatggataaagaaatagagaaggtatattatttcggagaccttgattatgaaggcataggcatatacaactctttgtcattaaaatacggcaaggatttgatagtaccccatgtaagactgtatcaagagctgctaaaggcagccaaaaagcctcccaagcttaggacgaatcagtcggaagtacccttggagccttttcttgagcattttgacgaagagagcagaagggaaatagcagcaatactgtacgatggcaagtatattccacaggaggcggtaaaatttgtaccagagaaatga

SEQ ID NO: 52279 - DNA, 1428 bp, Klebsiella oxytoca KA-2
atggcacgccgcgagctgacgattcaatctcacgcgttgctggtagtgcggacgctggattcaatatacagcgccctacagcgcaatccgtttgatggcttcgagcttgatgcactggcggcaattatgtatctctttgacgccatgctttattatgctgaccgcgagcgccagccaggtatgacgcgtaaagaagctgagctatgtctggttgggcacctcaatgaagcctatccgggacaagaagcgtccgactacgcgcaagttgccagcaagatttttgcggcgatcaaagaccctttccgtctcagttattacgacttctcgcaacgaacgcattccgaagagcagatagtccgtctggtacgctatgaccagctatccggctcagatgatattctctggtcgctgactgatgaaggaatgctgttctataccctccgtttggatgaaacgccgatagaacgcgctgcgattctggcctggcgcacgcttaaaaccatccgtcgcggtgagatcgacaaggcagtacaccagatccaatcaacgcagcggcaactggagcaatatctgattgggatgcggatgaaagtgcgtgctgcccagtctggtgatttgagtgcatcttatgcacacgatatccgtcccgtactcaatgattcctttgataaaacccgagaggttttggaacatatccagaactcaatgtcggccattaccgaaatgctggttgaaggaagttcgaaattaaatcccgacaaattaaataagctacgtaaggcacaggagatttttgctgaggtctgcgcttttacgcagcgctatcaagactgcttacttgatgttaacaaagattttgagcgagctcgtctgaaactcattattcccagagataatacccttttccgggaaacgcttgaaaaaggtgtactcaagcccttgctgtctcatccccccgacactgtcgaaaaggaaatcgatggtctcaccgcacgcctgttggctccccgaagacaggatgatgatcggcacattctgtttgaccttgaggcgctgctgaacctttatctcgatagatttgaacaggcgcttccacatgagatacaggacctcaccgatcagcctgtagctattgaaaccaacctgcgaggtatccctgaatctgtcattaaaaaatgcagcgattgggttagtgaccgattgaagaattgggggcatgtgagctttagagatgttttcgacgcctatgagtgcgaagaattatccgaacaagaacaacaggtttgtttacttcatattggcagtctggcagctaacagcgatcccgcaatagaagtagagatagacgacgctatcgaaacaacgctctggcgggctaacaatatcaaactgttaatggtcgctcccttatacccctttgaggagtag

SEQ ID NO: 52280 - DNA, 4437 bp, Klebsiella oxytoca KA-2
atgtggctgattaagcgggtttatatggatggcgcaggccatgaagaagctttctacaaggacctcacactggactatattggcctgtctcaagcggtcggtagccctgttgttgaaggcctgcgctcgcccgtcaggaatgcgaaggtggtgaccagtacctatcagcagcttgtgaatgggggcggtaaatcaacctacatcgcgctgctgttatcgatttttgagccgtccgttagtgacttcacccaatatctggcaaatcatcgccagagtgaataccactaccgcaattacttctataaagaactctctgttgttttggttgagatggtcaatgaatcaggacaaacgttattactgggacatgctcatcagcgtaatggagatgatgttgaccgcacactgtttatttgtgatgcgcccgacgccctgatgggcgcgccgtttgatgaagtcccttcttattcccgcgcggaacgcaattctgagctacgtccctatgccaatagcctgcgcagctttgatagctggcttaatctcaaggccggtagtgaaggcggcatgcattggcgtaaaaccaccagacagaacgagtggcgcgcatttttgctggaacaacaaattaacgttgatcttatcaaaacaatggtgaccttcaactccgaagaaggtggcctgacccgttttatcgaatacaaaactgaacatgatttccttggcgcatttttcgcctgcaccatgtctaaagatgcggctgagcggctgcgggaactggtagcgcatgaagttgaacgtcagggagagttagaggggatccgtcgtaacgagtccttcctgaaggatgtgctggctaactggctggcgtttcttgatccggctaaacagctggaaagcatccaggcgcagcagcaactgctggatgatggcttccgggaagcaatgcgcgatctcgcagcctttgtcagggatgctcaggttgaacagacgcagcttgaagataacatggatagtttgcaaacgcatattggccaggcgatgtctctgcgtgagcagttaggtaagcgcagagcactgcttgaatatgatctcgcgcagcatcagttcgacaaacaaaaagcgatagtcgatgcgcttcaagacgaagccgataccaatcagcgccagattgagattactcacgctgctatagactacaaagcctatgctaaggcccagaatgagtatctccaggcagatgaagatctgaaggtattccaaagtaaagcggaaaggccgctacaggttattttcgagcgtactgcaggcgaagccttaggcacattagagtgggcaattgacaggcatcgccagcaggaggctacgcttgaggaagaattagggcagatggatagagaaagcaatgcccttaaacaatcatacgacgaactacaaaagatgctgggtggcctggaggcggatcgtgagagatataaaagagacaaacagcagggcgaatcgcaacggaatgaattatgtgaagctggattgatccagaaggatgaaacaccagtagcagcccaataccgactggaattaaccttacgcaatgcaaagcagagtgaagaactggctaatacaattcttcatcagaaagagcaggcgctggaagcacagctgaatgttgtgcgggaggcatcaattgagaaaagtgaggcccagcaaaaactcattctggctgaacaaaaacaccagtcagctgtggatagtgctttagttttagcaaaaacctatcaaaaactgccaacgtcaatgcaacatgatctagatattgaagacacgagttggcacagcgagcagtgtggattgcagctcgacaaggtattgaatgcgaactctcacacgctgaatggaatgaaagagcgtttactgcaagcccggcacgaactggacgagttaaggatgacgggacatgaactggtcgctaagcaggtcaatgaggcacttgaagcgttttatgcggcgggcattgcacgggataagctctggacatttccacactatttggcctctgtttacaacgatgatgcacaaaagattgcatcggtgatcgatcaaaaccctggacgctacctgagtctggtcgcgctcgacaatgtaacttttgaacaggtccataaaattagtgagctccttccctggaagaaggcacctattgctatttacctgctggatgaagcacaagatctccgccgagaaacgtctgaattagtacaggtcgtcctctcaaaccccgataagcacggatatagccaggccgcttacgaagcccggctgcaagacctggagaatatcgtagcgtcgcaggaagtcagtgtgaaggcggagaagagcgcccttaaggtactggaatctttcaggaatgactggcgtctgcattacgaacagtatggcaagcattgggggggactgcttgaccaacgggagctggctctcttaatactggaaaatgctgatgcagcacttaagcaagctgagcatgatgagcaaacactgcgtgacgagaagatacatgctcaggtgcggttaaacaacgcccaacagcagaaaattcaggcagaaaaagcacatgataaactgagtttttttgtagaaactgaatgggcgaagcgtgaaacggcgataatgaaactggagcagttagctgcacagattcaacgaagcaaggacactctttgcacccagagagagagactggaacggctgaacgagatcgagaagaacaagcgctccgagaaaacccttttaaatatccaaatgggcaactggggtaatctgtgtaacgagccgttctattcagagattacggcgactgaaggtatggccggacgaagccccgaagatgcccatgagatggcagctcaggcgcacaaaaaattgctcgaagcagccaacggtgatcaagtgaccgctctcaagcaacaactgaaagatgctgaacaggcacaacgttctgcctctgagcgtttgactgctcaacccacctacaatacatatccggacgaggtaaaagcggcggctatcaatgagctaacggtaattaataaccgtatcgtacgcctgaaggaacagcaaaagcaattcacgcaaaatctaattaattctcaggtaactctgaaaaatttttctcaaagctgtgaggaggctggtaaagcacttgacgaggattttatttgggaagagaagcccattgagatagagacaatccaaacgtctctggctgaaatcgtcaacagcctccatgaaattgaataccagctaaaacttcaactggagcaaaagaagctgcagttgcaaaagatggaaaatgtgaaagaacggctgcagaacgccaaaacagctcaagcgatgattcagcccattacgccgagctctgccgcgggtctacctggcaggatcctgagcatcacagaatatgctgacgatctggctacacaatgccaaatgtatgccggtctaaatgaaacgctaaaacagcaaaatatacgcgtctctacggtctggggaaaattccgcaaacggatcgaagaagagttggccaaggatctagatacccgagccagtcaggaatacttacggcagttggactcaatcgcaacttatcatgaagtgctgggcgatttggacagggtcggtacagggatcacgcaggtatttgaagctgtgcaggatagcctggaacaattccagcgttcgattgatctgactgtcacccatctgactgctcatctggaaggggcgattaaacttctcaagcgcgcgatgtcggtcaaaattcctgaggattgccccgtactgcctggccggcccattatcaaaatgaccgaccggctgaatgatgttgccgctgatctcaggggttttgccagcagccgcttgcagcagtggatagccaagggacagataccccgatcgcccaatcgagacgccttaacagctgatttgatacagtcggtatttggcgaaggggagctggaggtgcgtttgctgaagacgaatgccagccgtccacaatggactcctgtcacccgacttgaaggttcgggtggacagcgccttacatctgcctttttactgtttgtgacggttggtaaagtacgagagtacgatacgggtatttcaagtgcaggattcttgttagccgataacccgctgggtaaatcgaatgccgatgatctaatgcgaattcaaacccaaatggccaaagcctataaaattcagctcatctacctgactggtatttcggatgaaaacgcccaatcaatgtttgataaccatctcttcctgaataaagttcaaaaactgaggcggcgcgatttggtaaccgttgataaagaacgccatgccctgtgggcagcttctctggctgctaagccacagttcgatcccgtcatttaa

SEQ ID NO: 52281 - DNA, 1056 bp, Klebsiella oxytoca KA-2
atgagtagcgtaatgatctggctatcccgactggagtcgacagccaataaacatcgtcttgccgctggtaaggccgcccgtacagtgaaagctaatgcggtgctggatgaggtattacgcgcacacaatcaagaggccttgagccaggaggtgcctgatttgctgagtcaggctgttacgctactgcttgagagggactggcgggctcagcctaagcgcaaagcgagttggcagcgctactggcggggtatgagcctgccaagtacttttgtttacgaaggtgccatcgttcctacgaagacaacatcagaaatagcctggcatccttggttggcccgacgtattacaggacaactgacccagccaatcaaagcacgcttacaacagctgaatacatatctttttcgccaaaccgagggcgacaagtcactattcccgggcttgcttgggcatcgtgagcggtctctgcttatatttggtgacgaaaaagcgctggactccttgccgcctgatggctggaagcatgtcactctgactttggctgatatgggcgcgtttcgacgtgcaccgcctttaccgtatgagtcatcatgttgccatgatcttccggctatcattgttgaaaactccgatgtgtattatcgactatgccaacttaatcgagttgagactcgttggtcactggtcatttatggcgcaggtaacaaagtgtccggccaggcggagtgcgtgtcacaactccttgaggtcgaacaggtaaaacagttactttattttggcgatctggatgtagcgggcttaaaaatcgcccatcagttgcagtgtaagctgcttagtgattacggtatcagcttacatttggatgaatggctttataatgaactgatcttaaatggtctaatgacgccagaagggaacgccaataacgaacggtttgattttgaattgcagtgtaggtggatgccacagtttgttttacgagaaatgaagactcttctggcgatccatcagcgtctacctcaagaaggcgtggcttctttaggtttagtcatatag

SEQ ID NO: 52282 - DNA, 1620 bp, Peptoclostridium difficile E15; identical to SEQ ID NO: 52183

SEQ ID NO: 52283 - DNA, 729 bp, Peptoclostridium difficile E15; identical to SEQ ID NO: 51741

SEQ ID NO: 52284 - DNA, 4356 bp, Peptoclostridium difficile E15; identical to SEQ ID NO: 51742

SEQ ID NO: 52285 - DNA, 1011 bp, Peptoclostridium difficile E15; identical to SEQ ID NO: 51743

SEQ ID NO: 52286 - DNA, 1620 bp, Peptoclostridium difficile T11; identical to SEQ ID NO: 52183

SEQ ID NO: 52287 - DNA, 729 bp, Peptoclostridium difficile T11; identical to SEQ ID NO: 51741

SEQ ID NO: 52288 - DNA, 4356 bp, Peptoclostridium difficile T11; identical to SEQ ID NO: 51742

SEQ ID NO: 52289 - DNA, 1011 bp, Peptoclostridium difficile T11; identical to SEQ ID NO: 51743

SEQ ID NO: 52290 - DNA, 1620 bp, Peptoclostridium difficile E19; identical to SEQ ID NO: 52183

SEQ ID NO: 52291 - DNA, 729 bp, Peptoclostridium difficile E19; identical to SEQ ID NO: 51741

SEQ ID NO: 52292 - DNA, 4356 bp, Peptoclostridium difficile E19; identical to SEQ ID NO: 51742

SEQ ID NO: 52293 - DNA, 1011 bp, Peptoclostridium difficile E19; identical to SEQ ID NO: 51743

SEQ ID NO: 52294 - DNA, 1506 bp, Bacillus firmus DS1
gtgaacgagtcatgggaaggattcgcccagcggatgcagcgtttaaacccgctgtttgagcttggaagaggaatggaagtcggagagctgaagcctcatatccagacgattctgatgcaggtgctcctcaccattttttatcgggaattgaatgatgatgatcaccggagaaaatcagatatcaaatatatggtggaagattcgattaaacaaatgaagctattggctgatgagaagcagattgaacgaatcacaagcggacttttgtatcagggaagagaagagtacagcaggccgtttgaagccctttattacgatgaaatcagacagtcatgggagacgcaggttttccgttatgtgacaatggatgaattatatacaaacctggaaatgggcggatcaatcgtctacaaactcacagatgtctcacaggaaatgattttcatgagcagggaaatggcggaggagttctcgatcaccattgaacagctctacagtatgcagctgattaaaaacggtaatttccgcaaagctacccgaaacctcgatcacctcatttcacgggtcaaccgcttaatggcaagagaattctcctttcaaaaagaaatgatcaataatcccaaaatcttattgatggaagaagaaatgcaaagggctgataatcgtgcggaaattgaaaaacaatttgaagaagagaaaaatcacttccgtaccatcagcagtatgattgagaagacaaaacgaagaaacgaggaagatgatcacattcaaagagaattgatcctcctgcaggaaaagatcggccatacaaggcaattgcatgaccgttttgccaagcttgtgattcagaatatctcctatgaaatgaaattaaaagcggaaaacccttcactattttgggaaacaagcctcgtttcgtttcgggagcacatttttgaaaactggttcatgaaggaggggggatcttccttcgatcgtgttgagaaggtactgggtcctttattttctccaaagaatgaatttatcttgcccttggattggatctggggcgaacaggaatttgatgaaaagcagctcacagagacgatggaggaagaaacggcagaggaaagtattacccatcagcgggtaacgaactgggattctgttataaaggcctggagctatgtgtttcaatatttgcagacatacggagagttttccctggctgatttaacgacattgccgcttgaggtacaggatttatggtttgaagaatcggaaacgattgatttatggatgatgtttgataaaaagccgctgaaggttcaggtgctgcaccggagggaagagagcttgagcgatgagagggagattctcctctataaactgatgcaggagtatccgcaattccaggtgtttgaaggattgaaactttataccgagtttgaccatcgtgcggaacctttcctctggtatcaaatgaaaatcactccgtttaaaatttgtgttcaggaggagaaatga

SEQ ID NO: 52295 - DNA, 747 bp, Bacillus firmus DS1
atgagtgcagaaagtattaagactgcatcagcggtttattttacgcttttaaaagacaaggttatcgatgaaaacagcgagcactttcaggcgtattacgttcctgatgtaagacagacggtgcttttaatggcagacgaatccgggacctttatcattgaatcgcctaaacgtattcagctggttgtgcagccgaccggatctgtttttgcaacgaattttacacatatgaaggacaggcataagcaggttgaaaccaaaaaacattttcacctgatgagtgttgtcattatggcattcctggcgggcatcgaccgaaatcaggcggctaagatccgcacgaagcgcgaagggatcagcttctatacattagaacggcaagtcaatgatgtcatcatgaattgggatagtctgcttaaagcaaaacctgatttcggagaagaagaaaaaattgatatgaaagacgttgtgacgacatggaaatacatggaggtcgacacagatgatttaggagccaggaaagccaatcgcagaacgcgcatcggattgattgcaagtgccatgcgtcttttggaaacagaaggactcatcgtcatcctggatcgggaggaaataccgaaggcgattccgaagcaggagttatttgagcggattgaatacctgtatcatgactatgaccgttatgaaatgttcaaggaattaatgaaaacagaggaggatcagcatgccgaaaatacatcgaattag

SEQ ID NO: 52296 - DNA, 4461 bp, Bacillus firmus DS1
atgccgaaaatacatcgaattagaattgccggcctgaaatatgatggcatgcaaaagcagtatagggacaccacctttaattttcataatgaggaaacctccacaaatgggctcatttcgatgatgaatggaggagggaaaggtgttttccttcagaccatatttcagatccttaagccgggtactgcatggggaaagcagaataatcgctattatcagcaattcttttttaataataaagagcaattcataccttatacctttcatgttcttatacaatgggagctcgacggggctgaccgcaggcatttggtgacgggcggaatgttttcagcagaacagcggatttccatgaatgaagaaagcggagagagcaaaccgcttgaacaggaagcgaaaattgtcccgaatattaccttttatacaagggagtttgaacggaaagaagaagcatcacttgaacatattccgctctatgaagatggagaactggctgaaacagaaggcctgaaggattatttaaaatggaatggatacgatgtttaccgggatacaaagaagcactaccgcattcttgatacatacggcattaaccgcaaagactgggatattatgaaggacattaataaggatgaaggcggtgttggaaaattctttgaaggcgctgaagatgatcattccctgttccaaaagcggattattcctacagtcagtcaggttcttcaccggactgagcatcagaagaacgatctggtggagatttttaagagtcaggcaagcatcgcgaaggacctccctgttttgctgaaaagagagcaggcacataaagagttcctggaagatattcttccttttgaagagagcctggcaaagggtgtcgggcataaggaaattgtagatgatagcattaaggcgggaagacagctgcttggcgctttggagcatttgaagaaaacagaagaagaaactctcattgagctggaaaaggaaatcgaaaaattaacaggcaggcaagtggatctgcgttttcagaaagataatcttgagtatgcaaaagctcacagggaagtgctggattgggagaagaaattagcggaagagcagaagaagcatattgttctgcaggaagctgtgaaggaaaagcaggagcgaaaagaggagctggcttttcagctattattaaaagaatggcatgaaggggaacaaagtattcgcgcgctttcccagcaaattgcaaagctcgagcagaacagcggcctggagcaagtgaatcaaagaatggatgaaatcaaaaaagaagcggcacagcaatgggagaaatcctctgctgccattagggaagccgttcagcaatattccggatatcaaaggtttttaaagaaaaaagcaaacgacctgtctaagcaggataaacaaaagacccaggagattgcccagcttcgaacagaaattgattttctttattctcaaattcatgaatttgaatcaaaagaagaacagcttatcaaggaattcggagaccgcattacctatgatttaacaggttttattgaaaatctgactaaacagatagaaactaaagaagcggcactcgaagatctacaggcaaaagagaatagatcaaatgaaaaacaaaatcagcttgcttcttcccatggtacactcgcacaatccattcagttttctgaagaaaagtgtgaagagctaaaaaagaaaagtgaagagcagaagcaaaaagaaacaaagctgtacgatcagctgcaaggtgtgctgcaaggtgtcacagctccattctcgaatgctcttttatcaaaatatgccctggaggtggaggagctcctcgcccaaaatcgcgagcagggggaagaattaaagaaagcgctctgggaaacgcagctggattatgccttgaatgatgagcatttctggattgccaataatgatgtgaaggaactgaaggaatggattgatgagaagacagggattgatgtattttacggatcccaatttctccaatccttaaagcccgatgaaacggcgagccacatgctttctcatcctctcctgccgtacggcttagtagtcagcaggccgcaatgggaaaaaatcaataagcaggttcttggaggaaggatgtttaaaagtccggtcccgatttttatgagggaggaaatggcgggtgaaaatcagcagaatgcctttgtgatgatcaccgggacggagaaggagctgctggcggataaaaatcagttcacaaactggaaaattcagattgcgaaacaaatagaagaaaagaaagatatacttgcagagttagaaaaaacagaaacagcactgcgaagtattataaaagagatagaccgattcatttcccatgaccttgcaggtgatatcgaaaaagtactgcatcaggaaaaggaagtactgctttcaaggaaaacggaattgcaggctatcatcgtgcaggaggaaaaagaaaaagaactgcagctgggacttagagaacagctggaaaagacgaagaaaaagattgaaaaactctctaaagatgccgaatccttagcggaatttaaccgggaaaaatcgatgcatcaggaaaataaacgggtaaagcaggaaaaagagaaacaaaaggaagctttcgaaaagctgcagaatgagctgggaatcgagcttcagaccatgaatgaccttcaggaaaagtggagccaaacctatctggaatggaagctgtcagccgagcaaaatattaagaagataagcttttttatagacggtgctgcttttccagcggctgagaaagcagaagcttctgaggaggttccgcgattatcaccctatattttagaaaaaatcaatggcagcattgaggagcttaaacagcttcaaaaatcaaaagaagaacaagcaagtgaactgctcgcgattcaggcgacacgtgaatccgaacagaagcagcaaaggaagctggaaaaaaaacttcatgctcttaatgaagagtggaaggatgcttctgtacctgatgaaccaataagtattttggagaatatggttcagacagctgcaaaggaaacaaaggcagcagaaaaagaagagcgtgagcaggaaaagaccgttaccattgcggaaacgtccttaaagcatggaatggatcagcgtaagaaatccgctaaaaaagtggcaaagcatgagcagcagcctgaagaatgggaagagcttgatctggaagtgaagaccgtagaaattgctgaccagaccaaacagacaaatgcagaaataaagaaaacagaagagcgcaaaaaagagacagaacaaaacataactgagtttgaaaacaatcaattgcatttatccgtcattcttaaagaggaagcggcagctttttcggatgaggatatagaaaaaataaagagtcaaggaaagcaaagcatcctatcctggagtgaaaaacatcaggctattcaggatgaagggcaagaaaagcatgcgaagattgaacaatcactaagaaacttaaagcttgctattgaaggcaaggattgggaaatccgttttaagaatgaagtcttaagtacgcttgatcatatggatacaaggcattatgctcatattcaaagtgtcgtccagaacatgaagcgcttttcacagagcggcttagatcagctggaacgcgataaagaacgggcagaaaaagcgcagaacttctgggccagccgggcgagcatgaaggtgatgagcatttcagaagcgattcgctcgatgattgcgaaaatgaagctgaagaatgaacggggttcattcccgcttgtccagctcaaagaagacatcctgcctaaaaaagcggaagatgttgaacctttactgaaacagcattttgtttcagccattaacaaaattacaaagcgattcgagataattgatgacaataatcagctgcttgatcaggaaattaaacagcttatcagtgatgagcagattttatttgtctctcttagaaatcgttacccagaactgttggtttataacatgcgtactgataatgccttcatgtacggaaaaccgcagcgagagcattattcaacctggcagacgatcaaccagggttcaaggacgaaatccgatggcagcggcggtcaaaagctttctgcccgcatggtcatgatgatgatgcttctttcggttaagagtgaaactgaccaaagctgggttccgttagtctgtgataacccgttcggacaagctgcttctgcccatgtgcttgatcctattttcgctgtagcgaataagctgaagttccaattcatcgttgttaccccgcctgaattagtgaaaacagagatcagccagagattcgacgcgtattataaattggatttcatccgtgaaaagggaaaagagattgtgtcggatacgattgttccggcttttcggatttatcagggggaggaagctgttcattag

SEQ ID NO: 52297 - DNA, 1074 bp, Bacillus firmus DS1
gtgaacaaaatcaacatcatcgaaacaagggtgagaagtttcattgaagatattcagcaccctaagcaaaagaagaagttaaatataaatgatttggaatttcagctgcgcaaattgctggatgattattatgaaatggacggttattcgctattttatgaagccattcaatcattgcaggatgatggccagctgacacctatacataatcatcaatacaacgggaaaacaccgtctctgcctttatatttctgggtgaatgtgaaagctcacaccggcaaatgggatcgcctcgagatgatgaagttaactgatcggttcgatttttcgttttatgaacggcaccctgaatggcagacgaaggaggaatggagccggatcaggaatttatatgcttttctccaatccagcggcgaacgggaaactgtttcacttgaggaaagaagcctggagctgttcggccatgaaaaattcctgcaggatgctgtcagtttcccagatggaaaaggctttttagcccgaattggcgtatctgaagagcagctgaaagtagtgaaatacggggagccttttgtgttttggatgaagcagggaaaagaaattaatgatatccagcgagtgctcattgtcgagaatctatcattctttcatacttctattcaattattggaaagcgatctgctcgattacgagcctgaactgatcatttatggggaaggtactaaaattgaacggagcttttcatttttctttaaaattttccctgctaaatcgtatctattctattatgcgggggatctggatgctgcaggctacggtatcatgaccaggctgcttgataaatatccggaatgctgcattcagcctgcattgaagatataccgtaaaatgctcgattgtatggagcaaagaaatgaacagaaatccggccagcttcaaaatcttaaataccgtgaagcgttctttaagtggtttacggaagaggagcaagaacacttattgcaattatggcaggaaaataaacggattcctcaggaagtcctgacaattgaaacatggaggagatggatgtga

SEQ ID NO: 52298 - DNA, 1566 bp, Kutzneria sp. 744
gtgagcgagccatggcctgtcgggcgggctgtcttcgacgcctcgttcagcgaccgagtacgagtgctcctgcgcacccgaccagtggccgacgcggcggacaacgccacccgccaggcctggagcgaccagggctacgacgtggtggcgctctccctgacagccatcgacacggtgatcgccagacagggtttcgaccacgaagtcacctatgacgaggccatcaccgggctggcgagcttggccgccaacaccaatcccacccggcctcacgacgaacacagggcggtcgcggggtacgtcgtggacgcgctactcaaccgcagggaacgcgaggccccattcagctactcggtctccgccttcacccgtgagcaggacggctctgtccgacacaggcgcaccgcggtcgagttccggctactcaccgagcacgaggaccacggccgaggtgtcaatgtgctgcgggcatcgaccgacgctatcaacgccctcgtgggcggattggagttcgacgtcgaagacgagcagtccgccatcgagctcatgctcacccggcaactccaacgtggagctttcggacaggccgaaaaggcggctgaacggtcacggttgctttccgtgcgctacgcggacgaactgcggacaatcctggcggacaccagccgtgacattcggacagtgttcaaccaatgggccgagcaagtgccggcacaactcgaccgcaaccgcgtccacctggaggaacggctcgccggggagtcacggctactcgatcacgttcgaggcgcgctggacgcgccggacgtcgagccagacgttgcggcggccgcggcacgcatcgccggtttgctggaggagtgccggcagcgacacaccgagctgcacgggaggctggtcaccgcccgaacgaccttcctggacgagcagacccggcagtcgttccgacctgtcggcgggctccgcaaccccgacatcaacgacggtgtgttccttccgttgctcacgatgcccacgaagggggccatcgaacccgcggagacgttcagcatcctgttggcgggtacccagccgccgaagatcgtccggttcgccgatctggtggacgacctgctggcaccacgtcgggaagccgcgccggaggaaccgctcgagcccgacgaggaactcggcgaccccgatccgccagccgtgccgcctgaggttctggcggcggccgcagccgtggttgacggtgtcgaactgcccgcgagactgtccgatctactgctggccgcccgcgaagcgagtctgccggccggcgtcgaccgccggcatgttgaacggttggtcgtccttgcggtgctgtggaactacgcacctgagacgacgcaggacgtgtccacggcggtggatgcggcggcatacgtcctgggtccgacggcagcggtcgacgcggacggcgttcggatcaccatgcccggctggtccggcgatgacctgatcgtcgcccaggacgaggacgcactggcccgctgggccgaacggcattccgccgccacgccgcgagatcgggaggcatcgtga

SEQ ID NO: 52299 - DNA, 4428 bp, Kutzneria sp. 744
gtgacgtaccaactgtcccgactgcggttggcgagcgtgggagatcgcgcagcccggttcaccgacgtgaccctggatatgtcctcgtccggcgtggacggcccgggcgatccggtcgactccatactctggttgcgcaacggcggcggcaaatcgagcctactgtcgttgttcttcgccttgctgctgccgctgcgcaaggacttcatgggcaagaccgtgaagcgctacctggaggactacgtcgcgtcgggcgacaccagtcacacgatcgccgaatgggtcgcacggtccgataacagcttgctgccctcggccgcaccgcgactgatcaccggcgcggtctacgaatgggtggaccgccgccggccactcgacccagaccgggaccgcgacaagctcaaggggtggtactacacgttcttcgcggtgtccggggaacttgatctcgaccggctgccagtacacgacaccggccggctcaggccgatgaccgagttcgtccgcctgttgcgtgagatcgctgcgaccagaccgcagcagttctcgttcgcggtgaccgaccaacgcaacctatggatggacacgctcaccgcgcgcggcctcgatcccgcgctgttcagctatcagaaggagatgaaccattccgagggcggtgtggccgagctgttcaacttcccgtccaccgacaggttcgtcgacttcctgatcgacctgaccgtggacagcgcgcagccggacctcgtcgcgaccaacctgcgcaagatcatcgacatcctggctcgcaagccggacctgctcgctgaccgcgacttctgtgtggaggtgacgggccggctggacttgctcgccgaacgtcacgaggtcgccaagaacgccgagaccgaggcgaacgccgccaggcaggccgctgcccggcttgccggtgcgttcgccgtcgcggcacgcgaacgcggaaccgacgcggagtggttcacgaacgaggaaggtcggctccgcgaggaagcgctcaggttggaccgtgaacgtaaaggtgtcaacgacgtcgcgaacgagttgcacagggtcgcggccacgcaccgtcttgccaccgcagtcgcgacccatgagcaggcagcgtctgatcatgtcgaagcccgggacgaggaactggcttggcaggcggtcgttccgctggccgagcagatggaggccgagcacgacgcggagtccgtacgcaagcagatggcggaggagcaacgacagacggcaccactgcgcgtagaacgcgaccgcgcggccaccgcactgaaggcccgttataccgcgctcgccgaggaggaagccgccgctgaggaaacggagacctccctcgccgacaccgcggagacgaaggcggctgaggaggacagccgggccctggctaaccgggacctcgcgactcaggaggagacccgtgccaagggcctcaggggcaagttgatcgagatcagcgacgcgatcgccgactcagtgcggcagggcgacctgccgggtccggacgccgtaccggatgtcattctcgccgaggcacggacgtccaaacgcgagaagaaggacgatctcgacaccgttcgacgccgccgcgccaagcggccggcaacgcgcaagtcgttgtcgagccgacgacaagcccttgcccgtgagcgtgccaccaaggtgacagaacgggatcacctcgccgccgaacgccgaaagttggctgagcgcgtcgatgagctcgcgacgcaccccagactggccgaactcgtccaactcgacgacggtggccggctggacctgtggcgggaagcagccgatctccgtgcggcgctgacgcatgcgatcgcactggccgagtcgaccattgtggacactcgtgtcgacgcggcagacgatgaccgtgccttggaggggctgcgcggcgacgccttcctgcccaccacacgtgatgcccagcgcgcggccgaagcgatccacgctgccaccggcaaggcagcgcgacctggctgggagctgctgcgcgacctggtgcccgaacccgaccgcgccagggtgctggagaacccggtcgtcgcggagctcgcggccggagtcgtcgtcgcggacgtcgccgccaacgatgtccgcgacgcagtacggtcgcgggactggcggtcggtggctcacgtgaccgtgtgcaccgccagccagctgcaacacgcgctgaccggcgcgcggccggagtggctggtggtaccgaacgatccggcgctgttcgatccgggcgcggcagagaacgcgcgcgccgaacgtgaactccgccgcgaagtccaggatcgtcggatggccgagttgcgtgaccaggcggcagcggatcgtgtcctgctcgacagggtggacacggtgctgcacgactgcccggaaggccacctgcgcgcactcgaggccaatatcgaggagtaccggcaggcgatcgaggacatcgacggcaccgaccggaacctgctcgaccagagtgacgaactcgagcgccaggacgcagaggacgcggacaccgaaaccgctcttggtgacgaactcgcctcgctcgaaggaaagattcaacggctggccctgctccgggacaaagtcgccgacttgcccgggatcagccaggctgtcgagcaactggaccgtgacgcacgaactcacaggaggatcgaggcagaagcgaccgaacgagcgaatgagcatcgccacgaagaacgaggcgcccgcgacggtgctcgccgacaccactccaacaaggaacggtacgagcaggccgatcgcaagatctcattgctcgaacccgatcacaaggccgacgtcgatgatgccggcgatccgttgtcgttgctggagaggcaattcgatggcgcggacgaacgctggcgcacagtagcgtcacagtccgtcctggccgaacggctacggagcgctctcgcccgagccggacaagccgcggacgccctggccaggttcacgcagtcggctcggctgcgctccgccgctctgctcaagaccggtgacggccaggatccggcacgtcgagcaacggcacgagagcgcgcccgaaaccgcgcggacgagctccaggtggcgttgacccgcgccgagacggaggtcaagacggccgagaacgagctcagcgcgcgaacaccgcgggacagggcacggcacacgcagctcgatgccgagccggccaccgaagagcaggcccgtgcacaggccgaggagcactccgcccgggcggcggagatgagtggcaaggtgaccagcttcaaccgggaagccgacgaggcaggcacagcggcacgcgaggcggacaccgccgcccaggtgttcgcacaacgtgctcaccgcctcgccgatgccgccgtcccggtcacggcaccgcaggacgtcccggcgtacgacggcgacagcgcgcgggccgaatccgacaccgagcaccttctcgagcggctcaccggcgccaacaccgtagcctcgtcgaccggacaggaccgggacgaagccgtccagcaggtgcgtaaactggcgtcggacaaccggttcgccgcgatccccgccgcgatcagggaccggttcaccggtgacgactccgccgtgctcgccgcccgcgcagccggccgggccgaggagatgcgcgtgcgccggcggacgatcgaggaccagctcggagacatcgaccgtgatcaagggctggtggtggtcgagatcgccgccctcgtccagagtgtgctcgcgaacctggactccgcgcaccggcactcgaagctgcccggcacgctcggcggctggggcaacgagcacttcctccggatccgtttcacccgtcctactggtgacgaggacctgcgggcccggatcaacgccgtggtggaccggatcgtggcggagaagtcgaagccggagggtctcgcgctgctcaaacggtgcgtgcacgaagcagtcgcgccgcgcggcttcaccgtcaaggttctcaagccgaacagcgatctcgcggttgaacccgtcgatgtgacccggctcggcaagttctccggcggtgagaagctcaccgtgtgtgtcgcgctgtactgcaccctcgcccggctgcgcgcgatcaaccgcggccaaggcagatccgcgctgggcggcaccctggtgttggacaacccattgggcacggccagccacgtggcactgctgcggctgcaacgcgacgtcgcagccgcacacggagtgcagctcctctacacgaccggcgtcgaggacctcggcgccgtcggccagttccccaacgtgctgcggatgcgcaacgcccctggtgcgctgcgcaccaggcgctatgtggtcgtggaggagcgtttcggtacgaccgtcgacggcatcaccagtgtccgagtcgcacgcgacgaagcagtggaggaaccgtcgtcatga

SEQ ID NO: 52300 - DNA, 1056 bp, Kutzneria sp. 744
atgacgttgagttcactggcgcgatacctggccgcacacgtcgcagacgcgcccaggcagaagatcgaggttggggcgctgtacgccgcggccgtcgagttcgatcgcagcctggcgacggcaccggcggcacgcggcgagatccgccatgcgctggatgagctcgtcgccgccggcctggtgatgtttccgcgctcgcttcgggacttcgacacccgggacgagcctcacctgcccaggtgggtacggcggccggctcgcgaacgtgtcgtacgggagaaggcgcccgttcgggtctggccggcggcactcgaagccgcaggccgaatcgcgcaccgcgacgaggaactggcgctgctggacacggttaccgctttccttcgtgacagcggtgcgacgcggccgaacgtgccgatgcgagagcggtccctggaactgttcggcgacgagaagagactcgatcggctcctgagcacccgcctattcacatcgggggcactgaccctgaacctcctgcgctgccacaccgtgcccatcccctttgtctcacaatgggttccgggcatcgacgacccaaagggcacagcgctgctcatcgccgaaaaccatcacacctacacgtctctgctggaagtcacacggcaccgcgcggccagcggcggcccgggacggcatgtggggtacgggaccggtggccagtttccctcagcggtgctgtccgtgccgctgctgtcccccatgcccgaacgaatcgcatacttcggcgacgtggacctaaaaggactacagattcccttggcggcacacgctgctggctccctggctgggcttccaggagtagttccggcggtaccgttgtatggcctcctcttcgagatgggccttgcgcgacccgccaagcaggttcccaccgctgtcgccacggaagctgcggcgtggctggggtcgttcgccgcgcaggcacgggacgctctggtcaacggcgtcagattcccacaagaggcagtcggatacgagctgttgatggaccgtggcgagcggctcgatcaagtctga

SEQ ID NO: 52301 - DNA, 1473 bp, Micromonospora sp. M42
atgggggaatacggggacagcgacgtcgtccccgacgacgggctcatccgccggctgaaggcgctagcctgcacggcaccgctgaatgatctcgattcccgcaagtcgcacctggagtgggtcgacggctcgatctaccagatggccgaaatcggattgcacgtcatcgaccaggtcaccatcgccatggatttcgacgcgggcgctgacgccgaacagatcatcgcccgcacggtcccgctcgtggcgatgcagggtcccgcccgtaccaacgaggaacacggccgggttgcccggtgggtgcttgacagcttgatcaacgtcggcaccgtcgacaggggattccagcgcgtgtatggcgaggtggacgacgtgggcgtctacgtccgtcgccggttcgacttcaagctcctcgtcgagctatccggcgcgggcggcgagatctacctgagggccaccgacgaagcgatcaacgtgctcgtcggcgcgctcgacaccgacattgagtccgcccaagtcgccgccgaggtgaagctcgacaacctgatcaggcggggccggctggccgacgcgaagctcgccgccgagcaggcccgctaccgcaccgtccagctcggcgagacactgcgcaccatgctggaggcgacccggcgcgacgtgcgggcggtggactgggacgaggccgcccccgcgctgctcgactctgcgctcgaccacgtccaagaccggttcaccaacgagaacgtgatcctgcgacacattgccgacgcccgcgacgaggcgaccgacccccggcacaagcgccaggctgccgacctggtcgccatcgtcgaggactgcatgcgccggcacagccagctgctgatgcggctgcaacgggcccgggcgctgtttcgcgcggagcaggaccgacagctgttcgccgatccgccgcgccgggaggccgccgacctacacggccagctcctgcgcccgatcatggacctcccggccgccgacgccctcgaccccctcgagtcgtacttccgctcgtcggcgggcctcgcccggccgcccgtcgtgacgctgagctcgctggtcgacctcctgctgcgggtgccgcccgagccgggcgacctcggccgggaactacccgagccggagttggtcccggtgacaagcacggaccggttctccgacgagcactggcagatggcgggcctcctgctcgacctgcaagaaaacacgcggccgctgtccgagctgctcgtagaggccgccgagctcgacgaggacctccccgcgctggtcagcctgctcgcaacgcacgcctacgcgcccgagctcggctcggcgatgcggcgcggacagctgcacgtcctgctggctctgccggccggcggcccgctcccgccggccggggtgggcggtgtcaacggcgacgaccttctactcagtacggtcgcgctgctcgacgatgaggcatcacggtga

SEQ ID NO: 52302 - DNA, 4386 bp, Micromonospora sp. M42
atgtacgagctgtcccgggtacgcctctactcggtcggcccggagccggcccgttaccaagatgtcaccctggacttcagcgacatcggccgcccggtgcggttccaggccgacaccctgctggagccgcaccagccgcaccgccgcccgtcgcccgcgagcgtgctgttcctcgagaacggcggcggcaagtccgtcctgctcaagctgatcttctcggtcatgctgcccaagcggcgccaaatcgtcggcacaaccagcacccgggtgctggaaaacttcgtcctcgccggcgacgtcgcgcacgtggtcctcgagtggatgcacgccgagacaggccggctgctactgaccggcaaggtgtcagagtggcgcaacaacaccgtgtcgggcgatcccgagaacctcgccaccttctggtactgcttgaggccgaccgaagcggtgcggctagacacgctgccgttcgcggccgaccggcgcctggtcagccgcgtcgcattccggcagcggctggccgagaagttcgcctcggatccgcgcctggagttcttcgccagccgccagcccggcgaatggacccggcagctcgaccagctcggcctcgaccccgagctgttccgctaccagcgcgagatgaacgcggacgaaggcgaggccgccgggacgttcaccttcgccacagacgaggcgttcgtcgagtttctactgcgggccgtggtcgccgaggaggaccccggcgagatcgccgacctcgtagcgcagcacagccgcgacctggcgcagcgcgacggcctcctgctggagtgcgagttcgtcgcgggcgcgctggaccggctggtgccgcttgccgatgcgcacaaggcggcgcgcgccaccgaggtgaccgcagtcggcgcgcaggcagcgatcgaccggttcgcccagagcgtggccgcccgcagccgggcggagcaggagttgctcgccgtccgggaacagtatgcgcgcgagaccgccgaggcattggccgcggcccgcaccgacgcggagcaccggcaggccgcggtcaaagagctgaagcgcctagcgctggtcctgcagctgagcacggcacgggccaccgaggcggtcgccaagcaggaccacgaggacgccgacgcgctcgcggagtcctggcgggagactgagaaggccgccgagctacgggcggcggacgcggccgccgccgagacggcggccctggtcgaggacgccgaggagtccgcccgcccgatcctggacgcaaagaaggccgcagccgcacaactggcccgcgggctcctccaagtcgccaacaaggccgcggacgccgctaaagaggccgggaggctggcaacggactgcaccgccggggccgccgccgccgaggacgcgctggtgcgcgagacgcaagaggcggcgaggctcgatgccggggcggccgtcgctgcgaagcgcatcggcgagatcgacatgatgctctccgacgccgcggcgagcgggctgctgccggccgggccgtccgcggcggcggcggcggcgctcgccacggaggcggccaccgaagtgggacgccggttgaccgcagccgaagagaaggccgccgagttcgacgaggaacgggtcgcggcggtgcgcgtcgagaacgacgcggcgaccgcggtggttcaggccaacgaggcacgcctccgcgccatggaggcatacgaggcggcggccgcccgcgccgccgagctggccggccgcccgcggctcgccgagctgatcgacagcgaggaggtgcggctcgccacggacgccgaaccgctcgccgagcggctggccgccgccgtcgcccaagcggagagcgcccgggcccggctccaggccgaggccaccgccgacgagcgcatccggaccgcgctcgaggccgacggcctactgccgccgccggccgaagtgaccgccgcgtgcgaggcgctgaacgacgcagggattgtggcgtggagcggctgggaccacttgacccagatcgacaacctcgagcggcgccgcgagctgctgcgcggtgccccgcagctggtgtcaggcgtcgtgctcaacgatccagcccaactcgccgacgccggcgccgtcctcgcgtcgcgcgaaatctacccggtgttcttcgtcgggatcggcacgaccgaggcgttgcaccaggcggaaccggcgggtgcagaggcattcgtgccgctgaacccggcgctgtacgaccaggaggccgccgaggctgcccgagccgccgtcgagcgacgcgacgaggagcgccgcgagcagctcgcgacgatcgcccggtcgctcgtcgtggaccaggagctgatccgcgacctgcgcgactggcgacgagacttcccgccggggcggttgaccgagatggaggagcactgcgccgacctcacggccggcctggaacaggcagagagcgcgcacatcctcgcggccgaagcgacccgggacgtgaccgaccggcggaccgcggtgcgcgattcgcttcccggtctgcgcgccgaactgctcgccgccgagcaacgcgaccgcgacctgcaggcgctcgcccggcacgaggccgagcgccggacgctggacgagtcacgccggcaggcgctcgccgacgcggcaacgcacgcccggctggccacggcggcgcgggagctggctcaaactcgacgcgaggaggccacgggtcatcagcgccacgccgacggccaaagcgacgtcgccgtcagggcccgccgggagctcgcccaagtgcccggcggcggggacgtctcgccggacgcgcccgtgcccgccgagcccgtcgaggtgctccgggcgcgcttcattgccgcgtcggacgcgtacacgcggggggaggtcggcgccgagttgcgggtccgcctcgaccaggcggaacgcgagcaggcccgggcacggtcccggttcgaggagctgaccccggccgtgcggcagcgggccctggaactgctggacacgcccgagggcgccgacttcggcagccggagcgccgcccggcggcggagcaccgaccgggtcgtccgggccagcgagaacctgaggaccgccgttgccgcgacggcggcgatcaacgcgcgactcagcgaactcaccgagcaacgggctctccccgccgatttcatcgccccggccgacgaggacaacgctgccgccctgctcaacgcggccgaacgtgcggcggcgcgggccgaccgacgccacgctgagcttggtgaggtcgccgagaaggcgggcgccgagctagaggctgccaggggaatcgcccgcggcttcgccgacctcgccgaggatctcgacgtcagcgccggcgagagcgcatcagccttctccgacgacctcgacacggcgcgggcgcgcaagcggagcctccgcaccgccctgaacgcggcgaacgacagcgccgcgaccgagcgcgcccgactgacccgcaccacggaggcgctgcggcggcacgccgtggactcccggttccggctcctccagtcgaccatccgccagcagatgtccgcgctcgacagtgcgagcctggcagggcacgccgatgagtggatcaccgcgctccggccgcggcttcggtcgctgactgacgagctcaccagcatcgaccggcaccgggacatgatcaatgtgcggctgcacggcatggttggcgccgccttccgtaccctgcgcaacgcgcagcggctttcccggctgccagagggcctggacggctggtcgggccaggagttcctgcgcgtcgcgtaccaaccactcgaggaggcggccctgctcgaggcgatcggtgaggttgtcgacgaggtagtcgacggcggcggcgtcgatgggatgaccctgctgctgcgctgtgtccggcgggcggtgccgcgcggcttccgcgtcgacgtcctgaagccggactcggcgctgcggcctgagcggcagcgggtctcggagatcaaagacgtcttctccggcgggcagcagttgaccgccgccatcatcctgtactgcacgatggcggcgctgcgggccaacaaccgtggccggatcggaaaccggcactccggagtgctgttcctcgacaacccgatcgggcgagcctcggccggttacctgctcgagctgcagcggtcggtcgccgcgacgctgggcgtgcagctgatctacacgaccggactcttcgacgccaacgcgctgagcgccttcccgctaatcatccggctgcgtaacgactccgacctgagggccgggcgcaaatacctggcggtcgatcacgtctttcgcaagcggctggacgagctgggtcccgaggacgccggcggcgagctcaccgcgatccggaccttcgtacgcgccgagcactga

SEQ ID NO: 52303 - DNA, 957 bp, Micromonospora sp. M42
ttgctgctagagctggaagactcaggccggatccggctcctacgcgccgacgaccgcgagaaggtggcattgcctgcggcgatctggctgctgccgacccgcagcgctacggcgcggccggcacccatgccgccgtggcatccggaggtgcgcgggctagccacccactggccggtggcaaccccgaagcagcgggcggcctacacagcggtcaaccggtggctgatgaccaatccggaccgctcgccggtgcccatccgcgaacgatcattggagatcttcggccggcacgggtcggcggcggacttcccgatgccggaaaaggtgctcgacaccctccgttcgggaccgctcttctctgaccgcgacgagctgctgcggctcatcggggcgttcatggtgcacccgccgctgctggcggagcgcttcaccgaggcgatcggcgacggatattaccagcgggtcggcgccgggcggatgctgctggtcatcgagaacgcgacgacgtggtggtcggtggtgaacagcctgccggagcggcacgacctgggctacgtcgcttggggcctgggcaacacgttcacggcgtcggtgaacacgattagagcccgccacgccgtcgccgagatccggtacttcggcgacctggacctgagcgggctgcggatcccgctctcagcctcggcgaccgccgtgcacaacgggctaccgcaggtgcggcccgcgatgcacctctaccgcgccctactgcagctcgggctgcccatcgcggcgaaggagaaggccgcggcaccggcggacgccgcccggctggccggctggctcggcgagaatatgggccaggtcgccgccctgctcacccgcggcgagcgcttggcccaggagtgggttggcttccggcacctgcgcacagacgcgagttggcacgccgacgtccgcatcgccgcctgggcctga

SEQ ID NO: 52304 - DNA, 1512 bp, Paenibacillus pini JCM 16418
atggctatatatgaggaaatttttgaacgataccacgaacgaaagaagacattaaatccatgtttccaatttgggaccgggattcaaataccgaccgaatattccaaggtgtataaagatattcttttcttaatgctccttgaaatcttttatcgcgaactacgagataacccagagcgtaccgatcgtgctttgaaggagattgctgaagagatcatgattaaggttggtgttcaagccaatacggattttattgagcgcttagctatagctcttctttccacggggacaggtcagtatcgtgaggcatttatatcatcgtactacaacgaatctacttcatcatttgaggaagagcgcttcttatatttgacggaagacactgaggccatgctacgctccaagtctgatgctcagatctggaagctatctgaatctggtcaaaaactagtttttttgagtcttgaaatggctgatgagttcggcattgaaattcagcagttatatacgttgtccttcatccgaaagggtaattttcagaaggctcttggtaacctggatcacgtgaaagctgcggtccgggctaaagcaacgcaggaaagagattatgccaagcggatgagaagagatccgagatcgatcttttcaaaagagagagagcacattgaacgtcgcaaaagcctgcaggagcaatttcaggaacagaaaaagctcttctatgaaatggacaacattttacatgagaagcttaaagaaatgacggatcctaaagttatccgggatattgaatatttaaaagagaaggtcgatgagtgtgtaggcgaacattcaaagttaactgaacttgtagttcagaactattcgcaagaaattgctctgcaaagagaaattgaacggctactcaattacaatcgatcttttgtaaaagacatatgggagaaacatatatactctgaaggttttatttttgaagacggctttgaatgtatactagaaccgtttttctctccgaagcaagaattcatctatccccttagctgggtgtgggatgaacatcatgttggcgaaatagatagcgaagttgctgcttcggcggaggaacccaatgatattccggaaataaaaaacgcaaaaagagttccaatagattgggattctattgcaaacttatggacaccggtttttaaggcggcgttagaggatccacaaaaaacctgtgcacttcgtgaatgtcatataggggagtggacactcgatgctttagagatgtggatgaaattccgggatggcgattttgaattaaaatcatccctgtcaccatctcgcaagtatgatgacgatcgggccgtcctactacaagaagtcgtaaagcgtgatcccggaatgatagaaatgacgaatcaatataagatcagagttagtaccgatggtggagaacagatccaaaatgaattggtaagtattacaccttttactctaacactgattcctaaagaatataacggaggctag

SEQ ID NO: 52305 - DNA, 753 bp, Paenibacillus pini JCM 16418
atgtacgatattagtcagatccatgaagcacatagtatatttttgcatttgctgcaacacaaagtggttaagaagggcgatacagcaatagagaattattttcacgatatgaacattcagcaactcgtaaaacgttttgcagatacctccagcacgcaggtgcttgtcggcaacatgaatgtccacttagtaacaaaaccgaaaggctcttttttcgctacaaactttactcagatgaaagaccagatgaaagagcggaaaagcgatggtagagttgaaacaaggcttgagctctacatgattcatttagtcatcatggtgtatttaagcgaagtggatggcgagagtactaaagggtcgcatatcgatttgtatggcggcattcgatacctcgaattaacgacccgcgtgacagaagttcttgaattttggaataagcttctagagaatgatcctgagtttggaaaaagacaaaaaattgcgatgacccaattgtttaatttatgggatacaacaaaactgcagccagatgaagatgagcaactgcgaccaaacgtcaagacgaaatttggtatcgtacatatggccatgcgacttcttgagcaggaaaagctggtgaaaattacggatcagcgagtaacttcattagaggcattacatgaaagagtggagcttctatatcatagtgagcagcgttatcaggaatggaaacgattaatcgatgctgcaacagaacgaggtgacagggaatga

SEQ ID NO: 52306 - DNA, 3903 bp, Paenibacillus pini JCM 16418
atgagtgcaattaacgcatttcgtgcaacaaatgttaaatacaataaacagcaattcgtcatggataacctttatctatcttttgcaaatgatactgaccttgtgcatgctttggctactatgccgaatggctatgggaaaggcgttattttgcagtcgatctttcaaatttttaagccgttgaaagattggcaaaaaggtaagggacgggtatcgcaattttttcactcaactagcggttttaacccatatacattatattctgctctagaatggaaacttgatgttgcagaaggacgttttcttattacgggtatcgcaatttcggctcgaagagttaaggaagatgatagtggtcccaaaacagatgtctactataagctgttcacaattaaatgtgactcatcgagcgatcaccgtctggccaatcttccttactgggatgaggaaactggcgaatcttggcccctaagcaaatgggaagactacgctaaagagttcccgcagcagattcgtttatacaataaagatgaacttcgcaaatatagaagttatttgcaggaaaatggcattttcgctgatgagtgggatgaaatgtacgaaattaatcaaaatgaagcaggaactacgatttattttgaaaaattaggagcagatcataatgacggtttatttcggaaagtaattattccatccattgagtccaatctacgccggcaagtgagtaaagaggggcgagacttaaaagaactgtttattgaggttgctaaaatagcacataacttaaatacacttctttcaagaaaatctgcgatgacaggtatactaggcatgcttgaggatgtcgatgccgtttatttaaagttgcaggaagcggagaaggagctgaacaatcacgcacaacgaggcagctacctaaaatccggattattagagcgtatcgaggaagcggaacgagatctggatacgcttgagaaagaaaggcaagaagcagatgatgctgaaattgatgctaggttcaatctaaagaatctaacatatatcgaagatcaatataagatttcagaacaaggaaagatgattcgggagatgaaagcaattcttgaaaccgaaacatcgaatgcaagtgaaataaaacgtctgatggatgaagcagaccctgcaattattcgtaaggagtatgaggaagcttctagaaatttagatattacgttatcccaaatcaaatcactgatgatgagggaacagcttacagatgtaaaggcgcaacaagaggaattggagaaaaacattgaaaacgaatggccgagtcttctccaagatctcagtcaaacggttaatcatgcagttgggtatcaaagtgtactaaatacaaatatacagatggctgaatctgaacttacagagctacataaagaaatcagtgatttaagtaaggaaattggaacaaccgaggaacggataagggttttccaaaccaagttaaatgaaacgtatacaaggcacaatctaaccgatcactttactttttctcagcttattaaaatgactggcgaagattatcaaaaatttatcgaaagtattgaacaggaagaggaagtccatcagttgttaagtcagcagtgcgctgatcttgaacgtgagaaggtaaaactagaaacgaaagtggaacatgaagaagcgtatattcacttgctaaatgatagatataataagcagttaaacctcgaagttgatgcagctattaagcttcaaccgttctcaggatcgtccctaccatggcagcaggagaaatacgtggtttggcttcaagaacaactccctgagctaacagcagaggcatctcgaagagaacagattctaagacgcgaggaagaggacatccgtcgattagaaagtgagcacatgattacggaaggtggcttttgggttcccaattcaaccatcttacaattaagggacgtaataaagagtcacggatacacctgtcttttgggaacagaatttatacaagaaaggtcagaagtagagcaggagagcttaagacaaaatgcgaaacttctaccttatggactcataattttagagaatgagcgagagcaggtactacatcttacagattttaaaaaccgtatccttttctatcctgttccacttttttctgttgagataatcgacaacatgtctgccccaacatttattactgtacccaatcgatccgaggaaattgcttttaaccctgcggtattagaatcgtatttggcagaatcagaagaagaggtagtaaggagaagagaaaaattaggacttgctatcactgaaataaaaaacttaaaaagcgcacttaaacttacagaaaaagcactggattctgataaatctgccgaacaactaggggaagagtgccaggcgcttgaagatgcatgtgaacgcaagaaaaagcagattaatgattataaaagtgatattgaagatctccagagcaagattgctatcgtacgtaacacactgcagaaatctcaaaaagaattgaaagaaattgaaaccaaaatgaacgctcttgaggatttaaacatctcttgggttgaacatcaattgaacgagaaaaaaatgaatgaacttaatggatccgaggaattagcaaaagcgaagattcaaaagatctcaagtaacaaacaggctacacagcaagagctggaagagcagaagaagttatattccgattggaaaaacagtattcaacaggaacttaatcgctatcgcgaagcaattccttctttatcggtatttgattttcaattaaatgagccgagcttcttcccgccttcatcttggccaacaattccattgagtttagaagacaatttcaacaactggagtatttgccaaaagacattagagcaggccagcagtgaaatgacgagactcgaaacttttaaagcgatttatgcaaagcaacaagaggaaaagagacgcgagcttattgagcttgatgaaaagtgggcaaacaaagtcccgcctacagaatcacttgacgtattaaagcaacgacgaaaacagtttgcggaggagtttgagacagctgacttgaaaaggcagcagtatgttgtaaaattaactgatttacaaagtacagaacgagcgatgatcacttacgcggagaaattaaaggttgatattgagaaagaattcaaacagcgggaagtggactttagaagtggtattgatgtggattatcagcggaaggaattcaattataagttatcccaagcaaacgaaaagttaaagaatgctagaaacagtatttctgatacttacaagaaaaaattgatttgggagcaatcgagcgaggctttgcagcaccttagtgaaagcaaacatcgtgtacctagagaagtttattttgaggtaggtacagatgcaaagagcactgttagggactgggttacgagggcttctatactagacaaggagcttcgttacgttaacacaagatgttcagatgcagtgaaggatgtacagaaaaggattaaggaagccaagtgggatgatgagatgaaacagcatggggaagactttttcgatagtcttcttgacataggagaggcaattcatgttcgacttaaaatttcagaagccaaatatatatatgaaggcattattgaacgtgaggaagaaaatcttaaccaagcacaggaagcggagctcagatgggtacaaaccgctacggaacatagccggcaaatcattaatcacattcatgagatggtaaaaggtatgtcgatcaggaatcgctataatatttcattcccgctaatgaaactcaaagaagaaagtatgccgcggattgaagatgttgaagggcgaatgaaggatctattccgtcaaacgctgcggttttag

SEQ ID NO: 52307 - DNA, 1056 bp, Paenibacillus pini JCM 16418
ttgatacgtgatacaatcatcaatatactagttgaaactaagaataaattcacaataaatgagcttgaagataaagttatgcaaaagtttagcagcttagataagtatgatagggctggtggatacctaggtttttatcagatagttcaaagtcttcatgaggaaggcgagattatacctctcaaggcaaacgaagaaagcagcaaggtacctagtttgcctctaaagtggaagaaacgaactaacgaggtcagccaatcgtggagcgatttacaatttgtcagagctgaagcgggaaacttgaacgtcgcattctataaacgacaccctgagatgcagacagagttggaatggggtcgaattgaaactgtacttcagtttttaccaactcgagattcgagaatatacatatctaaagaagaacggtcttatgaactattcggccaggaaaagtggttagataaaaaggaagacggggataggtttctaaagcgtatcggcattacactagaagactttcgtgctaagtcctacggggaaccatttgtcttttggcaaaaccccctatctaattcaagcaaacaagcgctgattgtcgagaatttatccgcttttcatacgataaagagagcgttaatcacctttaatcatatctataacctgcaggtagatgttttaatctacggtgagggataccatataatgcgaagttttccctttatcgatgaagttggagctccggagaagatctattatgctggagacttggatccacacgggctctccatattaatagatctgtgtaagaattatccggaatacccgcttctgcctgctgaaaacttatatcgtgcaatgatacgtaatcattcccaaacaacaccggccaatggtgagtttttaactactgtacttcaggacttcctttcgaggcttaagacagatgaagaaaccactagagcaataaaggatttatgggattgtaaaagacgaataccgcaagaagcagtgaattttgaaacgattagcaaggagtgcaacgatggctatatatga

SEQ ID NO: 52308 - DNA, 1413 bp, Lysinibacillus varians
gtggagcaaatgggtgtaaaagaaccgatttcaatttttacaagcgattatcaaaccgcagaatttatgaaatcaatgcgggatttagcctcattagcaggtgtattaaaggaattaagtaccgaaaaaatgtacgattccccgatcgaaacgattcgttttttaaatgttattcaattaattaatgaagcatctctcggcattaaagatgccattgataacgaggaagtattgtactaccgatatcagtctacgtacccacaagataatgaaccgccaacattagcgcaaattacgagaatgctgacgattttagaacgcaataattggattgtgaaacagagccgtcaaattaaaatgcgtgaccgtgggaaaaatttaatggacgggttaattcgcatgggtaacgatgcgctagcctattatttgcaggatgatattggacgctcgctatttcaagcgagacgcgatgccgaaataagcgctgcctatgacgatcaagggatatctggaggcaataaaattgcatcgatgatttacaacgttgaagaggcgattaagcaattggaggaacgccagcttgaacttcttgctgatcgcaatgccttaccgcagctggagaaaattaatcaactcatgcttgagcttgaaacaaaattaaatgaacgtttacaacagtttggcaccgtcgaagaaagtacgaaaatgagtgatttaatgcgtcgcggaacggctgccatttcaaaagggacttcgcttagcttaagtttactgacaaaatatattcgctttgttaatatgcagctcacacctaccgctaacactatttcaccagaaaaggtacgtcagtttattttggcaatgcattcaccagaagctaatacgaatatcccaacagcccacgatattttaagttttatggagcaaaatcaatatgatgaagaggggatggatggcttatgggtccctgtgaaatttgccgcaccgattggcccacaagatattacagatgccgtacattatttacaaacgtatgaaccaaagctagaaaagccgatgactcatcagcttgagcatacatatgaagaaaccgaaatggatattcgcccaatcaaagatgcattgcaggatgcttcttggaaaatgacacagtcattaattgataccgaacgaattgaacattatttaagtgagcacggtgaaacggaaatggaagagcttattgtggaatcgagttcaaacaaatggcatgacgccattctttcattattagctgtctcggcattaacgagtaacaaaaaggtagaacaacagcctattgattacacgaaggactatgaaaaacaatgggagtggatagacgatgacgacaaacgatttaccgttcgacaatacccttatgatgatgaatag

SEQ ID NO: 52309 - DNA, 672 bp, Lysinibacillus varians
atgacgacaaacgatttaccgttcgacaatacccttatgatgatgaatagcttaaagggctatctcacgaccgacgaggaattaacgtttatgcagttattattttcgtcatccgcatccattaaaggggcaaattacggcttagcaaagaaagatttagaaaagctacttggcattaaaaatggagatgatgatgctttccattcatttatcaatcgtttaaatgccgtgttaagtcgctatttccgtgtgatttacgatgaccgtcgagaccgcgtaattgtcatgatgcatgtaaccgcaaaacatgcaaaatcaacattaagcagtgaggcgctcgccattatgttgtatttgttttatcaccaagaagtacttgggcatgaatttacgctcctgcatcaaatcctagttgattttggtcatgaatcactaaatgccaatcgcaaattaaaaaataatatcgaccaactgaaaaaaattggcgcggttacagactacgaatccgtttctgaagaggcctatatgttaacagccataggagtacatatgttttcagagtcatttttacgacgcacaactgaatttgcccaggaaacccagcttagtaaagaagaagtaatgaagtttttcaatcgctataatttacatatcgaggaggaaaacgaatga

SEQ ID NO: 52310 - DNA, 3198 bp, Lysinibacillus varians
atgattccgtaccaattaaaaattcatggcgttcgcgactactcatcgcgtagcattcatttgggggaaccagatgagcatattttaattacgggtccaaatggtgtagggaaatcgacattaacattttgccttggggcagtgctccattcatcaagggtagaactagagggacttcgttcaacaaatttaaaagtaaatgacccttggtacgcacgtattacactcgtatttttaaatgaaggcaagtcgaaaattgatggtccaaaatttatcgcctttcagctaacggtcaatcaagatacgaaaaatagcccgatccagcgtgagtatgaggtgttacatgggcaagacaaagaacatttaacatcgcatgcccgctatacatctggtggtacagcaggacggacattcaaagcgtatcgtgaagatttgcgtgtacgctataaaattgaaccagatatttattatttaatttggtatcagcaagaagtcaatcaatttgcggcgatgtacccggaagagcgtttccgcaaatttagtgatatgttcgagatttctgagatgcaaaaggaatgggaagcttcattattaaaaattaaagaagttcgtacggaaattgaatatttaaagggttttcaaaaagtggcagagttaaacttaaatgcggcgcaaactgatcttaataaatatttggacaacaaaaaacgtattttcacatccggccaaaaatattatacgttgctccatcgcatgattgggtattatagtacttcgattgacaagacgtccgagcaaaaagcgcatgatcaagtagaaaaggaaaaacggattgttgcgcagcaaaaattaaagcaaaatataagtgaactagagcaacaaaaaacacaagtgtcacaaaatatggaggtattgtcagcgcaattaaagcacataaccaatcagctccaacaacaacaagatgaagatacacaacaacaaaatttacagcaacagttagaacagcaacttgaaaaaatcgatgaaaagcgcaagtatttacgttttgatgccgacacgacacaacgtaagctagaacaaacaaaaaaacaatacgctacgattacaaagcaattagctgagctcaacaatcagcacacccaattgcgcaagcaagaacgcgagcttgatcaagaaacagctcgtttaaaattcacttcatcgcaactaaaagatgaaatcacaaaggcagaaaagcacaaagcaatttatggaagcagtgcgcaaatcgaacaacaaattaacaccttatcactgcaaaatgaacaagattttgaacaaatacaacgtcttaaaatcaatcttcaaatgatggaacaaaatattacacagtatgaactaaaaaaggtcgtatcaacacgccagcagcaaggactactacatttaaagcaacagcaactggaggcgtacacgttacgtgagttgatcgagcttatgccatctgctccagtgcagttggaaaagcagcttgaggcgattaaatatagcattttttatgtcgggaaaaactataagccagtcaatgatttgtattatgtatcacttccacagcttgtgccaacagaaagtatttcaaagctaccagagtttggcttacaaattcgtaacgacttaactgaacagcagcggaattatgcgaataaggcgctttggtgggtcaagcagtttttcttagagagcccgaaaatcgaacaaggcttgttatatgatacgcgcggtgttcgcggtgcgcaggaagcggcgcaatatattttaagtgatggggcgattgaaaagctgttgcaggaagtacaacaaaactattcaaaaacaaagaacgagcagcaacgtttaaaacaacaatataaagaaaatcaacaacagttgaaacagctacaaggtcatctttatacgatgcaattagccgaaagtacattattaaagcaagcggattatgcatcatatttgcagcaacttgcactagtcgaacaaaaattatcagctctttatgatgagcaaacagcacttgaaattcaactagacgagctaaaaagcgagcaaatagaagcaaagcataatcaggatttttatgagcaacaatggacaattcatgaggagctcggcgcatttgcaggccagcaaatgcaactacaacaaattgtgcaggcaagaaaatacttgcaacaaaatatccgagcacttactacggagcaggagataaaagatcgtgaaattaatcaacaaaaacgcgaacaatcacaactaggtgaacagcaacaacaattcaaaagtaaattgaatatcgtagaaagccaaattacaggttatgaattaacgattcaaaaggcaatggacaagctagaattggatgaaacgatgaaaagtcgctgtcagctcgatttgattgaacttgaacagatactgccgccagaagcacaacaactagacgaacaactcgcaacgaacatgtcactaacgatgctacaggctgaaagcgtacaagcacaagcgcagctacgcaatgcacgcttagaaaaaataaacgaaaatgcccagcaaaattacgatcagcaaaaagcagattttgataagaaaaatgcggagctagcaaaatcggagcagctcctcgaaagcaatacgattcgtgcaaatgagcaagaagatcgcttagaaactacgattacaatgcacttaatcaaaatcaatacgcttttccaaaaatatatggatttgttccaatttgaaggacaagtcgaaaaagaacgcatagaagaaaaatcaggtcgcgtaactttccgactctatattaaagcacgtaaaattggccatcaaggcgccctcgaagatgtcagcatgaaagctcgtagtggcaaagtaggcctaggcgtatccggcggagaagaatcactaagctcactccttttcgccctcgctctactacaaaacttaaccacttcaccaggctatatcgtcctcgacgaattcgatagcgcactagacgatgaacgaaaaaataaagtattcaatctctatgcccaagagctacaacgcaaactaatcattgtatcgccaaaaggacacgatgaaacatactacaactgcttctcaaaagtattcattgtagagcacgacgccacgattccaaaaagtacgattcgggggatacagaataagaagtga

SEQ ID NO: 52311 - DNA, 1182 bp, Lysinibacillus varians
atgcatgaggcatttatcgaatcgtattttttgaaaaaggatgagacgattgaaaaggtggaacagcaagagcaactatttgttatgacgattgttagaaagacggcgcgtacatttcgtaaagtggcacatttaaagataacgatgaagacagaatttacttcaccttttcctaaaaaattagcaatttataaattcacaccaaaggcaaaacgaacgttacatgaaacgaatgacacgattcaacagtggttacaacagggttggattgtgcgtgaaattcgttatcacacagacggtattagtgttaaggaagattattaccgcattgggcctgcttacatagaaacgcaacacaaatccgagcaacaacagattataaaacaacagcaacagatgcaggcgttacagcagaaagctgagcaactagcattaccggagttattccaacaggcaatcgaatggaacgtgctacctgaacagtggacgatgaaaaagcgcatgaaatatattgagttttgtttagcattttatgcgttatctttgcaaaaggagttatttgattttaaggaaatcggcgcgaccttacacgatacgatagggggttcaaaagtatttgaccaagagcgcgaggcctttttaacacagttggagcaaagtggtattgacccgacgctttatgggcttgtgagcatcggaaaaattgtgcccatttattttactggtcatgtgcaaaatagtgttgcaacgtatgcgattggcgcggtgcatgcgacgacggataatgcggtcttaacatcacattttataacgacaaatacaacgttatggcttgttgaaaatcgcgctattttaacgcgtatggctgtagagacggaatttttacggcacacgaattcttgtatcgtttgtttagacggacaaattcgttctgcccataagcaatttatcgagcaattattacaatcttctattaaacaaacgattatttggacagataccgatagcgcaggtatcacgatagccaaatatgccgcagccttagttaagggaacggtaaaaattgttggacgtgattatgagctgtatcattcaattgaaagctatgctacccaagtacaagaagcgcatgaacaggaacagcagttaggaggggtggaacagtggagcaaatgggtgtaa

SEQ ID NO: 52312 - DNA, 1452 bp, Paenibacillus sabinae T27
atggacggaaatctgatctcgatatttggcgccgatgcgcccgatcatcttcgcaaggaatcgctgcgtgatcttgtcaagcttgcgggcgtgctggcggagctgcgggagcatttcgaggaaccgctgaaggtgctggaaacgttgaaaatgctgaacctgattcagcgggaggcgctggggctggatgagccgcttgcggatggcgacgccctcttttaccgattcaggaacaagtacggatacgagccgggcatccgcctggaccgcctgctgaatgttctgcagaaatataactggatcagccgcggcaagcgccgactgacgatgctggatgcgggcaaaaggatgacggatacgctgatccgcttggccaacgattcgctcgcttactatatgcaggacgatgtggcccggtctctgttccaggcaagaagggatgcggatcttggcgaagcatacgacgacaaagggatttcggggggcgacaggatggccagcatgattcgcaacacggcggatgccgtagacgagctgaaggaacggcagctggagctcctcgccgaccggaacgcccttccccagattcagattatcgcggatttgatgcaggagctgaacgaccggatgaatgaaaggctaagcccattcgaaggtgttgaggaggccgattccttaccgcccctgcttcaacaaggcagggaaatcatgcgggaaggaatggagatatcccttggcacgctgaataaatttctccatttcgcccgcttgcagcagaccgagatcaggaccgaaatttctccgcaggccattcgccgctacattatccaatcctttgacaaagcaaccgattccgagcagccccgcggccatgaaatattgagctttctggagcaggatcgcgtccccggagaacggttggacggcatgtgggtacccgtgcagttcgcctccccggtgtccaatcttcagcttgcagataccgtccgctatctcgaagggtatgtgcccaaggccgagccgatcctcgagcggctggagcctgactatccgaaagccgaggaatggaccgaggatgaaattggcctgcatctggcccggatggaatggcaattgaccaaagagcggatacggacagacgaagtcgagcggattttacagaagcgggaagcggtagggctggaaaagcttgtgctggaggcgggttcggagaactggagcgatgccttgaacgcactgctggccgtctccgctctggtaggcggacaacaggcggcgattgaacgggaagaaggcggtgcagaacatgcacaggcgcccgaaacccggacggagtggcagctcatgaataaagggggagaaaaaaatgtcgtcagaagaactggagggcagctacagcaatctgccgctggcagcgatggagcgcctgacggcggtgctcagtcccgatga

SEQ ID NO: 52313 - DNA, 681 bp, Paenibacillus sabinae T27
atgtcgtcagaagaactggagggcagctacagcaatctgccgctggcagcgatggagcgcctgacggcggtgctcagtcccgatgaagaatatgcgttcgttcagattatgttctcgtcctcggcggcggtgcgcagtgacagcttcggcctgtccagacgggaagtgatgaagatattgaagctgagtccggatgacgggcaggggtttgtctcttttttgaaaagagtgaatcaggccgtctctcgctactacaggctggtctatgacgagcggcgggaccgggccgttgtgctgattcatgttcctgccagacaggccagagagctgctgccttccgaaagcctggccttgctgatgtttattttttatcaccaggaagtgctccggaacgatttcacactgttcacccagctgcttgaggcgttcgggcatgagtctcttgacgtcaggcggaaaatacttgcgaaccttgacacgcttatcaagcttggcgccgtgtcccgatacgagcatccatcgggtgaggaagcctatgcgctgacagcgatcggggcccggctgttctcggactcctatttgaaacgttttaccgagtttagccactcgcagcagctgaatatggacgatgtgctgaagttcttcaaacgctataatctcgaggcaggtgagggaatgtga

SEQ ID NO: 52314 - DNA, 3234 bp, Paenibacillus sabinae T27
gtgaatccttgggcgctggagtttagcggcatccgcgattttaccgatacccggctggaatggggcggacctgaagatcatgtgctgataggcgggccgaacggctcgggaaaatcgacaatcacgttctgccttggagcggtgcttgcctcttccaaagtggatctggaagggctgcgttcgcggaatttatcgccagaccgggtgtggcgagcggcgattcagcttgtttttgccaataccggggacagccccgttgatgctggagcttacatcggcttccggttgaatctggagcagcagcccggggagccactgcggaaggagtattatatttgcgaaggggaagaagcctggaaatgggatacagagacccgctatacccccggggacagcgtcaatgatctgcatgagtaccgccagcagctgaagcataaatataaggtggcccccgacgccttttatttgatctggtatcagcaagatgtgaaccagttcgctgtcatgcggcctgaggagcgcttccgtatcttcagcgaaatgaccggcattgaccggatgcagcataattgggagaaggtaaaagaggaacgaaaagatgcgctctccacgctccagacggcggaaagcaaccagcattcgcacaagcttaacctgggcaactggcagcaggagcgggaccggctgctcggaaggaacgaacgccggaggctgggactccatactgcgctgaccgcttcggcggcgcttgaacggctgtacggcagggaaagcgatgcgctgagggagcggatcggcggactggaagagcggttgggagctgaaaaggagcgattaatggggctggaggaggagcaccggtcctgccagggagagcttgaagacaagacgcgccggaagaatgaactggacggcctgctggcggagctggaaggacggacggacgaagaacgcacccttcgcgagcggctgagtgatgaataccggcagctggaagatattctccgggagctggataaacagatgagggcgattccctattccagagcacaggtcgaagaacggttggcgcaggaccgggcaaggctccgggagacggaagccaaagagcgggagacagaggagaagtgccgggaggcccagacgcatctggatcggctgatcggggaagtcggcaggctgaaatatgcgcaggaggaggacttccgcaggctaggcgacgccaagaagatgctcgcccagtatggtggaagcgccgggcttgaacgcgaggtcgagagcctggagagccggcgttccgccttgctggacagcggaagggaactggagcaaggcatccgctctatgaaggaggaggtcttcacgctgatgaagggcggcggaatgctcagcttgagacaggcgaaatcgatcggccgcctgcgcggccaaggtctaaccgtctacaccctgccggacctgctggaaatggacgagcatgttccgctggagcgggaagagcggctggacgccatcaagtatacgctgtttgtggacgcccggggcttcgcagcgccgaccgatgtctgtcatgtcgagctgcctgccgttgtccccgaacggacgatggatgagctgccacctctcgggctgcgcgtgaaacaagatatcgacgacaagacgtacgccgcagcccagaaagcattatggtggatcggaaccctgatatccggcgccgcttcctcgaaggcttggcttggaaacggccagcttgtcgacgcccttggacggagaggggctcaggaggacaggcaatggattctccatccgcgcggaatcaagctgcgtatgaagcacgcaggcgaagagctggacaagctggagcttcagcttgattccgaacgccgggaactggaggaatgcgaggaacggctgagtctcatccgttcggtgcttcaaatgatcaaggaagcggagacaattgtgggcgatgttgccgagcgggatttgagaaagcgcgagctggagcggaagacggacgagctgcggaagtggacggaaatccgggacgaatccgccggtgaagcccggcagctgaaccggaccgccgccgagcttgcggtccgaattgaagcgctcgagggctaccggcaagtgtatgaccgggccgaccgggaaagctccgcaatcgagcgcttcgggcagctcggcagagagctagagatttcggccgagcgggtgcaaaagctcgaaagagagcttcaggaccgtgaggaggaagcggatcggcttacccgctcgctggaatcggcaaggaggagggtcagggagcagctccagtatatcgaagaatcgaacaagacgctggaggcgctgacccgggagaagaacgacgggctggagcttctggaagtcgcagaggagagctggacggccgagcgccgattttacagcgactggaccgttcgactggattccgtatacgccacactacttgaggaatcgccggactttcctccggcggccgactggaatccggcgcaggctaaagcgcgcaaggaggacgctctcgttcagttaaatcaggcgatcatcgagacggtggacgagaacgccgtggagaattacgagaaagtcaggctggagttcgagcggggcgagcaggaggtgcagaatgcccgcatgcttctgcgtcagctggaggagagtctggccgagcttgaagcgaagctgatcagcacgaccgattatgaaatcaagcagataaacagccggtttacccggtatatggatctgttctcgtttgacggcgaagtgagctgggagctgcaggagatgaagcagggcaacgtaaagtattacctgaacatcagggccagaaagcagggccaccggggaccgctggaggaaatcggcataaagggccgcggaggacgggtcggcaaaggggtgtccggcggggaggaatcgctgagctcgctgctgttcgcccttgctctgctcaagacaattgaggctgagccgggattcatcgtgctggacgaattcgacagcgccctggacgagggcagaaagtccaaggtgttcgagctgtacgagcaggagctgtcgagaaaaatgatcatcctgtctccgaagtcccatgagtcggattatctgtggcatttcaacgaagcgtttgtcgtatatcatgacgcgagggtcccccaaagcgcggtgatccgcatcaagaaaaaagcggtagttaaagtttaa

SEQ ID NO: 52315 - DNA, 1467 bp, Enterobacter aerogenes MGH 61
atgtcactagggtttttggagcaggctcgtaatgaatctatggcacgccgcgagctgacgattcaatctcacgcgttgcttgtagttcggacgctggattcaatatacagcgccctacagcgcaatccgtttgatggcttcaagcttgatgtactggcggcaattatgtatctctttgacgccatgctttattatgctgaccgcgagcgccagcctggtatgacgcgtaaagaagccgagctatgtctggttgggcatctcaatgaagcctatccggggcaagaagcgtccgactacgcgcaagttgccagcaagatttttgcggcgatcaaagaccctttccgtctcagttattacgacttctcgcaacgaacgcattccgaagagcagatagtccgtctggtacgctatgatcagctatccggctcagatgatattctctggtcgctgactgatgaaggaatgcttttctataccctccgtttggatgaaacgccgatagaacgcgctgcgattctggcctggcgcacgcttaaaaccatccgtcgcggtgagatcgacaaggcagtacaccagatccaatcaacgcagcggcaactggagcaatatctcattgggatgcggatgaaagtacgtgctgcccagtctggtgatttgagcgcatcttatgcacacgatatccgtcccgtactcaatgattcctttgataaaacccgagaggttttggaacatatccagaactcaatgtcggccattaccgaaatgctggttgaaggaagttcgaaattaaatcccgacaaattaaataagctacgtaaggcacaagagatttttgctgaggtctgcgcttttacgcagcgctatcaagactgcttacttgatgttaacaaagattttgagcgagctcgtctgaaactcattattcccagagataatacccttttccgggaaacgctggaaaaaggtgtactcaagcccttgctgtctcattcccctgaaactgtcgaaaaggaaatcgatggtctcaccgcacgcctgttggctccccgaagacaggatgatgatcggcacattctgtttgatcctgaagcgctgctgaacctctatctcgatagatttgaacaggcgcttccacatgagatacaggaccccaccgagcagcctgtagctattgaaaccaacctgcgaaatattcctgaatccgtcattaaaaaatgcagtgattgggttagtgaccgattgaagaattgggggcatgtgagctttagagatgttttcgacgcctatgagtgcgaagaattatctgaacaagaacaacaggtttgtttacttcatattggcagcctggcagctaacagcgatcccgcaatagaagtagagatagacgacgctatcgaaacaacgctctggcgggctgacaatatcaaactgttaaaggtcgctcccttacacccctttgaggagtag

SEQ ID NO: 52316 - DNA, 4437 bp, Enterobacter aerogenes MGH 61
atgtggctgattaaacgggtttatatggatggcgcaggccatgaagaagctttctacaaggacctcacactggactatattggcctgtctcaagcggtcggtagccctgttgttgaaggcctgcgctcgcccgtcagaaatgcgaaggtggtgaccagtacttatcagcagcttgtaaatgggggcggtaagtcaacctacatcgcgctgctgttatcgatttttgagccgtccgttagtgacttcacccaatatctggcaaatcatcgccagagtgaataccactaccgcaattacttctataaagaactctctgttgttttggttgagatggtcaatgaatcaggacaaacgttattactgggacatgctcatcagcgtaatggagatgatgttgaccgcacactgtttatttgtgatgcgcccgactccctgatgggcgcgccgtttgatgaagtcccttcttattcccgcgcggaacgcaattctgagctgcgcccctatgctaatagcctgcgcagttttgatagctggcttagtctcaaggccagtagtgaaggcggcatgcattggcgtaaaaccaccagacagaacgagtggcgcgcatttttactggaacaacaaattaacgttgatcttatcaaaacaatggtgaccttcaactccgaagaaggtggcctgacccgttttatcgaatacaaaactgaacatgatttccttggcgcgtttttcgcctgcaccatgtctaaagatgcggctgagcggctgcgggaactagtagcgcatgaagttgaacgtcagggagagttagaggggatccgtcgtaacgagtccttcctgaaggatgtgctggctaactggctggcgtttcttgagccggctaaacagctggaaagcatccaggcgcagcagcaactgctggatgatggcttccgggaagcaatgcgcgatctcgcagcctttgtcggggatgctcaggttgaacagacgcagcttgaagataacatggagagtttgcaaacgcatattggtcaggcgatgtctctgcgtgagcagttaggtaagcgcagagctctgcttgaatatgatttcgtgcagtatcagttcgacaagcaaaaagcgatagtcgatgcgcttcaagacgaagccgataccaatcagcgccagattgagattactcaagctgctatagactacaaagcctatgctaaggccctgaatgagtaccgccaggcagatgaagatctgaaggtattccaaagtgaaacggaaaggccgctacaggtgattttcgagcgtactgctggcgaagccttgggcacattagagtgggcaatcgacagacatcgccagcaggaggctacgcttgaggaagaattagggcagatgaatagggaaagcaatacccttaaacaatcatacgacgaactacaaaagatgctgggtggcctggaggcggatcgtgagagatataaaagagacaaacggcagggcgaatcgcaacggggccaactatgtgaagctgggttgatccagaaggatgaaacaccagtagcagcccaataccgactggaattaaccttacgcaatgcacagcagagtgaagagctggctcatacaattcttcatcagaaagagcaggcgctggaagcacagctgaatgttgtgcgggaggcatcaattgagaaaagtgaggcccagcaaaaactcattctggctgaacaaaaacaccagtcagctgtggatagtgctttagttttagcaaaaacctatcaaaaactgccaacgtcaatgcaacatgatctagatattgaagacacgagttggcacagcgagctgtgtggattgcagctcgacaaggtattgaatgcgaactctcacacgctgaatggaatgaaagagcgtttactgcaagcccggcacgaactggacgagttaaggatgacgggacatgaactggtcgcaaagcaggtcaatgaggcacttgaagcgttttatgcggcgggtattgcacgggataagctctggacatttccacactatttggcctctgtttacaacgatgatgcacaaaagattgcagcggtgatcgatcaaaaccctggccgctacctgagcctggtcgcactcgacaatgtaacgtttgaacaggtccataaaattagtgagatcttgccctggaagaaggcacctattgctatttacctgctggatgaagcacaagatctccgccgagaaacgtctgaattagtacaggtcgtcctctcaaaccacgataagcacggatatagccaggccgcttacgaagcccggcagcaagacctggaaaatatcgtagcgtcgcaggaagtcagtgtgaaggctgcgaagagcacccttgatgtactggaatctttcaggaatgactggcgtctgcattacgaacagtatggtaagcattgggcgggattgcttgaccaacgagagcaggctctcttaatactggaaaatgctgatgcatcacttaagcaagctgagcatgatgagcaaacactgcgtgacgagaagacagatgcccaggtgaggttaaacaacgcccaacagcagaaaattcgggcagaaaaagcacatgataaactgagtctttttgtagaaacagaatgggcgaagcgtgaaacggcgataatgaaactggagcagttagctgcacagattcaccgaaacaaggacactatttgcacccagaaagagagactggaaaggctgaacgaaatcgagaagaacaagctctccgagaaaacccttttaaatatccagatgggcaactggagtaatctgtgtaacgagccgttctattcagagattacggcgactgaaggtatggcaggacgaagccccgaagatgcccatgagatagcagctcaggcgcacaaaaaattactcgaagcagccaacggtgatcaagtgaccgctctcaagcaacaactgaaagatgctgaacaggcacaacgttctgcctctgagcgtttgaccgctcaccccacctacaatacatatccggacgaggtaaaagcggcagctatcaatgagctaacggtaattaatcaccgcatcgtacgcctcaacgaacagcagaagcaattcacgcaaaatctaattaatgctcaggtaactctgcaaaatttttctcaaagctgtgagaaggctagtaaagcgcttgatgaggagtttgtctgggaagagaagcccattgatatagagacaatccaaacgtctctgactgaaatcgtcaacagcctccatgaaattgaataccagctaaaacttcacctggagcaaaagaagctgcagttgcaaaagattgaaaatgtgaaggaacggctacagaacgccaaaacagctcaagcgatgatccagcacattacgccgacctctgcggcgggtctacctggcaggatccagagcatcactgaatatgctgacaatctggcgacacaatgccaaatgtatgccggtctaaatgaaacgctaaaacagcaaaatatacgcgtctctacggtctggggaaaattccgcaaacggatcgaagaagagttggccaaggatccagacgcccaagccagtcaggaatacttacggcagttggactcaatcgcaacttatcatgaagtgctgggcgatttggacagggtcggtacagggatcacgcaggtattcgaagctgtgcaggatagcctggaacaattccagcgttcgattgatctgacagtcacccatctgactgctcatctggagggggctattaaacttctcaagcgcgcgatgtcggtcaaaattcctgaggattgccccgtactgcctggccggcccattatcaaaatgacggaccggctgaatgatgttgccgctgatctcaggggttttgccagcagccgcttgcagcagtggatagccaagggacagataccccgagcgcccaatcgggacgccttgacagctgatttggttcagtcggtatttggcgaaggggagctggaggtgcgtttgctgaagacgaatgccagccgtccacaatggactcctgtcacccgacttgaaggttcgggtggacagcgccttacatctgcctttttactgtttgtgacggttggtaaagtacgagagtacgatacgggtatttcaagtgcaggattcttgttagccgataacccgctgggtaaatcgaatgccgatgatctaatgcgaattcaaacccaaatggccaaagcctataaaatccagctcatctacctgactggtatttcggatgaaaatgcccaatcaatgtttgataatcatctcttcctgaataaagttcaaaaactgaggcggcgcgatttggtcaccgttgataaagaacgccatgccctgtgggcggcttctctggctgctaagccactgttcgatcccgtcatttaa

SEQ ID NO: 52317 - DNA, 1044 bp, Enterobacter aerogenes MGH 61
atgatctggctatcccgactggagtcgacagccactaaacatcgtcttgccgttggtaaggccgcccgtacagtgaaagctaatgcggtgctggatgaggtattacgcgcacacaatcaagaggccttgagccaggaggcgcctgatttgctgagtcaggctgttacgctattgcttgagggggactggcgggctcagcctaagcacaaagcgagttggcagcgctactggcggggtatgagcctgccaagtacttttgtttacgaaggtgccatcgttcctacgaagacaacatcagaaatagcctggcatccttggttggctcgacgtattacaggacaactgacccagccaatcaaggtacgcttacaacagctgaatacatatctttttcgccaaaccgagggcgacaagtcactattcccgggcttgcttgggcatcgtgagcggtctctgcttatatttggtgacgaaaaagcgctggactccttgccacctgatggctggaagcatgtcgctctgactttggctgatatgggcgcgtttcgacgtgcaccgcctttaccgtatgagtcatcatgttgccatgatcttccggctatcattgttgaaaactctgatgtgtattatcgactatgtcaacttaatcgagttcagactcgctggtcactggtcatttacggcgcaggtaacaaagtgtccggccaggcggaatgcgtgtcacaactccttgaggtcgaacaggtaaaacagctactttattttggcgatctggatgtagcgggcttaaaaatcgcccatcagttgcggtgtaagctgcttagtgattacggtatcagcttacatttggatgaatggctttataatgaactgatcttaaatggtctaatgacgccagaagggaacgccaacaacgaacggtttgattttgaattgcagtgtaggtggatgccacagtttgttttacgagaaatgaagactcttctggcgatccatcggcgtctacctcaagaaggcgtggcttctttaggtttagtcatatag

SEQ ID NO: 52318 - DNA, 1467 bp, Escherichia coli UCI 57
atgtcgctagggtttttggagcaggctcgtaatgaatcaatggcacgtcgtgagctgtctattcagtctcacgccttgctggtcgtgcggacgctggattcaatatatagcgcccttcagcgaaatccgttcgatggtgttgagcttgatgcgctggcggcaatcatgtatctctttgacgccatgctttattatgctgaccgcgagcgccggcctggaatgacgcgtaaggaagcggagttatgtctggttgggcacctcaatgaagcctatccgggacaagaagaacccgactacgcacaagtggccagcaagatttttgcggcgatcaaagatcctttccgcctccgttattatgatttctcgcaacgaacgcattccgaagagcagatagtccgtctggtacgctatgaccagctatccggctcagatgatattctctggtcgctgactgatgaaggaatgttgttctataccctgcgcttggatgaaacgccgatagaacgcgctgcgattctggcctggcgcacgcttaaaaccatccgtcgcggagagatcgacaaggcagtacaccagatccaatcaacacagcggcaactggagcaatatctgattggaatgcggatgaaagtgcgtgccgcccagtctggtgatttgagtgcatcttatgcacacgatatccgtcccgtactcaatgattcctttgataaaacccgagaggttttggaacatatccagaactcaatgtcggccattaccgaaatgctggttgaaggaagttcgaaaataaatcccgacaaattaaataagctacgtagggcacaggagatttttgctgaggtctgcgcttttacgcagcgctatcaagactgcttacttgatgttaacaaagattttgagcgagctcgtctgaaactcattattcccagagataataccctctttcgggaaacactggaaaaaggtgcactcaagcccttgctgtctcattcccccgacactgtcgaaaaggaaatcgatgatctcaccgcacgcctgttggctccccgaagacaggatgatgatcggcacattctgtttgaccttgaggcgctgctgaacctttatctcgatagatttgaacaggcgcttccacatgagatacaggacctcaccgatcagcctgtagctattgaaaccaacctgcgaggtatccctgaatctgtcattaaaaaatgcagcgattgggttagtgaccgattgaagaattgggggcatgtgagctttagagatgtttttgacgcctatgagggcgaagaattatccgaacaagagcaacaggtttgtttactccatattggcagcctggcagctaacagcgatcccgcaatagaagtggagatagacgacgctatcgaaacaacgctctggcgggctaacaatatcaaactgttaacggttgctcccttatacccctttgaggagtag

SEQ ID NO: 52319 - DNA, 4437 bp, Escherichia coli UCI 57
atgtggctgattaaacgggtttatatggatggtgcaggccatgaagaagctttctacaaggacctcacactggactatattggcctgtctcaagcggtcagtagccctgttgttgaaggcctgcgctcgcccgtcaggaatgcgaaggtggtgaccagtacttatcagcagcttgtgaatgggggtggtaagtcgacctacatcgcgctgctgttatcgatttttgagccgtccgttagtgacttcacccaatatctggcaaatcatcgccagagtgaataccactaccgcaattacttctataaagaactctctgttgttttggttgagatggtcaatgaatcaggacaaacgttattactaggacatgctcatcagcgtaatggagatgatgttgaccgcacactgtttatttgtgatgcgcccgactccctgatgggcgcgccgtttgatgaagtcccttcttattcccgcgcggaacgcaattctgagctgcgcccctatgccaatagcctgcgcagttttgatagctggcttaatctcaaggccggtagtgaaggcggtatgcattggcgtaaaaccaccagacagaacgagtggcgcgcatttttactggaacaacaaattaacgttgatcttatcaaaacaatggtgaccttcaactccgaagaaggtggcctgacccgttttatcgaatacaaaactgaacatgatttccttggcgcgttcttcgcctgcaccatgtctaaagatgcggctgagcggctgcgggaactggtagcgcatgaagttgaacgtcagggagagttagaggggattcgtcgtaacgagtccttcctgaaggatgtgctggctaactggctggcgtttcttgatccggctaaacagctggaaagcatccaggcacagcagcaactgctggatgatggcttccgagaagcaatgcgcgatctcgcagcctttgtcggggatgctcaggttgaacagacgcagcttgaagataacatggatagtttgcaaacacatattggccaggcgatgtctctgcgtgagcagttaggtaagcgcagagcacttcttgaatatgatctcgtgcagcatcagttcgacaaacaaaaagcgatagtcgatgcgcttcaagacgaagccgataccaatcagcaccagattgagattactcacgctgctatagactacaaagcctatgctaaggccctgaatgagtaccgccaggcagatgaagatctgaaggtattccaaagtgaaacggaaaggccgctacaggtgattttcgagcgtactgctggcgaagccttgggcacattagagtgggcaatcgacagacatcgccagcaggaggctacgcttgaggaagaattagggcagatggacagggaaagccatgtcctcagacagtcatacgataaactacaaaagacgttgggtggtctggaaacggagcgtgacggatataaaagagacaaatttcagggcgaatcgcaacggaatgaattatgtgaagctgggttgatccagaaggatgaaacaccagtagcagcccaataccgactggaattaaccttacgcgatgcaaagcagagtgaagaactggctaatacaattcttcatcagaaagagcaggcgctggaagcacagctgaatgttgtgcgggaggcatcaattgagaaaagtgaggcccagcaaaaactcattctggctaaacaaaaacaccagtcagctgtggatagtgccttacttttagcaaaaacctatcaaaaactgccatcgtcaacgcgacatgatctagatattgaagacacgagttggaacagcgagctgtgtggattgcagctcgacaaagtattgaatgcgaacgctcaaacgctgaatggaatgaaagagcgtttactgcaagcccggcacgaactggacgagttgagggtgacgggacatgaactggttgctaagcaggtcaatgaggcacttgaagcgttttatgttgcgggcattgcacgggataagctatggacatttccacactatttggcctctgctcacaacgatgatgcacaaaagattgcagcggtgatcgatcagaaccctggccgctacctgagcctggtcgcactcgacaatgtaacgtttgaacaggtccataaaattagtgagatcctaccctggaagaaggcacctattgctatttacttgctggatgaagcacaagatctccgccgagaaacgtctgaattagtacaggttgtcctctcaaaccccgataagcacggatatagccaggccgcttacgaaacccggctgcaagacctggagaataccgtagcgtcgcaggaagtcagtgtgaaggctgcggagagcgcccttaaagtactggaatctttcaggaatgactggagtcggcattacgaacagtatggtaagcattgggcgggactgcttgaccaacgggagctggctctattaatactggaaaatgctgatgcagcacttaagcaagctgagcatgatgagcaaacactgcgtgacgagaagagagatgtccaggtgcgtttaaacaacgcccaacagcagaaaattcaggcagaaaaagcacatgataaagtgagtctttttgtagaaaaagaatgggcgaagcgtgaaacggcgataatgaaactggagcagttagctgcacagattcagcgaagcaagaacactctttacacccagagagagaggctggaacggctgagcgagctcgagaagaacaaacgctccgagaaaacccttttaattatccagataggtagctggagtaatctgtgtaacgaaccgttctattcagagattacggcgactgaaggtatggaaggacgaagccctgaatatgcccatgagatggctgctcaggcgcacaaaaaattgctcgaagcagccaacggtgatcaagtgaccgttctcaagcaacaactgaaagatgctgaacaggcacaacgttacgcctctgatcgtttgaccgctcaacccacctacaatacatatccggatgaggtaaaagctgcggccatcaatgagctaacggtaattaataacagcatcgtacgcctcaaagaacagcaaaagcaattcacgcaaaatctaattagctctcaggtaactctgcaaaaattttcccaaagctgtgaggaggctagtaaagcacttgacgaggattttgtctgggaagagaagcccattgagatagaggcaatccaaacgtctctggctgaaatcgtcaataacctttatgcgattgaacaccagatcaagttcctactggaacaaaagacactgctgttgagaaagattgaaaatgtgaaagagcggctacagaacgccaaaacagctcaagcgatgatccagcccattacgccgagctctgccgcgggtctacctggtaggatcctgagcatcacagaatatgctgacgatctggctgcacaatgccaaatgtatgccggtttaagtgaaacgctaaaacagcaaaatatgcgcgtctctacggtctggggaaaattccgcaaacggatcgaagaagagttggccaaggatccagacgcccgagccagtcaggaatacttacggcagttggactcaatcgcaacttatcatgaagtgctgggcgatttggagagggtcggtacagggatctcgcaggtattcgaagctgtgcaggacagcctcgagcaattccaacgttcgattgatctgactgtcacccatctgactgctcatctggaaggggcgattaagcttctcaggcgcgcgatgtcggtcaaaattcctgaggattgccccgtactgcctggtcggcccattattaaaatgaccgaccggttgaatgatgttgccgctgatctcaggggttttgccagcagccgcttgcagcagtggatagccaggggacagataccccgagcgcccaatcgggacgccttgacagctgatttggttcagtcggtatttggcgaaggggaactggaggtgcgtttgctgaagacgaatgccagccgtccacaatggactcctgtcacccgacttgaaggttcgggtggacagcgccttacatctgcctttttactgtttgtgacggttggtaaagtacgagagtacgatacgggtatttcaagtgcaggattcttgttagccgataacccgctgggtaaatcgaatgccaatgatctaatgcgcattcaaacccaaatggccaaagcctataaaatccagctcatctacctgactggtatttcggatgaaaacgcccaatcaatgtttgataaccatctcttcctgaataaagttcaaaaactgaggcggcgcgatttggtaaccgttgataaagaacgccatgccctgtgggcggcttctctggctgctaagccacagttcgatccagtcatttaa

SEQ ID NO: 52320 - DNA, 1044 bp, Escherichia coli UCI 57
atgatctggctatcccgactggagtcgacagccaataaacatcgtcttgccgctggtaaggccgcgcgtacagtgaaagctaatgcggtgctggatgaggtattacgcgcacacaatcaagaggccttgagccaggaggtgcctgatttgctgagtcaggctgttacgcaactgcttgagagggactggcgggctcagcctaagcacaaagcgagttggcagcgctactggcggggtatgagcctgccaagtacttttgtttacgaaggtgccatcgttcctacgaagacaacatcagaaatagcctggcatccctggttggcccgacgtattacaggacaacttacccagccaatcaaggcacgcttacaacagctgaatacatatctttttcgccaaaccgggggcgacaagtcgctattcccgggcttgcttggacatcgtgagcggtctctgcttatatttggtgacgaaaaagctctggactccttgccacctgatggctggaagcatgtcactctgactttggctgatatgggcgcgtttcgacgtgcgccgcctttaccgtatgagtcatctcgttgccatgatcttccggctatcattgttgaaaactccgatgtgtattatcggctatgccaacttaatcgagcacagactcgctggtcactggttatttatggcgcaggtaacaaagtttccggtcaggcggagtgcgtgtcacaactccttgaggtcgaacaggtagaacaactactttattttggcgatctggatgttgcgggcttaaaaatcgctcatcagttgcgttgtaagttgcttaatgattacggtatcagcttgcatttagatgaatggctttataataaactgatcttaaatggcctgatgacagcggaagggaacgccaacaacgaacggtttgatttcgagttacagtgtggctggatgccaaagtttgttttacgagaaatgaagactcttctggcgatccaccagcgtctaccccaagaaggtgtggcttctttaggtttatttatatag

SEQ ID NO: 52321 - DNA, 1467 bp, Escherichia coli UCI 58; identical to SEQ ID NO: 52318

SEQ ID NO: 52322 - DNA, 4437 bp, Escherichia coli UCI 58; identical to SEQ ID NO: 52319

SEQ ID NO: 52323 - DNA, 1044 bp, Escherichia coli UCI 58; identical to SEQ ID NO: 52320

SEQ ID NO: 52324 - DNA, 1482 bp, Amycolatopsis rifamycinica
gtgcgagacgacgagaccgggggaccgggcctggccgacgaggggctgacacgccgcctcaaggcgctggcctgcaccgcgccgctgcacgacctcgacgcgcggaaggcgaagctcgactgggccgacgccacgatctaccagatggccgagatcgcgctgcacacgatcgaccaggtcaccatcgcgatggacttcgacaccggcgcgggccacgacgaggtcatcgaccggctgctgccgttcatcgcccagcaggcgccgtcgcggatgcccgaagagcacgtccgcgtggccaagtgggtcctggacaacctgatcaacgtcggcaccaccgaccgcggcttccggcgcgtctacggctcgatcggaccgggcggctaccagcggcgtcagttcgacttcaagctgctggtcgagctggccgcgccggacggcgaggtctacctgcgcgccaccgacgaggcgatcaacgtcctggtcggcgcgctcgacaccgacgtcgagtcggcgcagatcgccgccgaggtcaagctcgagaacctcatcgcgcggggtcgcctggccgacgcgaagctcgccgccgagcaggcgcgctaccggaccgtccagtacggcgagacgctgcgcgcgaagctcgacgcgacccgccgggacgtccgttcggtcgactgggaacgcgaggtcccggagctgctcgacagcgcgctcggccacatcgaggcccggttccgcgccgagaacgccatcctcaagaacatcaccaccgcccgcgacgagaccgaggacctcgaccgcaagcgccgcgccgccgaactcgtcgacatcgtcggcgactgcatccgccgccacacccgcctgcagtcccggctcgccgacgcgggcgcggtcttccgcgccgagcaggaccgccagcagttctccggcccgccccagcgcgccaccctggacctgttcggccagctcctcgtccccaccctcggcctgccgctggccgacgccgtcacgccggtcgagcacttcttccacgccgccgccggcatcaccgcgcccgtggtgccgtcgctgtcttccctcgtctcactgctgctgcggcccgcccccgagcgcgaccagctggtgggggagatcccggaacccgaactcatgcccgccgaggtcaccgacaagttcggcgacgacgtctggcgcgccgccgacgagctgctcgacctgcccgaggtgccgcggcggctgtccggcctgctcgacgaagcccgccgcagccgccagcccggcctcgccgccctggtcgcgctgcgggcggtgcacgcctacagtcccgggatcggcgcggcccgccgccaaggcgaccggcaggtgctgctcgccgtcgacgacggcaccctcctggacgacccggaattcggcggcgccgacctgctgctgtccacggccgccgtcgagcgcgccgacgaggaagaaaacgaggaggtcgcctga

SEQ ID NO: 52325 - DNA, 4470 bp, Amycolatopsis rifamycinica
atgtacgagctttcgcgggtccgcctgcattcggtgggccccgcgggtgcccgctaccaggacgtcgtcctcgacttcagcggcgtcggcgccaagatcaccgcgccgaagcaggacgccctgttcagcgcgggcatccacgcgaccggcccggccgagctgcgccgcccgtcgccggcgagcgtgctgttcctcgagaacggcggcggcaagtcggtgctcatcaagctgatcttctccgtgatgctgcccgggcgccgccaggtcgtcggcaccaccagcacgaaggtgctcgagaagttcgtcgccgccaaggacgtctcgcacgtcgtgctggagtggctgcacgtcgaaagcggccaccgcatcatcaccggcaaggtgtcggagtggcgcgggcacgtcgtgtccgccgactccgagaacctcgtcgactcctggtactgcttccgcccgaccgccgcgctggggctcgattcgctgccgatgacccaggacggccggctgctcaccatgtccggcttccacgacaagctcaccgcggcccagctggccgaacccgagctggaactgtcctggacccgccgccaccacgagtggaccggccgtctcgacagcctcggcctcgacaccgagctcttccgctaccagcgggcgatgaacgcgggtgaaggcgaagcggcggacgcgttcgccttcggcaccgacgacgccttcgtcgagttcctgctgcgcgcggtgatctccgaggaggagccgaaggacctcgccgaggtcgtcgcggtctacgcgcacaacctcgcccagcgcggggatctcctggccgaacgcgacttcgtggccggcgccctggaactgctgggaccgctggccgccgaggaaggcgtcgccgcggagtcgcggaagatcgccgaatcggcgaaggccgacatggccgagctggccgggcgggtcgtcgcgcgcaacgagctcgagaacgcgcggctgtccgggctcgaagaccacgtcaccgaggtcaagtccgcggagaagcttgccgagggcgaccaccggcggctgaccgcggccgtcaccgagctgcgtcgcctggtcgcggtgctgcgactagacgaggcccaggaggcccgcaagcgcgtcgacgccgagctcgccgcggcgaagaccgaggcggaggcgtggcgcgagacggcgaccgtcctcaacgcggtgaacgcggcgcgcaaggcgaaggacctgcgtgaactcgtcggcagccgtgaagaaaaggcgcggcccgcactgcaagcgcgcaatgacgccgctgcggcgctcgcacgcgggttgcacgccctggcgcaggacgcccagcggcaggccgacaaggccgaagcgcacgcgggcgcgttgcgggccgaagccgagaaggcgcagaccgagcgcgacgaggccgcgaacctcgcggccgcgcgccgggccgaagcgcgggggctgaccgcgcggatcaccgaattgcgtgaagaggtccaggcggcggttcgcgcggggttgctgcctgcgggcgccgacgtcgccgaggccgcgcgggccgcgcgcgccgcagccgagcaggccggtgcggacctggtccggcgtgaccaggaactcgaccgcgtcggcgcggatctccaggcggcgcaacgggccgtcaacgaggcgcaccagctcgccggcaccacccaggaccgcctggaacgcgccaccgaggacctcgaccgggcccaccgccggaccgacgccctcgccgccgaaagccggctggtcgagctgctcggcgccgacgacgtcaacctggaaagcgaccttccggtgctgctggaacggctgcgcgaagcgagcgcggccgtcgagaaggagcagaccgcgctgcggatggaggagtccgccgacgagcgggccctggccgcgctgggctccggcgggctgctgccgccgcccgaggacgtccaggccgcactggacgcgctcgaagaggccgggatcaccgcgtggtccggctggcgctatctgtccaaactggacgcttcccggcgcgccgaagtgctggaaagcctgccgcagctggtgtccggcgtcctgctgaacgacgccgcgcacgccggtcgcgcccgcgaggtgctgacgaagcggcggctgctgccgagcgcgatcatcgccgtcggcaccaccgaggccctgcaggccgaggtccccgcggcgcccggcgtcgagttcctcgtgccgccgaaccccgcgatgtacgacgaagaagccgccgacgccgagcgggaagccgtcgcgcggcggcacagcgagcggcagcggcgcctcgaagcgttgtccgccaagctgtccgcggacggcgcgttgacgtggaagctcacgacctggcgcgaggactacccgcccggcgccatcgcgaccctcgccgaacaggcccaggccgcccggaccgcgcgggaaaccgcgcggacggcgctggcgcaggccgacgcggaattcgcgcggttgagcgaaaaagccgtctcgctgcgcgagcgcgtccccgagctgcgggcggccgccgccgaggccgaggagaaggcccggcggctcggtgagctgggcgtccgcagcgcccggatcgcccagtggaccgaagaggccgagcgggcgaccgagatcgccgagcgcgccgacctccaggcgtccgacgcggcgggcaaggccgcgcggctgcgcgagcaggcgggggaggagcagcgcaccgcggacggccaccgccggaccgcgaccaccgcgcgcgccgaactggccgaagtgcccggggcggccggcgccgcggacggcccggtgccgtccgagccggtggacgccctgcgccggacgtacgcgtcggcgtccgaggcgtacgcgaaggtcgaggtcggcagcgacctgcggagcgaactggagcaggccgagtccgcggaagccgcggcgggttcggccgtggaggccatggaggaggcggtccggtcgcgggccgccgagctgctggagacgccggacggctccgacgcgtcggcccgggcggccgcgctggcccgggctcgccgcgtcgtcgacggcctcgaggacgagcggaccgaagcgatcgggctcgtctcgacccggcgcgccgagctggacgcgctgccgctgcagaacggcgtcaccggcgagaagccgcgggacatcgagcacggcctggagctgatcgacgcggccgggctggaggcgtcggcggccgcgcggaagtgggaagagctgcaggagcgccgggcggccgcggaagcgacgctggcgtcggcgcgcacttcggcctcggggttcgcgttgctcgccgagtcgctcgcccacctggtgaccgacaccgacgcggcgccctacgacggcgacgtcgacaccgcgcgagcccagcacgcgcggctgaacgccactttggggcaggcgcaggaagccgcggacgccggcgaccggcgggtgcgcgcggccgccgaccagctcgcccagtacgcgacggagaagcggttcgagaagctcagcacgccggtgcggcagcaggtcatctcggtcaagcgcgaccagctcccggcgcacgccgccgagtgggccgaagcgctgcggccgcgcctgcggtcgctgaccgacgacctcgcgcagatcgatcggcaccgcgggggcatcatcacccggctgcagggcatggtcgacggcgcgctccggacgttgcggtcggcgcagcgcgtctcccggctgccggacggcctcggcgactggtccgggcaggagttcctccgcatccggttcaccgagctggaggacaacgcgctgaccgagaagctcggcgaggtcgtcgacgaggcggcggtgggccggaccgcggacggccgggacgtcaagcgcgacgggctttccctggtcctgcgcggagtccgggcggcggcgcccaggggcttccgcgtcgacatgctgaagccggactcggtgctgcggaccgaacgccagcgcgtctcggagatccgcgacgtgttttcgggcggccagcagctgaccgcggcgatcatcctgtactgcaccttggccgcgctgcgcgcgaacaaccgcggcaaggcccgcaaccggcactcgggcgtgctgttcctggacaacccgatcggccgcgcgtcggcgggctacctcctggagctgcagcgggcggtggcggaggcgctcggcgtccagctgatctacacgacgggcctgttcgacgcgggcgcgctgtcggagttcccgctgatcgtgcggctgcgcaacgacgccgacctgcgggcgggccggaagtacctgtcggtggactcgacgatccgaaggcacctcgacgagctgggcgaacccgacggcgtcggccggctttccgcaaccaggctcttcagccgtgacacgaatatcgagcagggggagcccgacaaggatgttgagccagcgggcagctga

SEQ ID NO: 52326 - DNA, 1047 bp, Amycolatopsis rifamycinica
atgttgagccagcgggcagctgatctcctggcggcgctgaaggaacgagcggggcgcaagaagggccttcctttgcccgctctgctcgatgcctaccggcagatcgacccggaaggcgacgagagtcacctgaggcgtccgctcctgcgtcgatacctcgaagaactgcaggaggcgaatctggtcaggctccccagggcccgtgccggcttcgaccgcttggggcgggatgaaagccaatggctgcccgccaaggtctggctggtcgtcgaggaggaaccgaagtcgcgtgagcccggcatggtcctgcacccgggactcagctgggtcgacaacagcggcctgcgcggcggtaccgccctgatgggtgtcatctcgcagatcaacgactggctcttcaagcatcgcgccggcccgatcgtcccgctacgcgaacgctcgctcgaaatattcaacgacgagaagaagctggacgagtacctttacggccccctcttcgcccaagagcgcaagatgctcgaagtgcttcgtgcgcgcgttgtggcaccaccgctccacaccgagcaggtgggaaacggcgacctcctgctcgtggtcgaaaacagcacaacgttccgctgcatcctggattgcctgccgggcgatcatcggctggcccgggtcgcttggggagcgggagccagcttcagggcagcgatcaggtcggtgagcccggattgggccctgcgcgagatccgctacttcggtgacctcgatgtcgccggcctggagattccccggcacgcgtcgatcatcgccgagaggctcggcttgccggaggttcgtcccgcgacttcgctgtacgcggctttgctcgacgtcggtcggcccgccgacgccaagcggactccccgcccgcaaacagtcgagtccgcggtcaggtggctcgacgacgctcagcgagcgtcggcgagtgcggttctcatgcgagggcagcggatcgcgcaggagtgggtcggcatgcgggccctgcccgcgagcgatcgatggcattcgtcggtcaggtga

SEQ ID NO: 52327 - DNA, 1428 bp, Bacillus azotoformans MEV2011
ttggaaaaggtggattcagtagtttcaatttttcaggctaatgaatcagcaccagaggtgttgcaatcaatgttggatgttgcctctttatccggtgtattgggagagttaagctcgcaaaactcctttcaatctccggtagagattttacgttttctgcgtattattcaattaataaacgaagaagctttagggttagatgatccaatcgaaaattccgaaacagtttattatcgctaccgaaatcgttaccgtgaccccgaacctccaacaaaaaagagagtcgatcaagtaatcaatatcttggtgaaatataattggatatctaagcaatcaaggcgcttaaaaatgagggatgccggtaagagaatgatggatgccttgatacgcatggccaatgattcactagcttactatatgcacgacgatattggacgttccctgttccaggcccggcgagatgctgaactaagcgaggcctatgatgaccgtggcatttccggcggtaataaaattgccagtatgatccgtaatgtagaaaatgctgtccaattattaaaagagcgtgagttagaaatgctagctgatcggagtgcactcccacaattagagcttattcacaaattaatgcaagagctagatgggaagctccaagaacgaataaagatgtttcaaacggtggaggatagtctggtcatttctgacttgatacaaaagggtacggcggtgcttgcagaaggaacgaatttaagtcttggaatgattaataagtatttaaagtttacacatatgcaaaaaacaccgttctctttaacaatacaacctgagaaggttcgtgaatttattatcaaaatgtacaatccgccgcttgaatcagatgttcccaatgtataccaattatttagctttatggaacaaggtcaatatgaagatgaaggattggatggattatggattcccgttaaatttgctgcaccaatatcccctctcgccatagatgaagcactagattatattgaattctacgaacctatagtagtcccgctcgatgaaacggaggaagaagttttatatagttcggaagaaatttcagaagatcaactggaagaactaatgggtgaggcaaattggatgttaacaaagtcgatgattagaacagaagaaattgaagcttttttcaaaacgcatgacgaagccccgatggagcaggttgtgattgaagcgacatctgaacaatggggggatgcgattaatgccttgacagcgatttctgccttagtaggaaataaggatatcactgttttggaatctgcgaaaagggtggaagtaccgaaatacgaaagagattgggagtggatgaaccgtgacgatggatccaacattatccgaaaaagaaggaacaaacaagagcacaatcgagaaggatga

SEQ ID NO: 52328 - DNA, 720 bp, Bacillus azotoformans MEV2011
atggatccaacattatccgaaaaagaaggaacaaacaagagcacaatcgagaaggatgacggaatgaacgtaaatcctttgcatgtcatgcaatccctaagaggaattctaacagaggaagaagaactggcctttatgaatatattgtattcatcgtcagcgacgatacgatccagcaattttggtcttccaaggaaggaagtcgaaaaaatccttggcattcaaggggacgatgaaaagttcttttcctttttaacgaggatcaaccaagtgatcagccgctatataaaggtcatttatgatgaacgccgtgatcaagtgatcaccatgatgagggtgccggctaaatcagcgcggactaccctttccaaagaaagtctagcattattattatatatgttttatcagcaagaggttttacagcatgagtttactttgtttgacgggcttcttgaagcatttggtcatgagacaacgaaagcaaaccaacgaatattaataaatctggatgcacttaagaaaattggagcgatagaagaatatgaaggacattcacaggaaaaagcttatgtattgacagcgattggtgttcacatgttttccgattcattcctgcggcggacagctgaatttagccagtcaaatcaattaaataaggaagaagtgttgaaatttttcaagcgatataatctgtatcagaaaggagagagcgaagaatga

SEQ ID NO: 52329 - DNA, 3219 bp, Bacillus azotoformans MEV2011
atgattccttggcgtcttaagtattcaggaatacgtgattatcctcccacacaattagatttatcaggtgcgaatgaacatgtattaattacaggaccaaacggttccggaaaatcaacgattacattttgcatgggagctgttctctattcggctaaagtcgatgtagagggactaaaatcgcggaatttagcccctgatcatacatggaaagcaaccatttccttgctttttaaaaacgaaggaaaaatgaaaattgatgcccaagattttttagagtttacattaaaaattgttcaggaacctggacaaccgatgaaaaaagagtttcatatttcaaaaggtgacagaatagacgaatgggaagagacggtaaggtatacgtctggtgaccgggtcttaaatttctcagcttataaaaaagatcttcaatataaatacaaagtggatcctgatctattttatctcatttggtatcagcaggaagtcaatcaatttgctgtgatgcatccggaggaacggttccgcatttttagtgagatgcatggcatagataaagtgcagcgggattgggaagagagcatggaaagagtgaaggaaaccgaggaaacagtaagggcggcggagacgaatgtaaagtttatgaaacaggagctccagatgaaaaaagtggcactcgaccactatttagataatcaaaaacgtctaaacagcggtgggaagctttatttggcatctctttttcaattagaaaaccactataaaaaagaaatcgaccgattggaagatgtcctccagcagttgtcggaagacattcaagaggcacaagatgacatgaatttgaaaaaaagcttacaggaaaaagaaaatgatcaattgcttcaatataaagcgaactatgatgaattagaggccaagataacaatccaaggcaaagttgttcaaaaaacgtcaggagaactaaagctaatcgaacaaaatatccgagatctggataaagaattagaatctatagttgcaaagaagaatcaaattgtaaaaacagaagaagaagtaaaacttgaattagaaaaattgcaaactgagcaaaagaaaacttgcgaacagattaaggaaaatgagcagctattaaccaatctaaataagacttggcaggaaaaggtagaaaccattgcggcattgaaacaccaagtcaaagaggatgctagattggaaaaagaacatagggaacggttgtcccaatatgtaagcagccatgccattcaggaaaaaattgatctcttcgataaacgaataaaggaaaataaggatcaattgtactatcaaaaaaatgtacaggaaaagcttacagcagagcaaaaaatgcttctggaaggcaagaatacttcaacacggcaaatggaatcgttacaatactttcgatctaaaggaatcaatgcttatactctccaggaattaattgaattaacggatgacgcacaattaaaggatgaacagcggtttaattcaataaaatacacggtgtttttcgatgggaaatttgtaacacccccaaatgatttataccatgtcccattaatgacgattgttcctgaccgcagtgtgacgaagctaccggaacttcatttaaaggtaaaagaacgtctgtttgaaaacgaattaccatatgccattaaagctctctggtgggtagagcagttttttaaagagggtgccttttctatcaaaaatggcgtgttaatcgatccgatcggccttcgtggtcagcaggaaaaagaacggtatattttgagcttcaaagcattaaagctgcgaagagaggaaatcgaacagcaattaaatgggcttgctgaatcgatttctgaattaacaacaacgatttctgaggatacaaaaaccatccaggagttaaatagcatcattcacggggttagagaatcggaagcgtttatgatatcagagcatgagcgggtaataaggaaaagaaaactggaaaatgaaatcaagctgcaggctgagaacgaagaggaaagaaagagattacaagaaaaagagcggaccttgattgggcgccaaattaggcaagagcactccaagaaaatattggatgaagaagcagaagtctatcgtgaacttggaaaattgaaggataaatatgaagaacggactcttttacaaaaaaagcaagatcttgaaaaatccgctttactaaatcacaaagctcttctagacggttatcatgacgaattagaggaagtagataaaaaaataagtaaaaccgatcgtacaattagaaagataaaagaaagtatcgaagatgccgagcggaatatcaagcagattgaaaaacaacaaacaaatcatagtgatgatctggatgccgctaaaaacgaactagttcaaatcataaaggaattagaagatctaaagcaattagtcccaactctttatactgaaacagccgaagctgtttcttttgaggggctcccatctgtatcacaactaaaacaaaattgtgaaaatggaaaaatcacatttgatggggctcgaactgagaaagaaatagacccagcagcacctgaaaattatgaaacggtaaaaaaagagtttgaacggttagacagtgagtatcatcgtttcacgatattactagatcaagataaagaaagaatggcaaacctccaggaccagttagaaacaacgattaacatgcgagtattggagttgcaacgccgctttaaaatgtatatgagccaattccaattcgaaggggatatcacgtgggattcctatgaagacaagaaaaaacgtacccatttttccctctatattaaagcaaggaaagagggacaccgtggcacactagaggatgtcagtacaaaagctcgaggtggaaaagtaggaaaaggtgtgtcagggggagaagaatccttaagttccttattatttgcactagcacttttacaaaatctccaaacgacaccaggttttatcgtgcttgatgaatttgacagtgcactcgatgaagtacgcaaagtaaaagtatttgatttatatgaacaggaactaaaacgaaagctcatcatcctaacgccaaaatcacacgaagatgaatatttgggacgatttaacaaagcatttatagtgcgacataatcctaccattcctgagagtaaggtcgttggaatagtgaagaaaaaacaagaacaccaggtttga

SEQ ID NO: 52330 - DNA, 1320 bp, Bacillus azotoformans MEV2011
atgttagaaaaagatgaattagactatattgctactttcatgttgaaaactggtgagcgattagaattggaatcgactaatgatgatcatgctaccatagtggatgtgaaaatcataaaacagacggaacgaacataccgagtagcgggtatcattaacatcgctgccggtttcgttgatgacattcctgaaactatcgatcaagaattaatgaagttgaagttaacaccaaaaaagaaagttattctggatgatcatcatccgaacacgatcaagtggtttgattgtggctggattatgaaagaaatccgtttcaaaaaagacgggaagacaccagattcgatacattatcatatgggatatcgattgtataaatacttaaatgagcaaagtcggcaaaaggaagaagaattagcgcaagagtttactagatggaaagcgaaagtaaaaatggtgaaagaagcaaaaaccatagacttctcacctcagcgcaagagaggaattagtcattgtaaaaaaaatttgcacgagctttgtttgctggagttaagtgaactcaaaactgtgccttacattcctaatacgtggccaatgactaaaatctttaaatatctcgactttcttttggctttcctgcaaatagaccttgaaaaaaaggaatttgattggaaagaaatcggtgcaagctattacaaagaaattggtggttccaagggatttgatcaatataaggatgaattcattgaacaattggaaagcatcgcccactgtccagctgctttacttggaatgactagtttaggtaagattactcctgtttatttttccgggcaactatctggaaatttctcaacctatcaatacggtcctgtacatgctctaaccgatttggctgtttccgaagaaaattatgaaacgagcgctgatattttttggcttgttgaaaatagagcggtcttaaccaggatggcagcagaaaagaatttcttaaaagaaacgaattccttcgttttatgtgttgatgggcatcttcgcagcgcccacaaacaatttattggacaagtgttggccagtagttcgattaagcaaattatcatttggagtgactatgattcagcggggcttcaaattgcaagggaaatatatgacacggtttctgagcactatccaagtatgattaaatggataagtgctgaccaaaccgtgatcatgaattgggcagaatatgaacagcatatggatcatttcttaaaaaataacaggatggagcaagagcaagtgttaggaggtgcggtcgattggaaaaggtggattcagtag

SEQ ID NO: 52331 - DNA, 1569 bp, Tumebacillus flagellatus
atggaggttttgtacgtgcgcgacgcattggccgggtttcgagaccggatgaaaaatatcgcggctttttggccgctgtttcgcctgcgcgaactgcgcaagtaccaggagtttgacttgatggcgctgggcctcggcgtgcttctgttgattttggagcacatgctgatcgggcgcgtggagtgcgaccatgcggacgtggctcgttttttgcgggaaggaattcgcgaagtgtacgggcaggagatcacggaggaggaaagccgcgacttggcgtcctacatgctcgctcaactgcgcaacgacgggcgggcgtttgagtttgtctaccgcaacatcgagacgcgcgaagaagagaagcacgtgtttcacttgatcgagaacgggacgtaccacgtcgcttccggtcagattcgcttcaaactctccgacgcggggcttgatttgctgttcaagacgcgggagatgtataaggaactgcggatttcgatctcgcagatgctgttgcgccaacagattgagaagggtgtcttcgaagacgcgctgcgcacggtggaaacgctcggcctcgacgtgcggcagttgcgcgaggagatcgagcggatgaagatggggatcaagcgcgacgtgtcgcagttctcgctgacgaagtacgaagcgatgctctcgctgatcaaggagcagtttgacaaggaacggcagatgttcgaggagttgaacaacttgattcgcgagacgcgggacaacttcgagcgcaagcagagcggcgagcgcgaagagatggcgatcaaccgcctcgtcgaagtgtcgcagcgcctgaaccaagtgcaaaacttgcacaacaagctgctcgtcgacaaactcgacctgcaggagttggtgctcgaatcgctggaagagggcatcgtctccggattccgctccaaagtcaacttcgagcgcgagtttctcgacccgctgatgcaaaaccatgtctcgcttgagaacgtgcgccgcttgatcgagcccttgatgagcttgaacatccgcaagcgcttcaacgtgcacaaagcgttcgccccccaaccggtgcagaagatcgtcgaggaaaaaacatccgatgcgcccgacgtccccaccgacgaatggcaacccgtcgtggaagaccccaaagtcaaattaaaaaacatccgcgacgcccgctaccgggactatctgcggatgatcttcgagccgctgatgttcgaccaatcgctgagcctgcatgacattctgggcgcgttggacgcggagaagctctacgacgtggtcaacgcccgcgacttctacccgttcctcgtgcagttgcaccagatgagcccgatcaacttccggctggattcggagacgcgggcgaagattctcgattcggacgagaccaatctgccgtatctgctcgtccagttgttgaacgaagagccggagtttgaagtgctcgggacggtgctggtcgaagtcgagcaacagggcgaacgccacttgcgcctcgccgacgaagagacgtggacggtgtcgaacttccgcttctataaggagggtttgtatgtatag

SEQ ID NO: 52332 - DNA, 741 bp, Tumebacillus flagellatus
atgtatagcaaagagagcgtggaacgcgcgatccagctttttatcttgctcttggaaaaaggcgagaccgacgagaaagaccgcgacttggtgtttgcgtacaaggaagacccggtcgcccaagaaatcgtctcgcagatgatcgagaagcaagccggaatcaaaattctgcacgtcggcgacaagctctatgtcacgccggcgcttgacaataaagtgtttggctattccaatgaagagctgcgcgtcaagatgggcctgcgcaacgacaacgtctcgatgggcttgaagctctacctcgcgtacttcatcatcttggcgacgctcgcgatgttctacaactcggacgacttgaacacgaaagtccgccagtacgtcccgatcgaagagctggagcagtacgtcacggaaaaactccacatgctcggcaccggcgactacgggcagtacctctccgccgagtacgagttcaatttttcccaagtggcggagtactggcactcgatgcccgcgtatgacgagacgctgaccaaccagcgaatggggcacaaatcccgggtgagctacctcctcaaagtgtgggggttcttggaggaggaaggccttgccaaagtcgcggtcgattcggagattcacccgaccgacaagctcgaccacatggtgcgcaagtattacgcccaccaaaagcgcaaggacgaactgctcgccctgatccagcaaaaggagatcttctatgcctag

SEQ ID NO: 52333 - DNA, 4488 bp, Tumebacillus flagellatus
atgcctagcatcaaccgaatccgactggtcaacatccaatatgacaagggcggcaagcagtacgccgatgaactttttaaactgcacggcaaaaacaccctcatcaacctcgctaacggcggcggcaagaccctctggctgcaattggtcatgcaaacccagctccccggcggcaacatggggtcgcgccgcatggtcgacttgctcgcacacgagcgctacaccgggcacatcctcgtcgaatggaaactcgactcggcgggcggcgagcgtgagtttttgctgacgggcttttgctttacgaaagcggcggacgaagagggggagctgaagtatttcacctacgcccatccgtaccgcatcggcgacgagctctcgattgccaaaatgccgctggtcgccgacgggaaagtgatcggctacggcgattattacaatttcttgcgcaaggagtcgggcgtgcagacgttctcgcaacacgaccgccgcaagtacatccaacacctcgcgcagtaccacatctatgaaaaagagtggctgtcgatccgcacgaccaacggttccgagggcgggatggacggcttcttcgcccggtcgaaaacggagcagtcgctgttggaaaacttgctgatcccgacggtggaccaggcgctgtttcaagatgacaacgaagcgcaggacttggcgaattcgtttctgaagtacaaagacaagctgcttagaattccgcagattgagaagaatctggaggagttccaagagattgagtctgccggacgctctgtggtggacaaagtcgcggcgtactccgacgcgcagaaagtccgcacgacgctggaaggccaactggtgtttgtgaagagccgtttgcaagagatggtcggcgagcgcgaggaagaagcggcggcgctgacggaagtggtgcaagcgctcaaggagcagattcgcgaagaagagtttaagcaagcgtctctggacgtgaacgcgctgcaagcggagtaccgagccgccgagcgcaagttgggagatctcgccgtgcgtctgcaagagttggaagagcaggaaacgacggcggagaaaaacgtccgcctgcaccgggcaatcccgaaattcctccagatcaaagagctggaaaaacgcctcgcccgcgaccgtgaaacgttggcgggtctcgacatgcagaacgaagatttgctgctggaagcggcgtcgtatcgcgggcagtttttgacgctgtggcaagagaagctcgattcgctgcaagcggagttgaaagcgaagcaagcggagcgcgaatcgtggaagcaagcggaagcggacgcggagaaggaacacgaccgcatcgccgggcttttgaatgagttgagcaagtcgggcggggagcttgagaactggttcaagcagtttgagaagcaaaaagcggctgtgcgagacgctctgggcgacgaaatcgccgaagcgccggcggcggaacgggatcagctgaaatggcaggaactcgaaggcaacaaagtcgtccgcgagacggaagcgcaagtggaagcgtgggacgcggagattgagagcgcccagaagcagatcgagagcgagcgcgaggaattgcgcaaagcggtgcgcgatcaagacaagctggaaggcaagatcgagctgtttgaagcggagcgctcgaagttggcggcgcgtctggagttggtcgacctcgcgcgggaagacttgcacgcgtcgcgggccgacttggagttgaagctgacggagaagcgggaagcgtatgcgtcggagtacaacaagttggcggcgaagaagggcgcgttggaagagaaaaaagcgctgctgagcaacgcggattattacgtgccgtcgcaagagctgctgcgcttccaaagcgtgctctccgactggggcatcgaagccctgctcggctcgcaatggctccaagcccaagacccgaccgcccgcgaacatcatgttcgcagcaacccgatgctcccgtacgcgctcctgcttacagaagcagacatgcgcaaactcagagatccccgtctggactgggaaggggtatatctcgaaagtctcatcccgcttctgatgatccctgagggatcgaagtcgatctcatcgaatgggaatcatgagcaagaaatgatcccgcagggagaggtatcctcccgaggggatcgtgccgaaggcacaggggccctcgtgtccctcggcaccgacaccgcctacgtctccctgcacggcggctactctccgttcctctcgcaggaagcgctggaccgccgccgcaccgctctggaaacggagatggcgtccctctttgaaacgatggacgtcgtcgaaaagtcccgccgccacatcgagggcgtcgccgacgacctgcttcgtttcttcgagacgtataagaaaaacccgatgccggactggcaaaccaaacgcgacgccctgcaccgcaaaatcaccgacaaaaacacaacgatcgaaaccctgaccacccgcgtcaccgacttgcgcacgcaaatcaccgacgcgaaaaaaacggtcaaggacacccaagaaactctcgcgtctctgcgcgacaaactccgcgtcctcgacctcctcgccaacttggcaggcgaactcccggaccgcgaagcatcccgcaaaacccagcaagagcaggaagcgatgctccaagcggacctcaaggagcaatcccgcatccgccacgacgcccgcgaccaagaaaaccgcttgatcccggccgtctacgcgctggaaacggaagaagcctctctgcaaaaagcccgcgagcaatacctcggccgcgacgccgacacgcccgcgccgctcccgccggaagagggtctgacgtacgacgccgtctgcggcaaactcgaatcgctcgacggcctgctcgcccagaaatcggtcggccgcgacgaactgctgcgcctgatccaaaaccacgaagagtcgatcaagctcaatcaagcttacatcgacgaacaagagatcactcctaacgaactggcggcgcacaccacgctgcccccggcgtccgaactgaccttctgggaaaccaaactcaaggaatcccgcgccgagcaaaaagacttggaaaccgaacgcaccgacctccaagccgaccagaaaaaaatcgaaggcaagatcgaaaccgaagagaaaaaagtcaaaaaagacttcgaccgcgccccgcacctcttcgacgaaaccgccgatctcgccgccctgcgcgactcgttgaaacaactgctctccgacctctggaaccagcgcaaaatcaacgagcaagcgctcgacgaaatccaaaccaaccgcgaagaagccaaatcccttttgcaaaaaacggaaacgctcctctccgcctattccatcgagcgcgacccgctcgatcttgcggaagaccgcgcggcaaagcttgaatccgagccgaccgccatcgtcaacgaactcgacaaagggctgcagcgcacctccaagcaaacggaggaacgccgccgcgagatggaggacgaattcttccgcttcgagcgctcgatcgacaagtacgaatccaagatcgtgcagaagttcatccgctccgtcatcgactccaaagcggagggcgacatggcggacatcgaacaggtacgccccgtgtttgagaaatgcttcgagatgatgaagctctacgtcgagaaagcgcacctcgaacgccaagagttggaggaagccaaggttgaactcgtccaccgctgcctccaacacgccgagcgcgtctatgacaacttgaagtcgatcgcccaatacaccaagatcgactaccgcggcaagaaagtccaagcgatcgacatccagctcaaagacaagtgggagccgggcgtcggcctcaaactgatgtcgcaatacctccacgcgctgacggaagaactgcaacagaagtccgccaagggcgaggacgaagacgatatcgagaagtggttgaccgtcaagctttcgtcgaaacacctgctcaacgtcgtcgctccgatctccgaagcgcggatcaaagtgttcaaaccgcagcaggtgccgggcgagaaagtccgctacgaccactggtcggagatcatgaaatggtcgggcggcgagcagtacaccggatgctttgcgatgttcatcgcggtgctttcgtacttgcgcgccaagatgtccggcctcgacaacgcctcgaaagtcctgctcgccgacaacccgttcggcgtcgtttcgtcgccgcatctcttgcaggtcatcttccaactggcgcgggtcaaccgcgtgcagatgatctgcctgtccgaccacaacaagcagtcgatctacgacctgtttgaagtggtctactcgctgaaactggtcgccgcgatgggccgctccgtcatccaatcgagcgagcgccgcccggagagcgtcatggaagcgggcttctacgaaatcgacttcgaccaagagctggaaaccgaacagaaaacgctcctcttataa

SEQ ID NO: 52334 - DNA, 1626 bp, Clostridium pasteurianum DSM 525 = ATCC 6013; identical to SEQ ID NO: 51992

SEQ ID NO: 52335 - DNA, 708 bp, Clostridium pasteurianum DSM 525 = ATCC 6013; identical to SEQ ID NO: 51993

SEQ ID NO: 52336 - DNA, 4386 bp, Clostridium pasteurianum DSM 525 = ATCC 6013; identical to SEQ ID NO: 51994

SEQ ID NO: 52337 - DNA, 1008 bp, Clostridium pasteurianum DSM 525 = ATCC 6013; identical to SEQ ID NO: 51995

SEQ ID NO: 52338 - DNA, 1470 bp, Xenorhabdus bovienii str. Jollieti; identical to SEQ ID NO: 51744

SEQ ID NO: 52339 - DNA, 4437 bp, Xenorhabdus bovienii str. Jollieti; identical to SEQ ID NO: 51745

SEQ ID NO: 52340 - DNA, 1044 bp, Xenorhabdus bovienii str. Jollieti
atgatctggctatcccggctggagtcgacagcaaataagcaccgttttgcagccggtaaggccgtccgaacagttaaagccaatgcgattctggatgagatattagaaacacatagccaagaggctttgcgccaggatgttccaagtttattgagtcaggccgttacgcaactgcttgaaggggactggcgggctcagcctaagcataaagctagctggcatcgctactggcggggtatgagcctaccaaatacttttgtttacgaaggtgccatcgtccctacaaaaactgcatcagaaatagcctggcatccctggttggcggaacgtattacagggcaactgccactgccaatcaaggcacgtttacaacagttgaatacatatctctttcgccaaactaagggcgacaagccactctttccgggcttgctcggacaccgtgagcggtctctgcttatatttggtgatgaaaaagcactggattccatgccgcctgacggctggaagcatgtcacactgactttggctgatatgggcgcgtttcgacgtgctccgcctttaccgtatgagtcatcaggttgccgcgatcttccggctatcattgttgaaaactctgatgtgtattatcgactttgccaacttaatcgagttcagactcactggtcactggttatttatggcgcgggaaacaaagtgtcaggccaagcagagtgcgtgtcacaacttctcaaggtcgaacaggtaaaacaactgctctattttggcgatttggatgtggcgggcttaaaaatcgcccatcagctgtactgtaagctacttagtgattacgatatcagcctacaattggatcggtggctctatgatgaactgatcttaaattgctgggtgacgcctgaaggaaatgccaacagcgaacggttcgattttgagtcgctgtgtggttggatgccgcgctttgttttacgacaaatgaagatgctgctcgcgacccatcagcgtctgcctcaagagggagtggcatcgttgggtttggtcatatag

SEQ ID NO: 52341 - DNA, 1422 bp, Bacillus subtilis
gtggaaaaagtggatcaatcattaatttcgatctttgatgttacagatgataaacctgagctactacaatcgatgcgtgatattgcacaactttcgggtgtattaacggaattaagtgataaggagtattttcagtcaccaatccacgtacttcgtttcctccgagtgttaaatattattaatcaagaagcactcggtatcgcagaaccaattgaaagcgaggaaacattattttatcgctatcgcaatgtatatggctatgatgaagcaattacgccaggttacatgaaacatcttgtgttcgttttgggaaaattcaattgggtagcaaaaacagcaaaacgaattaaaatgcgtgatgtaggaaaacgaatgatggatgtactgattcgtttagctaatgattctcttgcgtattatcttaatgatgatgtggcaaggtctctctttcaagcaaaaagagatgcagaactaagtgaagcatatgatgataaagggatttctggtgggaataagctggctagtatgattaaaaacgtggaagaagctgtattgcttctccatgagagagagcttgagtatttagcagaccgaaatgcattaacacaagtagaagtgattcatcatctgatgacagagctagaaggtaagatggcagaacgaatggtgaaatttgaaacaatagatcaagaacttgtgttttccgatataaaacaacgaggtacggctgcgattagtgatgggacaaaaattagccttgggacaattaataaaattctaaagttcgcccacctacaagaaacggattttaaccatagaatccagccagaagagtttcgcacgttcattataaaatcgtttgatccgccccttggttctgaaataccgaatgcccatcaaatactaagtttcatggaacaaggacaatacgaggacgaaaaaatagatggtctatgggcgccagtgaaatttgctagcccgctatcaccgagggccattgatgagggaattaactatatcgaaaactatgaacctattacagaagagatagaggaaacattggaagaagaatttccaggcacagaagaaataatggaagatcagttggatgaaataatgggtgattcgaaatggcaaatgacgaaaaaaatgatacacacagagcggattgaagcatatctggaggaagtagaagaagctggccttgacgaactaattattcggtctggatcatccaaatggagtgacgtactcaacggattaattggtgtttcagcactagtggccaataaaaaagctgacattgatgaacatgcgaaaaagaaactgtccgataacaaagatcagcgtgactggaggtggagtgaggatgaacaaggaacatatggaattagaaaacgaggaagaaatcacgaacgttaa

SEQ ID NO: 52342 - DNA, 693 bp, Bacillus subtilis
atggaattagaaaacgaggaagaaatcacgaacgttaatccattagcaaccctacaatcgataaaaggatttttaactacagaggaagagcttgcatttatgcaaatcctgttctcatcgtctgctacaattcgaagtgggaattttggactttcacgtaaggaagtagaaaaaataattggaattacagttgatgatcaagcatttttttcttttctcaagcgagtaaaccaagctgttagtcgttatatgaaagtgatttatgatgagcggagaaatcaagtggtagccctcatgcgcgtgcccgcaaaacaagcaaaaacactattaaataaagaaagtctagctattctcatgtttattttttatcaccaagaagtactacagaatgaatatacactcttttcccaattgattaatagttttggccacgaatcattgcaggtaacacgaaagattcaagctaacttggatccgttgaaaaagattggggcaattgaagtatatgattcgaactcagaggaagaagcctatcaacttacatctatcggtgctaatttgttttcaaattcctttttacgaagatacaccgagtttagtcaatcgaatcagttgcacatggatgatatcttacggttctttaaacgctacaacatgaatggaggcacaagtaatgattccatggagacttaa

SEQ ID NO: 52343 - DNA, 3213 bp, Bacillus subtilis
atgattccatggagacttaaatttttgggaatacgggattatacgccgacagttatggatttctctgataaagatcaccatattttaatatctggaccaaatggtgctggaaaatcaacggttacgttttgtatgggcggcgttctttattcaagtaaagttgatcttgaagggttaaagtcaaacaacctttcaacagaccaaacgtggcgagcaaagattgaattgctgtttaaaaatgatgggcaaatcaaggttgatgcgccacagtttgtgcagtttcgattagacattgaacagaaaccgggtgatccggtaaaaagagaattttatattcaagagggggaagtcattgacaagtgggaacgggaaacgaaatattcttctggagatcggaactttaactttactgaatataaaaaccagattctctataaatatgctgttgatccggatgagttttatttaatttggtatcaaaaagaggtaaaccaatttgcagtgatgcatccagaagaacgcttccgtattttcagtgaaatgaatggtattgatagaatccagaaaaactgggaagaaagcaaagaacttgtaaaagaaacggagcagaccttgcaggaagcagagagtaaacaaggccttaataaactccagttaactcaaaagaaaacggaattagacaggtattatgatcgaaatgagcggttagaagacggattcaagcagtatctttcagctcttaaatggttggaaaaacatcatcttaatcaaatgaatactttaaaaggtcaaatagagacactaaaagcagacaaagaagagaaaaatacagacaagcagcaagatttaattttacaagcagaccagagagaagagcatgaaaagtttcagtcagcaatcactcaaatggagtcccgtgaaatcgggctagccgatgaactaaatcatttgcagaaagagataacaagttataatgataaagtgaaagctatctcaaatgaaatcgaggaaattacgaagagagtagaacgaatgggcatgactgaagaagaagtaaatgaagctttggttaatgcggaggaaaagtatgtttctattgatgcttcaatggaagaaaagcaacagttgttgaaaagaaataaacaaaaattagatgacctaaccccgcatattgctgaactaaaagtgaagattgaccaagacagtgctagggaacaagacgtgcgtaaacttattgatgcatataaaagtagtcaagctgtgcaggaagagatggagttcaatgagcaacgactagaaaatgcaaaaaatgaaaaagggaaacttataattaaaaaagacaatttagaaaaagaactagaaaatcttagaatgaatcgcgtttacagttctcgtcaggaagtgtctatccaatatttcaaaaagcgaaatatagaagtctatcctttgcgggagcttgttgaattagatgaaacagctaagccgaatgatgaagatttgtttgatacgataaagtatacgttgtttgtgaaccaaaaggattttcatgcgccaaatgatttataccatgtcccattgccaaatattgttccggaaaaaacaattacacaacttccggataaacatttgcagataaaaaataaattaagcaataatctttatccgcttgcggtaaaagcactgtggtgggttaagagcttttttgaaaatgaaaaaccacagattcaaaatggtgtgcttctcgatgcgagagggataagaggtcctcaagaggaaaagcggattattctaagtgaaaaagttttaaaaaaatatcaactgcaagtaaaagatgagcttgatcgggttggcaatgacattagcattctatccaatgaaatagatgaattaacacgtagaaatagtacgctatttcgcagacaagaatctttaaaagatgcggaagcctttttgataaaagaaaatgaacgagaatggcgaaagagtaagcattacaatctaagtaatgaaaaacttgaactcgaggaaaatagggatgagattcaggaagagtggaataggctcaatgaagagcgtgctgactggaagcaaaaggtagaaaccttcaaaaactatcaggaaatttttattcagtatgaaaaagagaagggaaaaataacagaagtacgccaattgaagcaatacttaattgagttagatgaagagaagaagaataaaaatgcacagttggaacaaattggttctcttttagatgagaagcgacgtgaagaaaagaaattaaatcgggacatagaagatttgaaagaaagcctcctatacaaagaccgagaaattgaatcaatagaaaggcaaatcaaacatcggtctgaagaatatttaacgaatgaagagaactattcaacaatcaaacatgacatccaaaggttattagattctgtaaaacaggaattaaaagattcattagagcttacagaactacctaatgtaactaaatctgaggcagaagacatgcgagaaagtggaaaaattaaatactctcatgcagcaaatgaaacagggattgatgaagctgctccagaaaattatcaaaaaatgaaagaagagtatgatcgttcagcaacagaagtgaaggcatccaaactattgttagaggaatatacagagcgtatggaacgtctaaaagaagacttagaaagcacaattaatagtaaagttattggtgttagccaaaagtttgtccattatatgtctctgtttggctttcaaggggagatagattgggatatgagaacagaccggcgtcatcaaattcactatgctttatatattaaagcacgtaaagaaggacatcgaggaaaattagaggatgtaagtgttaaagcaagaggcggcaaagtaggaaaaggggtatctggtggggaagagtctcttagttccttactatttgctttggcattattacaaacgattcaagcaacaccaggctatatcgtactcgacgagtttgatagtgcactcgatgaaggacgtaaagataaagtgtttgagttatatgaacaggaactacagcggaaaatgataatcttaactcctaagtctcatgaagaagagtacctataccgtttttctaaagcatatgttgttcatcacaatcccaatattccgcagagtaagatctttaaggtgaaaagaagtgaagaagtgctaaaatga

SEQ ID NO: 52344 - DNA, 1323 bp, Bacillus subtilis
ttggtttctgtggagttacaagattatttgcaataccatattgtattaaaaaatgagagtttacatgttagtgatgcatcggaagagaacggcattattcatataccggtaattaagcgaacggcgagaacaagaaggactgttgcaaggctaatggttgggattaatacggacttacagggaatagataaaattccaacaaaactaaccaacagttttaaaagtccgaatacgaaaaagcaggttgatctttctgatgaaacctatgaatggattcgttttggatggataattcgtgaaattcgtttagaaaaagatgagagaacagtaaaaacagaacgatatcgaatgggctttatactttatcaactgagcttaaaggcagaagcagaagcagaaaaggagagtagaaactggatacttgattggaataagcagtgggaagttgccaggcgtagcgatgtgccaggttttgaacaagaccagcgcgcagatgttgtttccctattagcaaagcacttagatgaaattgcaagtgagacagatagggttttagctggagaggcaaaattaattaagagtattcctccttcttggcgtttaaggaaacaagtagtattcctacattttttgattgctttataccaactggcatgtacggaaaaacattttgattggaagcaaataggtgctacctactatcggataataggtggatcaaagcagtttgatgcttataagaaggaatttattgaagaaacagaaaacctccttcatcgtccaattcaattgttaggtctggcaagtatggggacaattacaccattgttttttactgggccaatgcaaggggactacgtggattatagttatggtactgtccatgcaacgacagatctagctgttttttcggagacgtttaatacgaaagcagacgtgttgtggctggttgaaaatagaggtgttttaacacgtatggcctacgaggaagaatttttaagaggtacgaaaagctttgtattaggtgtggatggacaagttaggtctgcacatagactactaatttctcaagtagtaacgtgtgtcagtcaagttattatttggaccgatgttgatgaagcaggttatctgattgccgagcaattatataagttaacacaagatgaacatgtcctaacaaagtggatagtaccaccattaaccgtggtgactgaatgggaaacttttgtaaacaaataccaacaatccatacaaatgaggaaagaagagcaggaacaagaaattggaggagtagagctgtggaaaaagtggatcaatcattaa

SEQ ID NO: 52345 - DNA, 1500 bp, Geobacillus stearothermophilus
ttggacaacctaaatatactcgatgtaacgaacggctatcgcgaacgcatgagaaggctggcgcttttcgaccctctattcgaactcgaccgaaaacgtgaggtggatcaacacaatcaacccattgacatgaaaggtctcgggttactgaccttgttatttttcttggaacaaaaactgatgagacagtacaaaaccggtgtgaagcaattagcttcttttttgaaaaaactgacagaaaacgagtacgtactagatgaagcatcgtatgaaagattagctaggacgattattcaaacgtttcggccgacgacggggagaaagcgaagttattccttttacgattgggaggaaagaacagaaagcacaattgaatactccattttaaaagcaaataatttcgatgtcaaaacgaatacgcaatattacacgcttgatgaagatggactagagttgttgtttgcgacaaaggagttttacagtgaattccatttatcgatcaatcaattaatgcttcgtaagcaattagaaaaaggggagtttaatggagcgttgcgacaaatcaatgaaatgaggattgatgtagaaacgttggaagaacgtatagtgaagttaaaacatgaaattcagcgaagtattatttcagaagaaacgtttgaacgatataaacaacttcttgaagatatatacaacagattagcaagagaagacgaagagtttaaagagctgcgtgaatttgtcaaagaaacgaaagagcgcctctattcgcgtgatattcatcagaaagaaaaaaagacatatgaactcatcctgaaaattacccaggaattagaatcggtgcactacgcccattcaagtctgctagacaaagctttatctttaaaaaatactactcttgtctcagcacaagaatctctttattatacggggcttcattcctttaattttgaccaggatcttgtttcttatattgtttccacgcctcttccactagaagcaatgaaaggagtattgcatccctttttaaaggttgaagaaaatcagttttggtcgccgctagccgttttagaggaacaaaatattacagaagaacgtggcgaaagagtcgagcaagggtttattgaagtagaagaaggaagcagtgatgacccttaccgaagatggttaatgttcaaatacagggaattaatgcatttatttttggaggcttacaaacataatcgaggtcataccctctcgcaatttatggattatttagatgaaatcggacagtcgcatatttatgaacagcgatatttttacgatttttggattattatgcaccagcgttcccctattcaaaacggcgaaatgcaagaggaggaaggaaatacgctgctcggagacgcgctcgctcttcttggaacgaacatactggacgttcaagaaggtcaaggtgtcattcaaaaatatgaacgattttccattcaagaaatgatcataacggtgagtgaacaatga

SEQ ID NO: 52346 - DNA, 744 bp, Geobacillus stearothermophilus
atgaattatcctgaacaaaaaattattcaagcttttcaactatatacgaaactagctcgcgacggtgttgttggtcaacaagcggttcagctttacaaagccgatgatgatgttcgtgggctattagatatgtttagtagagaagtagattgtgtcatcgttattacgagtgagcaaatgttcttagtgccgcgtacgaagctttcaccttttcatgtcagcaacgattggattaaacgaaattatcttcgttcaggggcaacaaacggggacatttatttattatattttgcaaccattatattattcggaagtttttacgatacgtatcaaagtgaaaaaccaacgagaacctttcttcgtctagatgagtgggtgcatctcgtccaagagcgcattgatcaattaaaagagcatgacctagagaaattaaaacaatttgaaaaagagttttcttataattggagcttaattatcgaaaaatgggatgcgatggatgatataaaagaaacagcgaagaaacaaagcggcaacacaatcagtcgcttaagctttatcgataccgtaaggcgatttttaatcgatcaagggcttattgttgatattgggaatgatgaagtgacattaacggaaaaagcgaaaacgattatacagcgcttctttatggaagtggaatacaacaaaggaattttcgaatttatttacggatttgaaaggaaggaagaagatgccatcgatcagtaa

SEQ ID NO: 52347 - DNA, 4413 bp, Geobacillus stearothermophilus
atgccatcgatcagtaaaattcggctgacgaacgtggtgtatgaagaagggctaaaacgttacaacgacgaaattttccgatttggcggacataacggggcgattttgcttgaaaatggcggtggaaaaaccgtttttattcaaactgtactgcaagcgattttgccgcatgtcgatgtggccgaccgcaaaatcaagagcacgctccaactcgaaaatgctcctgctcatattgcgattgaatggatcatgaatgatgaaccgagacgttatgtcgtgacagcggtatcgttatttatgacgaacaatggtttagattcgttgcgttatgtatatgaatacagcgctaatgatccgaatgggattgaaggcattccatttgttcgcgaaggaaaagacggaaaacgaccagctgaacgaggagaaatgcaagactattacagccatatgaaggaaaaatcgtttcttgcgcgtacgttcaacacgattaaggaatacaaggcgtttatcgaagaacaatatcacattatttcaagtgaatgggagagtattgtaaagattaatagttcagaaggtggagttgaagctttttttgatgaatgtaaaagtacgaaccagctttttgatcgcttgcttattccaacagtcgaaagttctattgttgggcatgatgagaatttatttgcggacatgttcgagaagcagcacacgagcttcaaacattacaaaaagctaaaagaaacaatcgaagaaaacaagcttattcaacaagaacttgaaaaatatgtccaaacgtatgaacagcttcatcagagtgagctagtttatttaaaagcgaagcagcgtgcaaaaggtgcgtggcttgaaatactcaagcaaaaacagtcttgcgaggatgaacgaacagctatatggaagaagctagaggagtggaaaaacagctatgatacgcacaaacagaaatccgcttcttacgaaattttagtggaagagacgttgtggaacgaatttgatcaacaatataaaatggctctcgcacgaagggatgaaaaagaagaagaactcattcaacaggaaaaagactattattcattaaaactagcggaactaaaagagaaacgaaaagaacatgaagaacgtctggcgtatattgaagacgaaatgaaaaaacttgaccaagcagatgaacttgttagctatgcggatgaattagaaattgccaaacgcacattactaggatgtttcatggagcagttagatgcaatcgaaaaagaagaacaaggtctccgatatgaactgaatccggttgagttgcggctcgaacaattgacgaaagaaaaagaagatttggagcggaaagagcggcacgcccgtgatcatttatctggaattaaaagccgaatcgattcacgaacaaaggatatagaccatcttaaacagcagctcctcgcaaatccgtcccaagaacaggtagaagaagaaatggaaaaatgggtgcagcgacatcaatggttagacgatgaaatcatctgcttacaacaagaggtcaagcaactcattcaagaggaaaaagaagcggaagcgagaaaagaagtttatcaacatgacctttcgtccacgaaaattgagcaggagaataccgcctatcaactaaaagaaattcaacaggaggaaaaagcgcttattaagaaactcgcatctcttagaccccagtgggcgacgttagaaagcgttcatataaatgaagcaacgattaagatgagaatgatagaacaaatcgaaaagagaacgaaagagcgaaacacgttgttagttcgcgaacgaatggcctatcggtttgtcgatgattatagcgagcaagatacattttttagtgatgcgtttttagaacaacagctgaaatcgtggaaaaatcagtttgattatttggtgacaggtgttgaatatttacagtcgttagatgaaaaggaacgcgtgaagaaaaaagatttccagctatggccgataacgttaattacaacgggtaagtcaaaggaacggttagtcgaaaaaataaaacaagttaatgaccgccttcaattcccgattatagtaatctcaacagaagaagccgtcactatccatgatgaacattttccatattactggattgaaccccgtcactggaatgaggtgatcgattcggaagcttttcatgcctggaaagaaaatataaaaacgggtgcgaaagaaacgacgaagctgcgtgaagagaaagaagatgaaatcaaggcatggcaagatgtgtatcgagattttcaaaagtttctccagtcacatccatatgaaaaggtagaaaaccttcacaaaacacatgtgcaattggtccgccaaattgagcagctgacaatgaccattaaaaatgaaagggcgcgaatcgacgaactgcgcacgaaaatagcacactatcaatcccaaactcatctctatcgggaagagatgcaagggatagaaggaaaaatcgaaaaaggaaagcaataccttcagtataaaaaagaagtagaagaagagcagaaaaaacaaaaacagtgggaagaaacaattgtttcactcgagaaagaaataaaacgtgtgaacatgcgtattcatgacgtcatggaacaaaaagctgcgattgaagagcgcatccattcattacagcgagatatatatcgtattaaagaaaatcatgagtataagtcgttacggtcgctgcgaccaatttattcgggtgaaagtgagcatgtcattcgtgaaaaaattcgggagttagactataaaatccaccaaattcgaacgacgtacggtgagtggaaagtgaaacaggactttgaaaagcgtgaacttgaacgattaacgaaggaaatcgacgagctaaagcaggaacatacggacttagacgaagcgcggccgttcccaagtgatggtcatcatttgttacaaatgctaaaggcgagaatggtatcattgaaagttgaggtcaaaaatctaaatgatgaagtacaaaaaaaattagctcaagaaaaggaacaaaaaggaaaatggaaatccaaattagagcaattccaaaaagattatctgaatcaagaaatattccgatttactaaatcgctcgatgaaataaaagaagagctgcaaaaggagaaggaagatttagacaaacgaaaagcgtttcttgatcaagaaaaagatcggattgaaaaaacaataaaaaacattgaagaagcagaacgcagtttggatcgatttgtcgaaggacaccattttaatgcgccacagattgccgcacttccattaagtgaggaagaaaatttggaatttacgtatcatcgcctgcgttttatcaaatcgattacggataatcttcaatcctgcaaaaacgctgttgaagtgatgaaaaacaatgtggaacgggcgaaacgtttatttagagacttctgtaatcattcgatcaaagatgtaaaaatgcggcagatggcattagacgggatcgaacataaagaaacgtatgaagacattatcgattttaagaaaaacatgataagaagcgtcgaaaatgcgacgaattatgccaatgagcacatccgtcaaaaagatgccgagcttcaagcatttattaatcatattcattcccatttgagaacagtagtagaagagctcaagcaaataccgaagaaaacaagagtgaaagtaggtgatgattggaagcaaatctttaccttttccattccggagtgggaagaggaagttggaaagacacgtattcgcgattatattgagtggatcttacagcagcttgaatccgagcgatttttgaacgaacatggcaagcaggacgatggaaaagtgcgaaaagaaattgaaatgtggctgcagtcgaagcaacttttacaagtcgtcatgaacaatgagacaatgaaagtaagctgccgtaaagtaacgaatgataacaaagtgacagcgcgttcctattcatgggaacaaagtaatgtctggtcaggcggcgaaaagtggagtaagaacatgaccctctttttagggatactcaactatgttgccgagaaaaaacagcatattcagccgaatatgaaacgtcatcgcacggtcattctggataatccatttggcaaagcatccagtgatcatgtgttaagtcctgtgttctttgtggctgaacagctcggtttccaaattatcgcacttacagctcatgcggaaggaaagttcctgaaggactattttccaatcatttatagctgccgtctgcgtccatcctctgacgcaaataaaaaagttatgacaaaagaaaaatggctccactatgcttatttccaagaccatgaaccaaaaacgctcgacagattaggtgaagtggagcagctggagttgttttga

SEQ ID NO: 52348 - DNA, 1017 bp, Geobacillus stearothermophilus
ttggaacagattaaaaggttattagctactttcccgaagaaaacgatttcattaggtgagcttgaagagttaatcaagcctcggattcatacatacgatgaattttccaaaacgattttacagttagaggatgagcgcattcttgagatggtaaagtcaaaagggcgtacaacaagaaccccgtctttagcatttcactatcggatcgataaaagtctattaatgggagattttcataaggaactgctgcattatcgaaatatgcttcacccatcgattaagatcgattggtattaccgtaaggatccgtctatttggaaaaatgatttacctatgattatgaaaatcgataattacttgaagaggcactcttttccgaccaaacctgttcccgcaccggaacgaagtgttgaattagtcggtgatgagaaatggattacagatggcggaggaaaagaactattagaaagaatcggaatttttaacagctttcacattattcctgtttccgaacctttaatgtttgccgtcaacccaacaaaagtaaacgaaacaactcaatttcatctaattgttgaaaataaaacaacgtaccaaggtttactcccagtgcttaaagaaacctctttttcaacactcatttacgggagtgggaaaaaagtgattagcagcatcgagcagttctccatgcaatatcccgtagacgcacaccattatttctattattttggggatatcgatcgtgaaggaatttcgatttggcattcattaacaacgaaaacgcctgtcatgttagcccttcccttttaccgagcttgtttacaaaaggacgcagtagctggcaaggagtatcaaaaagaacaagcggaagccctaaaagcgtttcttcgcttttttacaactgaagaacagtcacggctaaagtctcttttcgcaaacggcatgtactatccgcaagaaatcttaaagacgcacgaattacaacaaatttggagggagtcgaattggacaacctaa

SEQ ID NO: 52349 - DNA, 1500 bp, Geobacillus stearothermophilus; identical to SEQ ID NO: 52345

SEQ ID NO: 52350 - DNA, 744 bp, Geobacillus stearothermophilus; identical to SEQ ID NO: 52346

SEQ ID NO: 52351 - DNA, 4413 bp, Geobacillus stearothermophilus; identical to SEQ ID NO: 52347

SEQ ID NO: 52352 - DNA, 1017 bp, Geobacillus stearothermophilus; identical to SEQ ID NO: 52348

SEQ ID NO: 52353 - DNA, 1503 bp, Geobacillus icigianus
atggcagtggacaagctagaattggcaggggtcacagacggctatcgcgagcgcatgaggcggctggcgctttttagcccgcttttggaccttgaacgaatgcgctctgccgacctcggcgggcagccgattgacatgaaagggctcgggctgttgacgctcctctttttcttcgaacaaaagctgatgcggcagtataaagcaggagttaagcagctcgcggcgtttttaaaacaattgacggaaaacgtgtacgcattggatgacgaagcgtgcgaacatttggcgcggacgattattcaaacgttccgcccgacatcgggaaaaaagcggagctatccgttttacgattgggaacggcgcgaagagagcgcgatcgaatattcacttttaaaagcgcacggttttgatgcgaaaacgaacacgcaatattatacgctcgatgaagacgggttggagcttgtgtttgcgacgaaagagttttacagcgagtttcagttgtcgatcaaccagctcatgttgcgcaagcagctggaaaaaggggagttcgccgcggcgttgaaacaaatcaacgaaatgcgcatcgacgttgaaacgctcgaagatcgcatgacgcggctgaagcatgaaattcagcgaagcattatttccgaagaaacatttgagcggtacaagcagcttttggacgacatttacagccggcttgcgcgcgaggacgaggagtttaaggagctgcgcgaattcgtgaacgacacgagagagcgcctatatgcccgggatattcaccaaaaagaagggaagacgtatgagcttgtgctcaaaattgccagagagttagaatcggtgcattacgcgcattcggcgctcctagataaggcgctttcgttaaaaaatacgacgcttgtgacggcgcaggaatcgctttattatacggggctccattcgtttaatttcgaccaagacatcgtgtcgcgcatcgtttcggctccgctcccgcttgaggcgatgaaaggggtgcttcatccatttttaaaggtggaagaaaacaaggtttggtcgccgatggcgattttcgccgagcaaaacattaccgaagagcgcaaagaaaaggcggggccgcgttttttagaagcggaagaggccgaagggggcgatcggtatcgcgcatggctcatagcgaaatatagagagttgatgcaactgtttttaaaggcgcacgagcaggagcgcgcgggcacgctcgccgcgtttttcgattatttggacgacatcgggcagtcgcatttgtatgaacagcgctcgttttacgatttttggatcttgatgcaccagcgctctcccgtcgagcaaggcatggaaggggaagaaggaagcgcgcttctcggcgaggcgctcgctttgcttggcgggcgcgtgctcgaggtgcaagaagcggatcgcatcatccgccgatgcgagcggttttcgattcaagacatgattataacggtgagggaacgatga

SEQ ID NO: 52354 - DNA, 747 bp, Geobacillus icigianus
atgagaaactatccagaacaaaaagtcatgcaggcgtttcaattgtatacggcacttgcgcggcaaggagtggcaggcgcgcaggcggtgcagctttataagagcgatgatgaaatccgcgcgctgttggatgcgttcagccgcgaagtcgactgcgtcatcgtgttgacgagcgaacggttgtttctcgtgccgcgcacgaaactgtcgccgtttcatgtaagcaacgattggatcaagcgccattatcttcgcgccggcgccaccaacggcgatttgtatttgctttattttgccgttctcgtgttgttcggcagcttttacgacacgtatcaaagcccagagccgacgcggaactttttggcgatggacgaatgggtgcgccttgtgcaagagcgcatcgaccaattgaagcggcacgatccggacgaattgaaacaatttgagcaagagttttcatacaactggagcctcatcattgaaaaatgggaggcgatggacgatgttaaagagacggcgaaacggcaaagcggcgcaacgattagccgcctcagcttcctcgatgtggcacggcgctttttaatcgaccaagagcttgtggtcgacatcggcaacgatgaagtcgctttgacagaaaaagcgaaaacgatcatccagcgctttttcatggaagtcgagtacaaccgcgggattttcgagtttatttacggattggaaagggagagggacgatgccagcgatcagtaa

SEQ ID NO: 52355 - DNA, 4413 bp, Geobacillus icigianus
atgccagcgatcagtaaaattcggctgacgaacgtcgtatatgaagaaggccgcaagcggtacaacgatgaaatgttccgatttgacggacataacggggcgattttgctggaaaacggcggcggcaaaacggtgttgatccagacggtgctgcaagcgatcttgccgcatgttgatttagcggaccgaaaaatcaaacagacgcttcaactcgaaaacgcgccggcgcatatcgcgattgaatggctgttgaacgacaaaccgcgccggtacgtcgtaacggccgtgtcgctgtttatgacgaacaacggactcgactcgctccgctacgtttacgaatacaacgcgaacgacccgcacggcattgaaggcatcccgtttgtgcgcgaaggaaaaggcgggaagcggccggcggaacggggcgaaatgcaagattactatcatgatatgaaagcgaaatcgatgttcgcgcgcacgtttgcgaccattaaagaatacaaggcgtttcttgaagagcagtaccatattattgagagcgaatgggaaagcgtcgtgaaaatcaacagcacggaagggggcgtcgaagcgtttttcgacgaatgcaaaagcacgaaccagctgtttgaccgcctgctcattccgattgtcgagagcgcgatcgtcggccatgacgcgaaactgtttgccgacatgtttgaaaagcagcttgccagtttcaaacattataagacattgaaagagacgattgaagaaaacaagctgatccagcaagaactcgagcgatacgtggagacgtatgaggagttccaccatcaagagctcgcgtatacgaaagcgaagcaacgggccaaaggggtatggctggagacgctccagcaaaagcaagcgggcgaaaacgagctaaacaacaacgccgcccaatgggaagaatggaggcaaacggaagcggcgcaccgccaaaagcgagcgacgtatgacgtgttagtggaagaagcgtgtttgcgtgagctggaacgcgaatatgaatgggcgttagcgcaagagaaagaaaaggaagaagaactttggcgccttgagcgcgactatgattcgctgcggcttgccggatacaaagaagcgcgaaaacggcatgaagaagcgcttgcctatattgaggcggagatggcgaagcggaaagacgacgagacgctcgctcgttgtgaagaagaattggaaatggcgcgccgcgcgcttcttggttattttatggagcagcttgagaaaatcggccaagaggagcgaagtgtgcgctatgaactgaatccgattcaaacgcaaatcgaacaatggacgaaagacatcgaaaccctcaaacggacggcgcaagaggcgcgcgagaagcgggctggcattcaaagcgtcatcgatgcaagagaaaaagacatggagtctataaagcagcgcctattggcgaatccgtcgcagcagtcggtcgaggaagaaatgggaaaatggatcgagcgcgaacaatggttggacgaagaaatcgtccgcttgcgccaagagatgaagcaatccaagcaagcggaacgggcggcggaagcgaacaaagaggcgcttcaaaagcaatgggcgaagcagcaggcggcgagcgaggcgctggcgcagcggctcgaaacgcttgagaacgaagagcaagcgctcattcagacgctcgcctcgcttcgtccgcaatgggccgcactggatagcgtctacatccaagaagagacgatccggatgaggcttcaggaagaaatcgaaaaaagaatgaaagagcgagaagcgctattagtgcaagaacggatcgtgtcgcggcttcacgatgcatacggcgaacaagacgtctttttcgccgacccgtttttagcagagcagcttgcttcatggaaaaaccaatttgatttcgtcgcgacgggtgttgaatatttgcagtcgcttacagaagacgaacgcgcgaacaagcaggcgtttccgctctggccggcggcgctcatgacgacagcgaaagcaaaagagcggctcgtgcaaaaagtgcggcaaatgaacgaccgcttgcagctgccgatcgtcgtgctgtcgacggatgaggcggcgcgcgtggaagagacgggcatgccgcatgaatggatcgcgccgcgttattgggaggaagcgagcgatccggtcttgtttggcgcttggaaagaacgcatccgcgaaagcgcccgcgacatgacgcagcgccgtcaagagaaagaagcggagctgaggctttggcaagacgcgcaacaagcatggcgcgcgtttttggcggcccacccgtacgaagcggtcgaatcgctccgcgctgagcacgccgaacggttgcgcagcattgaacaattgacgcttgcgatcgacaaagaaaacgcccgcatcgatgaatgccgcgcccatctcgagcgagccggatcgctcatcggccaatacgaggaagaatggcgcggatggcgcgacaaaatcaaggatgccggtcagtatatgcaatataaaaaagaagtgcaagaagcgcggaaacaagcgcaagcgctcgacgagcaactagcggcgcttgccaaagatatcgcccgtctcggctcccggcttgaagaggcgcgcgcccaaaaaacagaattgaaagagcgccttcggtcgttagaagcccagcgccgcgccgttgaacaaaactacgactatcggtcgctccgctctcttgcgccgatttactcacgggagagcgaagaggtcattcgcgcgaaaattgaccaatggaagctgcgaattcaagggattgaaacgacgtacagcgagtggcaaacgaagcgggagtttcgacaaaacgagattgacaggctgacaaacgaaatcaacaagctgaaacagaagcgtcccgaccttgacgaaacgaggacgtttccaagcgacggcgcgcagcggctcgaacggctggaggaacaaatcgcgtcggttcaagaaacgctaaagcgcctgaaacaaaggacgcaagaggctttaaaacgcaaagagcggcaaagcggcgtcgtgcaaacgaaagagcagcagtttcgcgaaaaattcccgaatgaggcgcggtggccgttcgctgcgccgcttgccgacatcgccgcgcagttggaagcggaacaagaagcgctcgcaaagcggaaagcgtttctcgaacaagaacgcgagcgccttgccaaagagatgaaaagcatcgagcaggcggcgcgtcagctggaagtagcgaaagaggtgcatcatttcaacgcgccgacgatcgccgccttatcgttgagcgcggaagaagcgacggcattttcatacgaccgccgcggcttcatcgaaggggtcacggaaagcttaaaggcgggaaaacaagcggtcgaagcggcaaaagagcgcgtcgagcgcgccaaacggtcgtttcgggagttttgccgcacgtcgattcaagatatgaaaatgcaacaaatggcaattaatggaattgagcataaagaaacgtacgaagacattatcagctttaagaaacatatgatgaaaagcgtcgaaagcgcgacgaactacgcgaatgaacatatccggcaaaaagacgccgagctgcaggcttttatcaaccatatccacacgcatttgcgcacattggtcgaagaattgaggcaaattccgaacaagacgagagtcaaagtcggggacgaatggaagcgcattttcacgtttaccattccggagtgggaagaagaagtcggaaaagcgcgcatccgcaaccatattgaatggatgttgcatcagcttgagtctgagcgctttttaaacgaacacggccagcaagatgaagcgaaagtgcggaaggaaatcgaaatgtggctgcaatcgaagcaacttctccaaatcgtcatgaacaacgaaggcatgaaagtgaactgccgcaaagtgacgaacgacaacaaagtgacgacgcgctcatactcgtgggagcaaagcaacgtctggtctggaggcgaaaaatggagcaaaaacatgacgctctttttaggcatcctcaattacgtcgccgagaaaaaacagcgcctccaaccgacgatgaagcgccatcgcaccgtcattttagacaacccattcggaaaagcgtcaagcgaccacgtcttaaatccggtgttctttatcgccgaacagctcggctttcaaattatcgcgttgacggcgcatgcggaagggaagtttctccgcgattatttcccgatcatttacagctgccgcctgcgcccgtcgtccgacccgaacaaacaaatcatgacgcaggaaaaatggatccatcatgcctacttccaagaccacgccccgaaatcgctcgaacggctcggcgaaacggagcagttggagttgttttag

SEQ ID NO: 52356 - DNA, 1017 bp, Geobacillus icigianus
ttggaacaaatcgaaaagcggctggcggcgtttccaaagcggacgatttcgcttgtggagcttgagaagctcatcgagccttttgcacgcacgtatgaggagtttgccgaaatcgtgctcgggctcgaggcggacgggacgcttgagatgataaaggcaagagggcgaacgacgcggacgccgtcgcttgcgtttcaatatcgaattcataaacatcgcttgatggaagattattaccgcgagctgcagcgctggcaaaatcggcttcatccggcgattcagcttgacgcatattacggcaaagacccgtctgtttgggagcgggacaaaccgtttattgtgcaaatcgacgactatttgaacacgcattcgcttcctcacgaggccgtggccgcgccggagcggagcatggagctggtcggcgatgagaaatggattacggaaggcggcgggagggaggtgcttgagcgcatcggccttttcgatcgcctccgcatcatccccgtttccgatccgctcatgttcgccgtccatccagggaacatggcgcaagcggtgcagcttcatctcattgtcgaaaataaaacgacgtaccaagcgctgttgcccgcgcttttggacaccgtgttttcgacgctcatttacgggaaaggaaaaaccgtcatcagcagcatcgctcaattctcgctgcaatatccggtgaaagccgaccatcgcttttattatttcggggacatcgaccgcgaaggggtggcgatttggcattcgctgtttcaaaagaagccggctttgcccgcgcttccgttttatcgggcatgcttgcaaaaagaaccggcgcgcggcaaagagtatcaaatagagcggacggaggcgcttgcttcgtttctttcctattttgcgcccgatgagcgagagcggctttgcgagctgctcgcctccggcctgtattatccgcaagagacgcttaaaacgcgggaattgcagcacatttggagggaatggcagtggacaagctag

SEQ ID NO: 52357 - DNA, 1521 bp, Bacillus thermoamylovorans
ttggaaagccttgatctaaaagaaataacgaccggttacatggagcggatgagaaggcttgccctctttgacccgttatacgatttggaacggaaacgggaagttgacttagaaggtaaaaacattgatatgaaaggccttggtcttttagctttactatttttctttgaaaataaactgattcgtgaatcaaaaacaggtgttaagcaattggcggcctttcttaaagaaatgacccatcaagtttatatattgcgtgacgagaaatatgaagagtatgcccggaccatcattcaaacgttcagaccgacacatgggaaaaaacgaagctatgaatattttgattgggaaaaaaaggaaacgggtgtcatcgaatattcaatactaaaagcaaacaattttgatgtgcaaacaaatgcacagtattatacattggatgacgacggactggaactgatttttgccacaaaagagttttacagcgagtttcaattgtcaatcaatcaattaattttacgaaaacagctggaaaagggcgagtttaaaggggccctcagacaaattaatgaaatgcggattgatgtggaaacccttgaggaccgcatggagaaattaaaacatgaaatccagcgcagcatagtatctgaggaaacctttgaacgttacaaacagcttctcgatgatatttacggccggctcgaacgggaagacgaggaatttaaggagttgcgtaattttgtcaaagaaacaagggaacggttatatgcccaagatgtccataagaaagaacgaaatgcgtacaattatattttaaaaattaaccgcgaactggaagaagtgcattatgagcattcccacttacttgaccagacttttcatttaaaaaatacaaccttaatgacagcgcaggaatcgctttattatgcaggcatgcaatcgttcaattttgatcaggatttagtgtcacgagtcgtatcagcaccactgcccatggacgcaatgaaagggttgcttcatccgtttttaaaagtagaggaaaatcggacatggtcaccccttactgttttggcggaacaaaacctggttgaggaacgcgaggaaaaagtggaatatcatttccttgacgtaaacgatgacaataccaatgatccgtatcgtttatggcttacaaaaaaatacggtgaattaatggaactgtttcttcaatcctatgaaaacaatggtgttcgaacattatccggattttttgcctatttggaaaatcaagggatggaggagatctatcaacaaagatacttttacgacttctggctgattttgcaccagcgttcaccggttcataacggaaacgaggatgaaacaagcggcaaaacggtgcttggtgaggcactgtccagcttaaacggacgggtgttaatagtaacggaaagaaatataattattcaaaaagtcgacaggtattccatccaggatatgacatttgaattggaggggacagacgatggactattcagagagtaa

SEQ ID NO: 52358 - DNA, 744 bp, Bacillus thermoamylovorans
atggactattcagagagtaaagtaatccaagcctttcaactgtatacaaaattggcgcgagacggtgtacttggtgttgatagtgtccaactatacaatgccgatgacgatatccgcgcattactagacctatttagttacgaagtcgattgtgtcatcattaaaacaagtgaacaacttttcttcgtaccaaaaacaaggctttctccattccacgtatccaatgattggattaagaaaaattatttacggtctggcgcaacgaacggagacatttatttgctctatttttgtacattaatcttatttggcagcttttatgactcctatcaaagccatgagccgacaagacaatttctgtcattggaagactgggttcattctatccaggaccgcatcgaccaactgaagtctcatgatatcgatgagctaaaagaactagaaaaagagttttcttataattggacggtaatcatcgagaaatgggatgatatggatgatattaaggaaaccgccaaacgacagtccggaaatacgatcagtcgattaagctttatcgacacggtacgaagatttttaaaagaccaagatttaatccaagatatcggtaataatgaagtgactttgactgaaaaggcgatgaccattattcagcggttctttatggaagtcgaattcaacaaagggatttttgaatttatttacggttttgaaaaggagaatgaagatgccggctatcagtaa

SEQ ID NO: 52359 - DNA, 4422 bp, Bacillus thermoamylovorans
atgccggctatcagtaaaatccgactaacaaatgtagtgtatgaagagggaaagaaacgctataatgatgaactgtttttctttgatgggtacaatggtgcaattctacttgaaaacggcggcgggaaaacggtttttattcaaacggtcctacaggcgatcattccccatactgacttggctgaaagaaaaataaaaaacacattagttcttgaaaacgcaccggcccatattgcgattgaatggttaattaatgaaagaccgagacgctacgtcgttaccgcggttaccctgtttacaacaaaagacggactggattcattgcgctatgtgtatgagtacggagcgggtgacgctcacagtatagaggaaatgccgtttgtcagggaagggaaaaatggaaaacgtccggcggaaaaaggagaaatgcaagattactatagcggcatgcgggacagaaattttttagcaagaaccttctccacaattaaagaatatcgaaaattcattgaagaacagtaccatattattgccgaagaatgggatagcattgttaaaatcaatagctcagaaggcggtgtagaagctttctttgatgattgtaaaagtacgaatcaattattcgaccggctgttaatcccaacagtggaaaactcgattgccggtcatgatccgaaaatgtttgccgatatgtttgaaaagcgacatgaaagcttaaaacaatataaaaaattaaaggaaacgattgaagaaaataaacgcattcaagctgagttggaaaagtatgtggcaacctttgaaaagcttcatatagcaaaacttgcatacgacaagacaaagcagcgagcaaaaggcatttgggaagaaatccagatgcaaaaaagcaatatgaatgaagaacaccatggaatgatgcaaacattagcagagtggcaatcagcttatgatcattaccaagttaaaaaagcttcctaccaaatcgccatagaaaaatcgaaatttacggcgctggaaaaagaatatgaagaagtttatgccaattttagccaaagggaagaggagttggccaatgttaacagggactattattctttaaaactcgccaaactaaaattggagttaaagaactatcaagacgaattaaccatgattgaaaaagaaatcgaaaagctggaccaaacagaagaattggaggaccttgaaatccagctggaggaagcaaaacggtcattgctcggctactttgttgaaacaatggacgagattaaaaaagaaatttctcaagttcaatacgagttgaacccgattcaggaacaaatcgaagtgattcaaaaacaattggatgaagccgggaaactcgaatcggaaaaacaaaaagaaacagctgcgattgaaaatcagattcgtacacgtcaaacggatttagcaaaactggaacaattgctccttgctaatccgaaacaacaaaaggtggaaagtgaatataaactttggcaagaccgttatcaatttttagacgaagaagtcatccgattaaccggagaattaaaacaattggaacatgagcaaaaagaaatcagcaaaataattgatgaactgaaaacagaacgggaacaagtgcaaaattctttaaaccttattgagaatgacagggaaagaattgattatgaacagcgaatacttattgaaaaattaagtctgctccgccccgggtggtcgtctcttgagtcaatttatgatctggaaaaatcaattttctctcgacttgaggagtcgattgatattttatcaaaagagaaaaaagagttgctatataaagaacggattgcataccgattggtagacgattacggcaaacagcaactgtttttcagcgattcctatattgattctcacataaaatcgtggaaaaaccaatttgactatcttcttaccggtgtcgagtacttacaaacccttgatgaacatgaatacgagaaaaagtgttcctatccactatggtcacttacactcatcacaacgaataaatcgaaaccggccttacaagaaaaattgcagatgtcagctgaacaattgcattttccaatccaagtaatgacgttggaagaagcagctacagttgatatcatgacggatgacgttcatacatgggtgattccgcttcattggcaaaaaggaatgaacgaagaggcttttgaccattggaaaacagaaatcaaggagcgggcaaaagtggcaaccgatactcgggaagcaaaagaacaagaactgaaaaaatgggagacaggcttaagagatttccaacaatttattaccatgtacccgtttgaaaaagtccaactattagatgaatcccgttccgaacatactggtaaaattgatgaaatgtcaagaaaaatcaagaatgaagaggaaaagagtgcgatctgccaagaaaaaggaaaacaaattactgaaacgatttctgaatacaaagaagaaatgcagggattggaacgaaatttggaaagggcgatggaatacttccaatacgtccgtgaaatagaagaggcgaagaaaaaggaaaaacaactacttgatgaattggaaaatattcaaagaaagatgacccgttggaaccggcagttgactgattatcaaatgcaggaaaaatcactggtagaacgaaaaagggatctcgagtctagtttaagattctatgaaaatcttgatgaatatcgagctgtgcgttcctatagtccgatttttaccggagaaagtaaactggccattcaagaaaaaatgaacacgattcaattaaaattgcagaaaatcagtaaaagttacggagaatggaaagcaagacgggagaatgccattcaaaatatcaaccgagtccaattagatatggacgaacttcggaaagagcaatcacaactcaatgaagagcaagtttttccgagtgatggcgaacaattaatggaaaacacacgccggctaatggttcaattagccaaagaagttaaacgtttagacaagatgaaaacagaaaaattggcggcaaaagaagggcaaaaaggaaaatggcaattgacgattgaccagtttcaacggaattatccggatgtggaaatagtcgagtttactgaagccactctcgatgaagaaaaagaccggttagcacaagaaaaacgggatttggacgaaaagaaacaatttattgacacgcaactgagccgtattcaaaaagaaatacaatcgattaatgaagctgaacgggaaatggaccgttttattgaaaaacatcattttgacgcacctaatattgaagcgactcctttaaatgccgatgagagaatggcgtttacctatcaccgaaaaccgtctgttcaatcgataatccgtgaactggagtcggcccgagaaaatgttgacggggaaaataaaaatgtcggaaacgggaaacaaacgttcagacagttttgccaaaccatttccgactttaagatgcgaaaaatggcggaaaacggcgtcgattttaaagatacgtatgacgaattactcgaatttcagcgaaacatggtcaagcgaattgaaatagcaataaattatgccaacgaaagtattcgcaaagaagatgccgctcttcaggcatttatcaaccaaattcatacgcatttaacaaccattgtagaagaactgcgggaaattccaagaaaaacaaaggtcaaagtaggggatgactggaaaaccatttattcgttctcgattccggaatgggaagaagaggaaggaaaaaaacgaatcagagattatatcgaatggatcctaactcaattagaatcagaacgctatgtcaaaccggatggcagtcaagatgatatgaaaataagaaaagatattgaaatgtggttacaatcgaagcaactcttgcaaaacgttatgaagaatgaagcaatgaaagtaagctgccgaaaagtaacgaatgaaaacaaggtaacgacaagatcgtattcatgggaacaaagtaatgtctggtccggcggggaaaaatggagtaaaaatatgacattatttttagggattttaaattatgtagcggaaaagaaaaaacaaaatcgccccaacacaaaacttcatcgggccgttatattggacaacccgtttggtaaagcttcaagcgatcacgtattaagtccggtcttttttgttgccgaacaattaggtttccaaatcattacgttgaccgcccatgcagaagggaaatttttacaagattacttcccgattatctacagctgccggttaagggaatcgaacgataataacaaacaagtgatgacgaaggagcaatggttacaccgggcatacttccaagaccatgacccggtcgtcatcgagcgactcggtcaaacagaacagttgagtttgtttgatatgtag

SEQ ID NO: 52360 - DNA, 1023 bp, Bacillus thermoamylovorans
ttggaagaattaaaaagaatcctctctgtttatccgaaacgtatgatagatttaacccgtttagaagaattgacaaaatccttcgttcatacttatgaggagtttgcggacgtcattctgcaattggaaaaggaccagatactggaaatggtaaaatccaaaggacggacggcacggactccatccctcgcctatcagtaccgtattcaaaaaagtgttttggcctcaagccatcaccaagaattgcaaatataccggaataaattgcatcccgccatactacttgatgaatacttccggattgatccggtcgtatggaaacaagaccttccctttattgaaaaaatcgatcattatttaaaagcgtttggtttccccaatgaaccggttccggcacctgagcgtagttttgaactggtacatgatgaaaaatggattgtcgaaaagggaggaaaagaagttttagaacggattggtctttatgaacggttacaaattattccggtttcagaaccgttaatgtttgcggttaatccgggacaaattcatagagagaaccaattccatcttattgttgaaaataaaacgacgtatcaaggattgttgccggccctcgtggataccgaattttcaaccttaatttatggtagcggcaaagtaattattaaaagcattgaacaatttcccgctcaatatccggtcgaagccaatcatgagtttttttattttggcgaccttgaccgagaaggtgtgtctatttggtactcgttaacgaagcgacaatcggtaaaattagcattgccgttttacattgcctgtttagcccaagaaccggtaaaaggaaaaggttaccaattagaaaatcgagaagcattacaagcttttttaacaaatttttctaaactccatcaagacaaaattcaaaaattattacgactgggaacttattatccgcaagaaatactaaaatcgaaacaattgcaagcgatttggagggaatctgattggaaagccttgatctaa

SEQ ID NO: 52361 - DNA, 681 bp, Paenibacillus durus
atgtcgttagaagaaccggagagcttgcacagcaatctgccgctcggggcgatggaacggctgaccgcggtgctcagtcccgatgaggaatacgcgtttgtacagattatgttctcgtcgtcggcagcggtccgcagcggcagcttcggcctgtcccggcgcgaggtgatgaagattctgaagctggagccgggggatgagcagggatttgcttcttttgtgaaaagggtgaatcagtcggttgcgcgctactataggcttatctatgatgagcgcagagaccgggcggttgtgctgattcatgtgcccgccagacaggcgcgagagctgatgtcctccgagagtctggctttgctgatgtttattttttatcaccaggaagtgctgcagaatgattataccctgtttacccaattgctggaggcgttcgggcatgagtcgctggatgtaaggcggaaaatcctggcgaacctcgatacgctcatcaagctgggcgccgtgtcccgctatgagaatccatccaatgaggaagcctatgcgctgaccgcgatcggcgcgcggctgttctcggattcctatttaaaacggttcgcggaattcagccattcccagcaattgaatatggacgatgttctgaagttttttaaacgttacaatctggaggcaggtgagggatattga

SEQ ID NO: 52362 - DNA, 3234 bp, Paenibacillus durus
ttgaacccctgggcgctggaatttagcggcatccgcgatttctcggatacgaggctggaatggggcggaccggaagaccatgtgctgatcggcggaccgaacggctcgggcaaatcgacgatttcgttctgcctcggagcggtgctggcttccgccaaagtggatttggaggggctgcgttcccgcaatctgccgccggaccgtgtgtggcgggcgacgattcagcttgtttttgccaatatcggagcaagtcccgtcgacgcagccgcgtacatcggcttccggctgaatctggagcagaaacccggcgatcccttgcggaaggaatactttatttgcgagggtaatgagccgtggaaatggaataaagagacccgctatacgccgggagacagcacgaaccatcttcatgagtaccggcatcagctccagcataaatataaagtggacccggatgccttttacctgatctggtatcagcaggatgtgaaccagttcgctgtgatgcggccggaggagcgcttccgaattttcagcgagatgaccggcatagagcggatgcagcacaactgggaaaaggtgaaggaggaacgcaaagacgcgcagtcggcgctccaaacggcggaaagcaaccaacattcgcataggctgaacctgggcaactggcagcaggagcgggaccggctgatcagccggaacgaacggcgcaggctcggtcttgcgagcgtactaaccgcttcggccgcccttgagcggctgtacggcagggagcaggagcttctgaaggagcagacggatgagcttgaagagcgccatgctgacgaactggaccgccaggtgaagctggaggaagagcatcaagcttaccttaaggagttggaagaaagaacacggcgcatggaagaactgacccggcagcttgaggaagtggaaggcgaagcggcgaaagagcgagccctgcgcgagcaattgaatgacgagtaccgtcagcttgaagatattctcagggagctggacaaacagatgcgggcgattccctactccagagccgaggtggaagaacggcttgcgcaggaccgggcaaagatgcgggagacggaagccaaaggccgggagacggaggaggcatacaaggaggcgcagacgcatctggactggctggccaatgaaatcggcaagctggagtatgccctggaggaagacttccggaggctcggcgacgccaagaaaatgctggcccaatacgggggaagcgccgctcttgaacgggaagcggaaagtctggaaagcaagcgatcttccctgcgtgacagcgggcgcgagctggagctgagcatccggtcgcttgaggacgagctggaggcgttgaccaagggaaccgggatgtacagcttgaggcaggaagcgtccatccgccgtctgcgcggcaaaggtgtgactgtctatgccctgcgcgatcttctggagatggatgagcatattccgctggaacgggaggatcagctcgaagccatcaaatatacgctgttcgtagatgccaggggcttcgcggctccgacggatgtctatcatgtggagctgccggcggtggtgccggaacgggcggcggatgagctggtgtctctcggactccgggtgaaaaaggatctcgacgaccaaacctacgccgcagcccaaaaggcgttgtggtggatcggggagctggtatccggttccgattcttccaggccccggttgaagaatggccagcttgtcgattccatgggccgcagaggcccgcaggaggacaagcggtggattcttaacccgcgcggaatcaagctgcgggtgaagcgcgccggcgaggagctggagaagctggagcttcagcttgaagccgctcgccgtaatcttgcggaatgcgaggaacggctgaatcttatccgttcggtgcttcaactcgtcaaagaggcggaaacggtcgtgggcgctgtcgccgagcgggatttgcgtgcgcgcgagctggaaaggaaaaccgccgagcagaagaaatggacggacatccgaaaccgttctgccgatgagcggcagagattgaatctgggggcggccgagcttgcggtccggcttgaagctctcgaagggtaccggcaaatctacgaccgcgccgatcaggaaagctcgaagatcgagcggttcgggcagcttggcaaagagctggaagccaccggagaacggctgcaaggactggagagagagcttcaggacctgcttacggaaagcgaccagctggaccgttcgttggattcgacgaagcgaaggattagggagaagcaccagcatatcgaagagtcgaaaaaagcgctggaggcgctggaccgggagaaacgggagctgcttgagcgcctggaggtcatacaggagaaccgcgccgcggagcggcagttctacagcgattggaccgttcgcctaccaatggtatacgccgggcttcttgaagcggccccggattttcccatagtgccggactggaatccggcgcaggcaaagtcgtataaagaaggcgctctggttcagctaaacctggcgctgggcgaaaccgtcgacgagaacgcgctcgaaaattacgagaaggtaaaagcggagtttgaacggggtgagcaggaggtgcaggacgcccgcatgctgcttcgccagcttgaggaaagtctggccgagctcgaggagaagctggtcagcacgaccaattatgaaatcaaacgggtgggcagccgatttgtgcgctatatggaccaattctcgttcgacggcgaagtgagctgggacatgcaggagatgaagcaggggaatatcaaatattacctgaacatcaaagccagaaagcaggggcaccgcggcccgctggaggaagtcggcatgaagggccggggaggacgggtcggaaaaggggtgtcgggcggcgaggaatcgctcagctcgcttctgttcgctctcgcgctgctgaagacgattcaggcagagccgggatacatcgtgctggacgagttcgacagcgccctggacgaagggagaaagtccaaagtattcacgctgtatgagcaggagctgtcgagaaaaatgattatcctgtctccgaaatcccatgaatcggattatttgcggcatttcaacgaagcgtttgttgtgtatcatgatgcgagaatcccgaaaagcgcagtgattagaattaagaaaaaagctgatagtaaggtttaa

SEQ ID NO: 52363 - DNA, 1419 bp, Paenibacillus durus
ataaggggttgtaaaagcttgttaaatacggagattgtcgatttcatatgttctcattatttatccaaaggctcggagcttgagcccgcgactctcagcgaatctggcaggggctttgaaattgatattttcagggcaggctcaagaacacgcaggcgcataggaaaaatcaccggcgggcatgcggataacgttctctctcatgaaaatcgtgtccctgaagtgctggaacggctgtttcacagtccaagagtccgtaagagcgagcgtgatctgctgcgtgatacccgggatgcgtcgctgtgtaatggcggattggccgagggttggattatgcggatagaccggtacgagtccgatgggaaaaccgtagcccgaacggagtatgtcatgggttatgcgctttatattcatcttgagcggaaaagaagacgagcgcaggaacgggagaagcagaccattgcgacctggcatgcacggcttggaacagtactggaagagcggaataaagttccggatggcctgtccgggaaggaaaaccggcatttattgtggaattttatagaggatatggcggcaaagctcgaacactgttccgtttataaagaggtcttcgaggtcatttggaacaaagagcagccatggcagggcagaaagctggagtactatgtcgattttattatcgcactggccgaaattgctgccgcccgcgctcattttgactggaaggagataggggcgcgttactaccgggaaatcggcggctcgaagcgctttgatccctataaagtggattttctggaggcggcggaggagcagatcggctgtcctctcccgctgcttgggctgtgcagcggaggaacggttaccccgatttacttcgctggagaattgagcggaaggggcggattcgcttatccgcaaggctttttgcatgcggttacggatgtgaccgtctggaagacggaatttcgaaccggctgccatacaatgtggctgaccgagaatcgggccgtgctcacacggatgagcgctgaaccggactttctgctgaactcgggtagtttgataatcgggctggacggacagcttagaagcggacaccgcaagctgatcaaggatgtattgaccggctcgaaatcgattgggcaggtcattgtatggtgcgacggcgacaagtccgggctggacatcgctagaaatgtgcaagccctgctgcagccggcgcatccggcgggggtgaaatggattttgccgcctgccgtggaccagaagggcgacgatccgcgctcctgtcttttccgtacatgggaggcttatgaggcagcagcacttgccggactggaccggaaccaggcagatgagcaggaagcggaaatgggggatacggacatttggaacatgtggatggatctttga

SEQ ID NO: 52364 - DNA, 1509 bp, Paenibacillus sp. FSL H7-0357
atgaactggtctgattttggtgaacggaacaaacgccttaacccactgtggacgctgggggcgggcatgaatcttggagaactgcagccttataaggaaatgattgcgctcagtgtgttgctgcaggtctactatctcgagctggaatccaatgaacgaagagccaaagaggatattattgagctggcctggagttcactggagcggtttaatattgcaaggtttggaaccatcgaatctgtggaacggctggtagacgggctgctgtggagcgggggcggcggggattttgaagccttttattatgatgatcagacccggcagatgactctgcaaaagtacaaatacttcacggtagacgaggatgcgacccgcaccagttgggaagagagcggcaagacagtttaccgcctttccgaatatgcgatggagcttatcttcatgagccatgagattatagaagagttccagattagtattaaactgctggagatccaaatgcatattaagcatggacgcgtcacccgggcgatgcaggatgtgggtgaactgatctcgcgggttcggaagatgacccagcaacagcaggaataccgcaatgcgctgcggcgcaacccgaagcatatgttcagcgaatatggggttatgcggcatcagcgggtggaggaaattcaccagcagtttgatgaagaacgcaagcattttgataatatccaccgttccctggcccggctggcgaatgacgagaaggatgttatcgactttaacgagctgcgcctgttatccgaacgggtggagctgtcaagaaaagtacatgacgagctcgcggaggttgtgcttagcatttttgaagccgaaaccaatttaagactgaactttccagagctgttctggggagctgccggttttaatttccgcacgaatgtatgggaggaatgggtgaaagctgaaggcctgccgagcggggacagtctggaaaccttgattagcggactgttcacaccgagccaggactttatctaccccctcgcctgggcttgggaagaacaggatgtcggttttctgccggaagaatatctggatgagcccgatgaagaaggggaggagcaacttgcaacttatacgcctaagtctataccttggactgaagttgcggagctgtggaaaccgatttttaccgagcttgccggcaaaggacgttttacgttcaaagcggatgctttctctccggaggaacagtcccgttgggcacggctcccggatgccattgacctgtgggtacagttctttcataccgaggtcgtcgtacaggagtataacgaagacaaccctggcggaagtgacgagtgccagaagctgattcagcggctgcttacggattgtcctgagctggagatgctgcggggcaaagtgctgcggacaaccatacttgaaccggatcaggggacaagcgtgagttggcccggtctggaaatgagcccttataccattactatagtagagaggtga

SEQ ID NO: 52365 - DNA, 759 bp, Paenibacillus sp. FSL H7-0357
atgagctattcattggaacaattgcagcaggcttcgcggctgttttttgatctgcttcggcggaaagtcatatctctggatgatccagctgcagtggaatgcctgcaggatacgggggcctatgacgccttgcagtatatggctaaagagggaggctgccggattatgaattccgggcaccgccttcacctgctggtcaatccgctgggatcggggttcgcgtccaacttcacacagctgcggaataaatactcacgaattgaacgtaaaacccatttacatattatcaacgtcattatcctggtttttctggcggaaatggatcaggatgagcagcactttaagcccggtcaggacagcatgtcctatatccaaatctccgatcaggtgtcctcgcttctacaagcatggatcgagctggatgaggaaggcagcttcagcaagcagtggcgtctggatattcaggcaatgcataaagtatgggcaagcctttatatgcagaccaaaagccaggaggaaggcgattccctgtcgagaggctccggttcacggattggactgattcatgaagggatgaagctgctggaggaggaacatctggtgtttatttccgagaacgagaagcggattttcccccgggaagagttatatgaaagaatgcggtatctgtaccacgatgtagaccgttacaaggaattgaaagctctgatcggccggaccttgacggagaaggagggggaaggctatgccgcgcattga

SEQ ID NO: 52366 - DNA, 4485 bp, Paenibacillus sp. FSL H7-0357
atgccgcgcattgaacgaatccgtatcgccggactgaaatacgagaagatgcttaagaagtatgatgatatgattcttgatctttgcaatgaggaaggcccggccaataccctgattaccctaatgaacggcggcgggaaaggcgtactgctgcagtccatcttccaactgctcctgcctaaggcggcttgggggaaagacaatgagaaccaggtcgaggcttttttccataatcataaaaaacagctcaagccctataccttccacgtagcgattgagtggcggctggacaacagtgagcgtaacgaatacatgacgaccggtattgccatgactgcccacagctcgatagatcagctggagattaaggttgactatctgctctacgcgctgatggattatgaagagcaggctgagctgaccctttcaacgctgccgctgtatgatcatgcggaaggcggtcctgtaagttttgagacgattcaacaatttgtacgggaacggcggaatgaaattgttgccttcggcagccacagctccgatctgaagaagtactacagctttcttgctgaacgggatattcatatcggtgaatggcgtaacatgaaacggatcaatggtgaagagggcgggatcaagggctattttcaaaaaaatgaggcctttaccaaccacaatctgttcgagaagctgattattccggagattggctccagtctgaacgagggtgtcaaagaagaggatggttcgcttcagcggatgtttatcgataccgcaaccattgcccagagacttccgatgctggagcagagggaaaaggcttttgccgaattcactacgctggctgcaccgctgtatgagctggtcgaacagggaacggaagccgagcggagcttcagagagactgaactgctgggtcggcagatgtctacggtcattcacgaggagcttaagaatgcagaggcggaacgcagcaaaactgccgatgcattggttcagcatcaccaggaggcgcgccagctgcgttttgagggcgataatctgaaatatctgcgcagcaaagaggaacaggatcttaagcaggatgaattcacgaggatttcagacaaccagacacgggccaagttgcggctggatgagtcgaagctgaaagagaaaaagcttgaagtagcttattatctggccaaacgcagcgcgcagctccgccagatcgagcaatggcagaaggaaattgaagctatcgaaggctcgctggaaatgaaggaacgccaggaggttattcagggagcgaaggaagagctgcggctgcagtgggacaaagtctttcagctctggcagggacagctctcgtcgttcgtaacccgccagcattctctgactgctgaagaaaatggcttacgcaaagaaagggaaagcttgctgctggaactgggcggtctggataaccggatcaatgaacttacaggagccatccgccaatataccgaggaattgggtgtttttgcctcacgccatgggcatgaagcagccggggcgccaggagcggcgctgcagcgcacgttaatagcagctaagacaatcgcagacaatatcagcggctttaacgagcagcgcaaaactgctgaagagcgtaagctcagtctgcaccaatcgcagaccgagctgaaggtgaagctgaatgccgggcagagccaaagcgatgagcttcagaatctgctggagtcacagatgaacagggagtcacagctctggtcacagctggtcgtgctgctggaaatgtatgaagagcatcaccaactgggagttacggcgctatttgaagcgaaaccggccattcaggagcggtttatccgcaggctggatgaggctgagcagcagacgaaacggctgagaagggattattacaaccagctgatcgatgtagagctgcagcaggagtccttctggctgccgaatgcggatatcctgagagtgaaggacacactggattcactcaaaatcagttccatgatcggcagctcctacctgaatgacctgccttacctgagccgtgaagaggaaatggaacggcatccgcttcttccttacggaattattgtgacgcagcgcgaagctgccaagctccagccggatacgctgaaagaagtcctgctcaagtcagcggtgccggttttcatccgggaagagatggcggaagccgcatccggtcctttcctgctgccagccaatcaaggtccgcagatggttctgcagccggatcatttccaggaatggaaacgcggaatatcctccagtcttaagcatcaggaggaagagcttaaggatgcggaagcctatctgtcgaagctcaaatcggcgcggcaggaattcgagcgcttgttccagagtgaacataccttggccctgaaagccaaactgaatacacttgaattactgcagaatgagctgaatctaaagctcggggatttgaacacggagatcagcaggaatgaagacagccttgcggttattcagagagagctggcacaatctgaagccgatcggaccgagcatgaagaaagagcacaggcgctgcgccagtgggatgaacggacaaagaagcaggaacaggattataaggataagcaaaaagcggtagaacgcaaaaaagaattgagcaaagaaatcgccagcaaggatcaggggctggttcaggtaaaggccgagctgggcagcaccgcgcagcagcgggagaagtggattggagatacccgctattcgctttttccaaggctgcagaactggtttcccgaaattgctttccccggcgaatatccggttgctcctgctctggaagaagagcccgtacttgatcctgctgctcaagatacgctaatgcagctgctcagcacggtggaaagcctccagcagtccttaacgcagaatgaactggagatccgtacgagagcggggaatatcaaacgggccggtgaacagctggcggagatcgaagctgcggtggtccaggtggatcaagattggcggaatgcccctcttccaacggatacagccgaggtgattttgacggccagagcgagacagaagaacgagacggtatacttggatgaggactatcagcttgtccacgattcgtttatccgcgcccagaccatccttgagaatctgcagaaggatctacggaaatccgaaaaagtgatcaaggagaaacatgaacgtgctgtagaaatatggcatgatccgctggatcagaaggaagaagagatcagcaggcgtttccgggagaatgaacagctgcttaacagctgcaaacaagccttgagtgttatggatcaatggattcaaacattggtaagccaaagcaaaatcatggatacccatgtagagggacgggtccaaatgcgggatgttcctgaagagctgcagcagcgggtaaaagaaaattgtgagccgctggtagctgactggctgctgcgcagcaaggaaagccgcagtgagcggtcggaaatctcccgtaaggtgaaggaagagaagacgtctttaagcagtaaattggcgaaaagcggctggaatgccgagctggagaccaaaatccaggaaaggctgaatactgtacattgggatgacttttctatagcccggcaggtgcttgattccatgctccaaagctcgcgcgatcagattgagagcatccgcagcgacaaggaagggatggagctgtcccgcaagctgtgggttggccgtgccgccaaacgtgtcgtgcagattgtcgatatcctgaagcgtatggaacgccggatgatcattcttaatgagaatggacatgcttttccattggtccgcctgaattacaagaacattacggtgccgaagacgagcgatgatatcgagccgctggtcagtgattatttcaaccgctgcattagcgggctattggagaaatatgccaagattgagcaggtgccggcagccgctgtcaaagagatgatcaatgacgggaaaatcgtatacgccgcgatgcagaaccgttttccggtgcttcaggtctacaagccggtgaccgagaactatttcctgtatgcggctcctgaagagtaccattattccgactgggaagttattaaccgcggagcactggatgaggctgtcggcagcggcgggcaacgccagtctgtgcagctgctggttgctatgatgatcatgacccataagcgggtcaaccgtgagaacaagggctggacggttttcctgtacgataatccatttggtgagatggtttcgaacaacgtacttgatccggtatttgaaatatccaaagcactcaaattccagtggctgatcgttacgccgcccgagctggtgaagaatgatgtcagcatccgtttcggcgtgtactggcagctgtattttgggggagataaaggagaaatgctggaatccacgctcattaagggtggccgaaagctgattcctgcttccttgttctga

SEQ ID NO: 52367 - DNA, 1506 bp, Paenibacillus sp. FSL H7-0737
atgaattggtcggattttggcgaacgaaataaacgattgaatcccctatggaatctgggggctgggatgaaccttggcgaaatccaaccgtacaaagaaatggtatctttaagcatcttgttgcaagtctattatttggagctagaatccaatgagagaagatccaaggaagatataatagcgttggcttggactgcattggaacggttcaatattgcgaatctcgggactaccgaatccgtagaacgtttagtagacggcctgctctggagcggaaatggtggggattttgaatcctattattatgatgatacggctcggcaaatgtctgtgcagaaatataagtatttcatggtggatgaggatgcgacccgcagtagctgggaagagagcggcagaacaatctatcgtctctccgaatatgccatggagcttatttttatgagtcatgagattatcgaagagttccagatcagcatcaagctgctcgagattcagatgcatattaagcatggacgtgtaactcgtgcgcttcaggatgtgaatgagcttatctcccgggttcgaaagatgacccatgagcagcaggaataccggaatgcattgcgccgtaacccgaagcatatttttagtgaattcggagtggcccggcatcagcgacttgaagaaattcatcagcaattcgatgaggaacgcaagcattttgataatattcatcgttctctggcccggctagccaatgacgagaaagatgtgatcgactttaatgagatccgtattctttctgaacgagtcgagctctcaaggcgtgtacacgatgagctggctgagatagtcttgaatattttcgaggtggagaccaacttaagattgaactttcctgaactattctggggagccgccggctttaatttccgtacacatgtatgggaggaatgggttaaagaagaggggctgccaagcggtgacagctttgaactgctgctcggcggattgtttgctccgaatcaggattttgtctatccacttccttgggcttgggaggaacaagaggttggttttatcccggatatagtaatagatgaacttgaagatgagctctatgctgagaatgctcaatatattcctaaaggtattccatgggcggaagtcgttgaactgtggaagcctgtgttcagtgcgctagccgagcggggaagctttacgtttactacagaagcttttaccgaggaggaattaacaagatgggcacgcacaccagatgctgtcgatctgtgggtgcagttttttcattcagagattactgtgcaagagcaggctcctgagaacagcaacggatccgatgaatgccagttgctaatccgttatgtacttgcggatgatcctcaattggagagcctgcgcggcaagctattgcggacgagcattgcgcaagaatcaggcctaagggtacgctggtcttgtctagacatgagcccatatactattacgatcgtggagaggtga

SEQ ID NO: 52368 - DNA, 759 bp, Paenibacillus sp. FSL H7-0737
atgagttatacattagaacaggtacagcaagcttcacggctattttttgaattacttcgtaaaaaagtaatccctctcgatgatcctgcggcagcggaatgcctgcaggatgcaggaacatatgatgcgcttcaatatgttgccaaggaggcaggctgccgagtgatgaattcgggacaccgtctccatttgttggtcaatccactcgggtcagtgttcgccaccaactttacccagttgaagaataaatactcacgaattgagcgtaaaactcatttacatatcattaatatcatcatccttgtgtttctggccgagatggatcaggacgagactcactttaagtccgggcaggacagtatgtcctatatacagatatcagatcaggtgtcttcacttttccaagcatggatgcagatggatgatgaaggtcggtttagtcagcagtggcgcttggatatccaagcgatgtccaaggtgtggactaacctctatatgcaaactaagagtcaggaagagagcgatcttctgacaagaggcgcaggctcacgaattgggctgattcatgaaggcatgaagctcctcgaagaggagaagctcgtgttcatctcggagtcagagaagcggatattcccacgggaagagctttatgagagaatgcggtatttatatcatgatgttgaccggtatcaggaattgaagaaactcatcggacgaactttagctgagaaagacggtgctattaatgccgcggattga

SEQ ID NO: 52369 - DNA, 4482 bp, Paenibacillus sp. FSL H7-0737
atgccgcggattgaacgcatacggattacaggacttaaatacgagaaaatgctcaagaaatatgatgatatgattctggatctctgtaacgaagaggggccaagcaatacgcttattacgcttatgaatggtggcgggaagggcgtactgctgcaatccatatttcagttattaatgcccaaaacgccatggggaaaagatagtgagaaccaggtggaagcattttttcataatcataaaaaacaacttaaaccttacacctttcatgtagctatcgaatggcatctggacaacaatgagcgtaatgaatatatgacgactggtattgctatgacggcacataactcactggatcagcaggatattaaagtggattaccttctatacgcacttacggattatggcgatgcatctgaactcaccctttcgacgttgccactcttcgatgaagaaactgctgaacctacgagttttgaaacgatccagcaatttatacgagatcggcgaggggaaattgtaccttttggtagccatagctcggatttaaaaagatattatgatttcctggctacccgggatatccatatcgccgagtggcgcaatatgcggcggatcaatggggaagagggcggtattaaaggttattttaaaaagaatgatgcctttaccaaccataacttattcgaaaagctaattatccctgagataggttccagtctaaatgagggacccaaagaagaagacaatacgctgcagcggatgtttattgacacggcgacagtagctcagcgtctaccgatgcttgaacagcgggaacaggtctatacagagtttcttggcatggctgcacctttatacgagctggtgaagctaggagtagaggcagagagtgttgttcaagaaacggaacttcgtgggcgtcagatctttacggttattcatgaagaacagagaaatgcggaagaagagcgaagtaaggttggtaatgaactggcggggcgttatcaggatgcgaagcaattgcgatttgagacggacaatctaaagtatttgcgcagcaaggaagaaatggaactgaaacaagatgagttcaaaaagcttagtgatgatcagagacgtgcacgtggacggctggacgattccaaggctcaggagaaaaagcttgaagtggctcatttcttagctaaacgtatgctccacacacgacaaattgagcaatggcagaaagaaattcaagcaatcgaaggatctctggagatgaaagaacgtcaagaggtcattcagacggctaaagaaaagcttcgtaaacaatgggatgtggtgtcaagcctctggcaacaaacgatcagaggatttggaaacgctgagcgagcactggcgactgaagaaaagggtctgcgcaaggagcgggagagctttctgttggagttagcaggcctggatatccaaattaatgaattgacgctatctatccgtcaatatacagaagaactcggaacattcgcagctcagcatggtcaggacgctgcacatgctccggtggcagcgcttcaacgtgcgatttcagctgccaaaacgataattctggatatggaagtgctagaggaacagcataaagaggcagagaaccgaaagctggcactgcataagaatcacgcagaactcagcgagaagcatcgctcttatgaacgagaggcagacgagcttggggcactgcttgattcgcagacctataaagaatcacaattatggtcacagattgttgttctactggaaatgtttgatgaacataatcgtttgggagctactggcctttttgaagagcaggatacgattcaactacgatttatccgaaaaatggatgaagtggagcaacagacaaaacgttccagacgagagtactacaatcagcttatggacgtggaacttcagaaccaatcctactggctgccgaattcagatattctcgcggtcaaggatacactcgattcgctcaagattcaatccacaccgggcagttcctatttaaatgatcgtccataccttgaacgtgaggaagaactagagcgctatccactccttccttatagtctgattgttacccggcgcgaagctgataaaatcaaaccggatttgctgaaggacacgctgctgaaatcagcggtgccaatctttatccgtgaagagatggtagcttcagatccagtatcttttaagcttctagctaaccaaggcccacaaatggtactggagccagatcggttcttaaactttaagagcggtattcaggcgaagcttaaggagcaagaacaagtgcttcaggacgcggaggcttatttatcgaagttgaaatctgtgcgtcaggaatatgagcggttatatcaaacagagaacactgtgacgattacagccaaacgcaatactcttatgaaactgcaaagtgaacttcagcagagcattatcagtctgagcaacgagattaatgagaacgagagcacgcttgctcggatcggtcgggaacttatcgagaataaagcgcttagtgcagagcatgagcagagagcagcagcgttgcaaggttggattgaacgttcgaagaaacatgagcaggatcaaaaggagaagaaaaagtatacagatcgtaagagtctagtgagcaaagagcttgcgagtaaggaccagcaacttgagcatcttgaagcgcaaatggtaagccttggcggagagcgtgagaaatggatgggagatgccaagtatgctctgtttcctagactgcaacattggttccctgaaattgtatttccgacatatcatcagctttcggatgatatggaccccacaccaatagatcctgtagagcagaaccttctgttgcagcagctcagtaccgttgaaagtctgcagcaatctctgacggagaatgagcttgaaattcgaacaagagccgcccagattaaagcggcgagcgagaatctaacggagcttgaagccagcctgaatcaagtggatgagaattggcggaaggtaacagagcctgctgaatctactgaatccattatggctgcaagaaaccgtcaaaagtcggaaactgcttcactggaagaagactatcagatggttcacgactctttcatccgctgccaaaccgaattggagaatttgcagaaggaattgcgtaaggtagaaaaaggaatcaaagagaaacatgagcgtgccgtggaaatttggaatgagccactcgagcaaaaagaggcggacattcaagagcgtttccaagagaatgagctcatgcttaaccagtgtaaacgatctttggaacgaatggatacgcttattcagacgttatccaatcaaatcaagatcatgaatgcacatattgaggatcgggtcaatctacggactgtgccagaagaattaatgctgagcgtaagagaaggctgtgagtcactggttgctgactggcttcttcgtattaaggatagccgagttagacgggacgaggtctccagaaaggtgaaggaagagaaaaattcattaaccggaaaacttgccaaaaacgaacggaattctgaactggagaccaaaattctagatcgtttaaatacggttcattgggataacttcgctattgctcagcaagtcctagattcgatgttacgtagctcacgcgatcagattgagagcattcaaagtgataaggaggatatggatctgtcccgcaagatgtgggtcgcccgggcttcttatcgtgtagtacaaatcattgatattatgaagcgaatggaacgtcggatgattattcataacgagaataattatgccttcccgctggtacgcctgaattataagaatatcaatataccgagatcaagtgatgaggtagaaccgatggtgagcgactatttcaatcggtgtatcaatgaactactctcaaaatatccaaagattgaacaagtaccagcgctggtaatcaaagaggttataaatgacggacgaatcgtctatgcggcgcttcagaatcgcttcccgattcttcaggtatataaaccagtaacggaaaattacttcctctacgccgctccggaagattatcattattccgactgggagatcatcaatcggggtgcgctggatgaggctgtcggcagtggtggacagcgccaatctgtacagctgctggtagccatgatgatcatgacacataaacgtgtgaatcgtgagaacaaagggtggacggtctttttatatgacaatccttttggagaaatggtttctaataacgtgcttgatcccgtatttgaaatttctaaggctctaaaatttcagtggctgattgtaacaccaccggagctagtgaagaatgacgttagcgttcgctttggtgtgtactggcagctctatttcggaggcgttaaaggggatatgttagaatccaccctagtcaagggtggaagaaagctcattcctgtttcgctgttttga

SEQ ID NO: 52370 - DNA, 1440 bp, Paenibacillus sp. FSL R5-0345
atgaaccttggcgaaattcaaccttacaaagaaatggtgtctttaagcatcttgttgcaggtctattatttggagctagagtccaatgaaagaagatccaaggaagatattatagcgctggcttggactgcactggaacgctttaatattgcgaatctcgggactaccgaatccgtagaacgtttagtggacggcctgctctggagcggaaatggcggagatttcgaatcctactattatgatgatgccgctcggcaaatggctgtgcagaaatataagtatttcatggtggacgaggatgcgacccgcagtagctgggaagagaacggcagaacaatctatcgactctccgaatacgcaatggagcttatttttatgagtcatgagattattgaagaattccagatcagcatcaagctgcttgagattcaaatgcatattaagcatggacgtgtaacaagggcacttcaggatgtgaatgagcttatctcccgggtccggaagatgatccatgagcagcaggaatacaggaatgcattgcgccgtaacccgaagcatattttcagtgaatttggagtggctcggcatcagcgactcgaagaaattcatcagcagttcgaggaagaacgcaagcattttgataatattcatcgttctctggcccggcttgccaatgacgagaaagatgtgatcgactttaacgagattcgtattctttcagaacgtgtggagctctcaaggcgagtacacgatgaactggccgagatagtcttgaacatttttgaggtggagactaatttaagattgaacttccctgaattattctggggagcagccggatttaacttccgtactcatatctgggaggaatgggttaaagaagaggggctgcctagcggcgacagccttgaactgcttcttggcggtttgtttgctccgaatcaggattttgtttatccgcttccctgggcttgggaggagcaagaggttggttttattcccgaatttgtgatggatgaacttgatgatgagatagatgcggagaccgttcaatatattcctaaggggattccttggacggaagtcgttgaactgtggaagcctgtgttcaatgctttagccgagtgtggaagctttacgtttactgaggaagcttttacctcggaggaattaacacgttgggcacgcacaccggatgctatagatctatgggtgcagttttttcattctgaaattacagtacaagaacaagctccagagaacagcaacggatccgatgaatgccagttgctaattcggtatgtactagaggatgatcctcaactggagagcttgcgcggcaagctgctgcggacgagcattgctccagaaccatacccaagggtacactggtctggtctggacatgagtccatatattattaagatcgtggagaggtga

SEQ ID NO: 52371 - DNA, 759 bp, Paenibacillus sp. FSL R5-0345
atgagttatacattagaacaggtacagcaagcttcacggctattttttgaattacttcgtaaaaaagtaattcctctcgatgatcctgcggcggcagaatgcctgcaggacgctggaacatatgatgcgcttcaatatgttgccaaggaggcaggctgtcgagtgatgaattccggacaacgtctccatctgctcgtcaatccactcgggtcagtgttcgccaccaactttacccagttgaagaataaatactcacgaattgagcgcaaaactcatttacatatcattaatattatcatccttgtttttctggccgagatggaccaggacgagactcattttaagtccggacaggacagtatgtcctatatacagatatccgatcaggtgtcttcactttttcaagcttggatacagatggatgatgaaggtcagtttagccagcagtggcggttggatatccaagcgatgtcgaaggtgtggactaacctctatatgcaaactaagagtcaggaagagagcgatcttctgacaagaggcgcaggctcacgaattgggctgatacatgaaggtatgaagctcctggaagaggagaagcttgtgttcatctcagagtcagagaagcgcatattcccgcgggaagagctttatgagagaatgcggtatttatatcatgatgttgaccggtatcaggaattaaagaaactcattggacgaactttagctgagaaagacggtgctactaatgccgcggattga

SEQ ID NO: 52372 - DNA, 4482 bp, Paenibacillus sp. FSL R5-0345
atgccgcggattgaacgcatacgaattacaggacttaaatacgagaaaatgctcaagaaatatgatgatatgattctggacctctgcaacgaagaggggccggccaatacccttataacgcttatgaatggcggcgggaagggcgtactgctgcaatccatatttcagttattaatgcccaaaacgccatggggaaaagacagtgagaaccaggttgaagcattttttcataaccataaaaaacaacttaaaccttacacctttcacgtagctatcgaatggcatctcgacaacagtgagcgtaatgagtacatgacgactggtattgccatgacagcacataattcgctggatcagcaggacataaaagtagattacttactgtacgcacttacagattacggtgaagcgtctgaacttaccctttctacgttgccgctctttgatgaagagtctgctgaacctacgagttttgaaacgatacagcaatttatacgagatcggcggggagaaattgtacctttcggtagccatagctcggatttaaaaagatattatgatttcctggctactcgggatattcatatcgccgagtggcgtaatatgcggcgaatcaatggggaagagggcggtattaaaggttattttaaaaagaatgatgcctttaccaaccataacttattcgaaaagctaattatccctgagatcggctccagtctgaatgagggaccaaaagaagaagacaatacgctgcagcggatgtttattgatacggcgacagtagctcaacgcctaccgatgcttgaacaacgggaacaagtctacacagagtttcttggaatggctgcgccattatatgagctggtgaagctaggagttgaagcagagagcgccgttcaagaaactgaactgcgtggacgtcagatctatacggttatctatgaagagcagaaaaatgcagaagaagagcgaagtaaggttgctaatgaactggctgggcgttatcaggaagcgaagcaattgcgatttgagacagacaatctcaagtatttgcgcagcaaggaagaactggagctaaaacaggaagagttcaaaaagttcagtgatgatcagggacgtgcacgtgggcggctagacaattccaaggctcaggagaaaaagctagaagtggctcatttcttggccaaacgtatgctccacacacgacaaatagagcagtggcagaaagaaattcaagccatcgaaggttccttagagatgaaagaacgtcaagaggtcattctggcggctaaagaaaagcttcggaaacagtgggatgtggtgtttaacctctggcaacaaacgatcagagggtttggaaccgcggagcgagctctgacgagtgaagaaaaaggtctgcgcaaggagcgggagagctttctgctggagttagcaggtctggatattcagattaatgaattgacgttatctatccggcaatatacagaagagcttggcacattcgcagcccagcatggtcaagaagctgcccatactccggtggcggcgcttcaacgtacgatttctgctgccaaaacgatacttctggatatggaagcgttagaggaacagcataaagaggctgagaaccgaaagctggtactgcataagaatcatgccgagctcagtgagaaacatcgctcttatgaacgagagattgatgagcttggggtacagctcgattctcagacctataaagaatcacagttatggtcacaaatcgttgtgctgctggaaatgtttgatgaacataatcgtttgggagctactggtctttttgaagagaaggatacgattcaactacgatttatccgcaaaatagatgaggtggagcagcagactaaacgttctagacgggattactacaatcagctcatggatgtggaacttcaaaatcaatcctactggctgccgaattcagatattttggcggttaaggatacactcgattcgcttaaaattcaatccacaccgggcagttcctatttaaacgatcgtccatatcttgaacgtgaggaagagctagagcgtcatccgcttttaccttatagtctgattgtaacccgacgcgaagctgataaaattaaaccggatttgctgaaggacacactgctaaaatcagcggtgcctatctttattcgtgaagaaatgacagctctagatcaagtttcttttaagcttttagctaaccaaggaccacagatggtactggagccagatcgtttcttaaactttaagagcgggatccaggcgaagcttaaggaacaagaacaggtgcttcaggacgcagaggcttatttatcgaagttgaaatctgtgcgtcaggaatacgagcggttataccaaacagagaacaccgtgacgattacagttaaacgcaatgcccttttgaaactgcagagtgaacttcagcagcgcattatcagtctgagcaacgagatggatgagaacgagggcacgcttactcggatcggtcgggaaatctccgagtataagtcacttagtgcagagcatgagcagagggctatagcgttacaagcctggattgaacgtacgaagaagcatgagcaggctcaaaaagagaagaaaaattatacagatcgtaagggcctggttagcaaggaaatggcgaataaagaccagcagctcgagcatcttgaagcgcaaatggtaagccttggcggagagcgcgagaagtggatgggagatgccaagtatgctctatttcctagactgcagcattggtttcctgagattgtttttccggcatatcaccagctttcagatgatatcgaaaccacaccaattgatccagtagaacagaatcttctgttgcagcagctcagtaccgttgaaagtctgcagcaatcgttgacggagaatgagcttgaaattcgaacaagagccgcccagatcaaagcggccagcgagaatctaacagagcttgaagtcagcctgaaccaagttgatgtggattggcggaaggtggcagaacctgctgaatctaccgaatccattatggctgcaagaaaccgtcaaaagtcggaaacctcttcgttagaagaagactatcagatggttcacgactctttcatccgttgccagaccgagttggacaatttgcagaaggaactgcgcaaggtagaaaaaggaatcaaagagaaacacgagcgtgccgtagagatttggaatgagccactcgagcaaaaagagactgacattcaagagcgtttccaagagaatgagcacatgcttaatcagtgtaagcgatctttggaacgaatggatgcattcattcagacgttatccaatcaaatcaaaatcatgaatgcacatattgaggagcgggttaatttacggactgtgccagaagaattaatgctgagtgtaagagaaagctgcgagtctctcgttgctgactggcttcttcggattaaggatagccgggttagacgggatgaggtctccaggaaagtgaaggaagagaaaaactcattaaccggaaaacttgccaagaatgaacggaattctgaactggagaccaagattctggatcgtttaaatacggtacattgggataacttcgctattgctcagcaagtcctagattcgatgttacgtagttcgcgtgatcagattgagagcattcaaaacgataaggaagatatggatcattcccgtaagatgtgggtagctcgggcttcttatcgtgtagtacaaatcattgatattatgaagcgaatggaacgacggatgattattcataatgagaataattatgccttcccgctggtacgactgaattataagaatatcaatgtaccgagagcaagcgatgaagtagagccgatggtgagcgactatttcaatcgatgtatccaggaactgcttgcaaaatatccaaagattgaacaagtgccagcggtggtaatcaaagaggttattaatgatggacgaatcgtctatgcggcacttcagaatcgcttcccgattcttcaggtatataaaccggtaacggagaattacttcctctatgccgctccggaagactatcattattccgactgggagattatcaatcgcggtgcgttggatgaggctgtcggcagtggtggacagcgtcaatctgtacagctgctggtagccatgatgatcatgacgcataaacgtgtgaatcgtgagaacaaaggatggacggtctttttatatgacaatccttttggagaaatggtttctaataacgtacttgatcccgtgtttgaaatttctaaggctctcaaatttcaatggctgattgttacgccgccggagcttgtgaagaatgacgtcagcgttcgctttggtgtatactggcagctctatttcggaggtgtgaaaggggacatgctagaatccactctagtcaaaggaggaagaaagctcattcctgtttcgcttttttga

SEQ ID NO: 52373 - DNA, 1506 bp, Paenibacillus sp. FSL R5-0912
atgaactggaatgattttggagaacggaataaacggctgaatcccctatggagtctgggggcaggcatgaatctcggcgagcttcagccttataaggaaatgattgctctaagcgtgctgctgcagatctattatctggagctggaatcgaatgaacagagatccagggaggatctggtccagctgacctggagctcgcttgaacgcttcggcatcgcgaagcttggcagtccggaatcggtggaacggctggtggacgggctactgtggagcggaggcggcggggatttcgaggcgaactattatgatgatcagtcccgtcagatggcggtgcagaaatacaaatatttctcagtggatgaagatgccacccgtaccagctgggaagagaacgggaccacaatctaccggctctccgaatatgcgatggagctgatcttcatgagccatgagatcattgacgaatttcaaatcagcatcaagctgctcgagattcagatgcatatcaagcatggacgggtaacccgggcgatgcaggatgtgaacgagctgatctcccgggtgcggaagatgacccagcagcagcaggaataccgcaatgcgctacgccgtaatccgaagcatatcttcagcgaatatggcgctcagcggcaccagcggctggaggagattcatcagcaatttgacgaagaacgcaagcatttcgataatattcaccgctcgctggcccggctggccaatgatgagaaggatgtcatcgacttcaatgagctgcgcctgctctccgagcgggtcgaactctcccgtcgggtgcatgatgagcttgccgaagtggtacttagcatttttgaagcggaaaccaatctcaggctcaacttccccgagctgttctggggtgccgccggcttcaacttccgtacccacgtctgggaggaatgggtgaagccggaagggttgccggatggagacagcatggaaactctgatcagcgggctattttctcccagccaagacttcatttatccgctggcctgggcctgggaagagcaggatgtcggcttcctgccggacgaattgccggaagacccggatgaagccggggaggaggaagaactccactatgtccccaaaagcataccgtggaccgaggtatctgagctttggctgccggtcttcgccggactggcagaacagggaagctttacattctcggcagaggctttctctgaggatgaacagcggcgctgggcggatacccccaatgcggtggacctgtgggttcaatttttccataccgaaattaaggtgcaggagcaggaagtggaaggttacggcggggccgatgaatgtcagaagctgattgggcggctgattgcggaccacccggagcttgagaccttgcggggcaaagtgctgcagaccaggattgctaacgggcagcaaggcagcatccgctggcccggtctggagatcagtccttataccattactatagtagagaagtga

SEQ ID NO: 52374 - DNA, 759 bp, Paenibacillus sp. FSL R5-0912
atgagttattcgttagagcaagtacaacaggcttcacggctgttcttcgacctgcttcgccgcaaggtgatatcacttgatgatcccgctgcggccgaatgcctgcaggataccgtcgcttatgatgccttacaatatgtagccaaagaagccggctgccggattatgaactccgggcatcgtctgcacctgctcgtgagtccaatgggttccggctttgccagcaacttcacacagctgcgcaataaatattcgcgcatcgaacgcaagacgcatctgcatatcatcaacgtaattattctggtgttcctggctgagatggatcaggatgaacagcatttcaagccgggtcaggacagcatgtcctacatacagctctcggatcaggtatccgtcctgttccagacatggatggacatggacgaagacggcagcttcagcaagcagtggcggctggatattcaggcgatgcacaaagtatggagcagcctgtatatgcagaccaaaagccaggaggagggcgattcgctgacccgcggcgccggctcacggatcggcctgatccatgaggggatgaagctgctggaggaagagcatctggtgttcatctccgagaacgagaagcggattttcccccgggaagagctgtatgagcggatgcgttatctctatcatgatgtggaccgctataaggagctgaaggccctgattggccggacactcagcgagaaggaggaggaagcccatgccgcgcattga

SEQ ID NO: 52375 - DNA, 4491 bp, Paenibacillus sp. FSL R5-0912
atgccgcgcattgagcgaatccgcatctccggacttaaatatgagaagatgctgaagaaatatgaggatatgatcctcgacctgtgcaatgaggaaggcccgtccaacacgctgattacactgatgaacggcggggggaagggcgtgctgctgcagtcgatattccagctgctgatgcccaaggcggcctggggtaaagataatgagaaccaggtagaagccttcttccataatcacaaaaaacagctgaagccctatacgttccacgttgctatcgaatggcggctggacgagccggaacggacggagtacataaccaccggaatcgcaatgactgcccagaactcgatggatctgctggagatcaaagtagattatctgctctatgcgctgctcaattatgatgagaatgcggagcttacattgtctaccctgccgctctatgatcacgagctgaacactccggccagctttgaagcgattcagcaatttgtccgtgagcggcgtaatgagatcgttgcgtttggcagccacagctcggatctgaagaaatattatgcttttctggcagaccgggatatccatattgatgaatggcggaatatgcggagaatcaacggcgaggagggcggaattaaaggctatttccagaagaatgacgcctttaccaaccacaatctgttcgagaagctgattattccggaaatcgggtcgagtctaaacggcagcatgcgcgaggatgaaggctcacttcagcggatgttcatagattccgctacggttgcacagaggctgccgatgctggagcagagagagcgggcttttgctgaattcacttcacttgccgccccgctctatgaggccgtcaagcaggggactgaggctgaccgcagctttcaggagaccgaattgttcgggcggcagctgtacacggtgatctatgatgagctgaagaatgccgaagacaagcgccgcaaaactgcggatgagctggccgggcattatcaggaagcgaagcagctgaaatttgagacggataatctgaagtatctgaagcttaaggaagagcgtgaccgcaaacaggatgatttcaaagcggtctcagataatcaggcacgggctaagcagcggctggaggaatcgaagatcaaggaaaaggatcttgaggttgcccattatctagccagacgcagattgcagatccgccagatggagcagtggcagaaggaaattgaagccatcgaaggctcccttgcgatgaaggagcgccaagaggtcattcaagcggccaagcaggagcttcgcctgcagtgggatgaggtctaccggctgtggcaagcgcgaattctgttcttcagcggccgccagcaggctctgggtgcagaagagggcgttctgcgcaaaggccgggaggcattcctgcttgaactcggcggactggagggcaagattcatgaattaacggcgctcatccgccagtataccgaagatctaggggtgttcgcttcccgccacgggcaggaggctgcccattccccggcagccgcacttcagcgcacgatgattgcagccagaagcatgaccgagaatatcgttgccctgaacgagcagcgcaaatccgcagaagaagagaagcttgctctgcataccagacatacacggctgactgagaagctgctgggggctgcaagccaggcggaggagcttacggaccggattgaagctcagatgggcaaggaatcacagctctggtcacagcttgtagttctgctggaaatgtatgaagaacatcagcagctcgggacgacagcattgttcgaggccaaatcacttattcaggaacggttcatccgcaggctggatgatgccgagcagcagacgaagcggctcagacgggaatactataatcaattgctggatgtagagctgcagcaggaagcttattggctgcctaataatgatatcctgacagtgaaggatgccctggatgccctgaagatcagctccatgatcggcagtgcatatctgaacgaccagtcttacctggtccgtgaagaggagctggaacgtcacccgctgctgccttacgggctgattgtaacgaagcgtgaatcggctaagcttcagcctgagctgcttcaggagcttttgctcaaatcgcctgtcccggtcttcgtgcgtgaggaaatggcggatgccacaggagcttcattcctgctgctcacccatcaagggccgcagatggtgctgcagccggagcgtttcctggactggaagcaagggatcgcctcccggctcaaagagcgggaagaagagctgcaggatgcggaagggtatctggcgaagctgaaatcagccagacaggagtatgaccgtctgctccagggtgaacacaccgtaagtctgcgggccagacagcaggtattagagacccggcagcaggagcttggcaagagtctaaatgaattgaatgctgaaatgtcccttaatgaagagactatatccggaatagccagagatctggctgtcagtgaggccgagaaaaccgagcatgaggccagggcagcggcgctgcgtgaatgggcggagcgtagccggaagcaggagcaggattacaaggacaaacaaaagtcagttgaattgaagacagccttaagcaaagagattgccgtcaaggaacagcagctggcacttctgaaggcggacatagacagcctcgccctgcaacgggagaagtggctgggagaagctaagtattccttgttcccgcggctgcaaaactggttcccggagattcacttcccgagtgaacatggcggtgctgcacaagatactgtgcaggaagaagcagtgccggatgaagcattacaggataagctgctgcagctgctgagtaccgtggaaagtctgcagcagtccctcagccagaatgagctggaaatccgcacacgggctgcccagatcaaagcggcgggacaacagctggttgaactggaagctgcagtacatcaggtcgatgacggatggcagtctgcgcccgaaccggatgaatcaccggaggttattcagtcggccagaacacggcagaagagtgacacggcgattctggacgaggattatcagcatatccgcgattcctacatccgctgtatggcagagctggacaacctgcagaaggagctgggcaaagccgagaaggccatcaaggagaagcacgagcgtgctgtagagctctggcatgagccgctggtacagaaggaagaagagctaagtgcgcgcttccgcgagaatgagtatttgctgaatacaagcaagcaggcgcttgcctcaatggatatttggctgcagactctctccaatcagagcaaggtcatggatacccatgtggagagccgcatgccgctgcgggatgtgcccgaggacgtgcagctggatgtgcgggagaactgtgagcagttggttgcagactggctgctgcgcagcaaggagagccgcagtcagcgtgcggaaatctcgcgcaaggtcaaggaagagaagacaacgctcagcggcagactggccaaatccggatggaacgttgagctggagaccaaaattcaggaccggctgaacacagttcactgggatgatttctcgattgcactgcaggtgctggactcgatgctccagagctcacgtgatcagattgagagtatccgcagtgacaaggaagatatggagctgtcgcgtaagctgtgggtaggacgtgccgcgaagcgggtcgtgcagattaccgacattctcaagcggatggaacgccggatgatcattcataatgagaacgggcatgccttccccctggtccggctgaattacaagaatattaccgttccgagaacgacagatgacatcgaaccgctggtcagtgagtatttcaaccgctgcatcagcagcctgctagagaagttcccgaagatcgagcaggttccggcttccgcagtcagagagctgattaatgacgggcggatggtgtatgccgcgctgcagaaccgcttcccggtgctccaggtatataaaccggtgaccgagaattatttcctctacgcagcaccggaagagtaccattactcggattgggaggtcattaaccgcggggcgctggatgaggccgtcggcagcggcggtcaacgccagtcggttcagctgctggtggcgatgatgattatgacccacaagcgcgtcaaccgggagaataaaggctggacggtcttcctgtacgataatccgttcggtgaaatggtctccaataacgtgcttgatccggtattcgagatttccaaggcgctgaagttccagtggctgatcgttacgccgccggagctggtgaagaatgacgtcagcatccgtttcggtgtgtactggcagctgtattttggcggggataaaggagatgcactggattcaaccctgattaagggcggacgcaagctggtccctgcctcattgttctag

SEQ ID NO: 52376 - DNA, 1509 bp, Paenibacillus sp. FSL R7-0273
atgaactggtcagattttggggaacggaacaagcggcttaatccgctgtggagccttggtgcgggcatgaatctcggtgagctacagccgtacaaggagatgatcgcgctcagtgtgctccttcaggtctattatctggagctggaatcgaacgagcagcggtccaaggaggatattgtcggtctggcctggagctcgctggagcgctttaagatcaccgggctgggaaccgcagaatcggtggaacggctggtggacggattgctgtggagcggcaacggcggtgattttgaggcggtatattacgatgatcacacgcagcagatgaccatgcagaaatataaatattttaccgtggatgaggatgccacacgcagcagctgggaagagagtggaaccacaatctaccggctttccgagcatgcgatggagctgatcttcatgagccatgagattattgaggagttccagatcagcatcaagctgctggagattcagatgcacatcaagcatggccgggttacgcgggcgctgcaggatgtgaacgagctgatctcccgggtgcgcaaaatgacccagcagcagcaggaataccgcaacgctctgcgccgtaatccgaagcatatgttcagcgaatacggcgtgatgcgccatcagcggctggaggagattcaccagcagtttgacgaggaacgcaggcactttgatagcattcaccgctcgctggcgcgactggccaatgatgaaaaggatctgatcgatttcaacgagctccggctgctgtctgaacgggtggagctgtcgcggaaggtgcatgatgagctggccgaggtggtgctgggcatttttgaagcggaaacgaatctgcggctgaacttccctgagctgttctggggggcggtcggctttaacttccggaccaatgtatgggaggaatgggtaaaaagtgacgggcttccctccggggacagtcttgagctgcttgtaggcggcttgttcgcacctcagcaggacttcatttatccgcttgcctgggcatgggaggagcaggagaccggatttttgccggaagaatggctggaggagccggaggatgccggggaagaaccggaagagacctatattccaaaaacgataccctggccggagattgccgggctgtggcaccccgtatttgcggggcttgcagccgagggcaggttcacctttactgtagaggcttttactgaagaagaaaagcttggctggacgaataacccgaatgcggttgatttatgggcgcagtttttccatgctgaagtgaaggtacaggagtcaggtgcagagagtcctgccggaacggacgaatgccagaggcttattcaatatctgctggacagtcaccctgaacttgaggttttgcggggcaaggtgctaagaacaaaaattaccggtaccgggcagcagccggcagtcagatggccggggcttgagatgagtccatacactattattatagaggaaagatga

SEQ ID NO: 52377 - DNA, 759 bp, Paenibacillus sp. FSL R7-0273
atgagttatacattggaacaactgcagcaggcgtcacggctgttctttgacctgctgcgtcggaaagtcatttcgctggatgatccggctgctgcagagtgtctgcaggacactggcgcttatgatgcgttgcaatatctggccaaagaaggaggctgccggatcatgaacaccggtcaccgcctgcatctgctggttaatccgttagggtcgggctttgcgtccaacttcacccagctgaagagtaaatattcacggattgagcgcaagacgcatttacatatcatcaacgtcatcatccttgtgtttttggctgaaatggatcaggatgagcagcattttaaacccgggcaggatagtatgtcttatattcagctggctgatcaggtgtcggctgttttgaaggcctggtatgaaatggatgaagagggcaggttcagcaagcagtggcggctcgatattcaggcgatgtacaaggtgtgggccagcctgtatatgcagaccaaaagccaggaggatactgacacgctgtccagaggctccaattcccggatcgggctgatccatgaagggatgaagctgctggaggacgagcatctggtgttcatttcggagaatgaaaaacggattttcccgcgggaggaactgtatgagcggatgcgctacctgtatcacgatgtagaacgctacaaagagctgaaggcgctcatcggcagcacactggcggagaaggagggggacgcccatgccgcgcattga

SEQ ID NO: 52378 - DNA, 4482 bp, Paenibacillus sp. FSL R7-0273
atgccgcgcattgaacggatccggatcgccggactgaaatatgagaaaatgctcaagaaatacgatgatatggtgcttgacctgtgcaacgaagaaggaccggcgaataccctgattaccctgatgaacggcgggggaaaaggggtgctgctccagtcgatttttcagctgctgattccgaagacttcatgggggaaggacaatgagaatcaggttgaggcttttttccataatcacaaaaaacagctgaagccgtataccttccacgtcgcgattgaatggaagctggactccggtaaccgtgatgaatacattaccaccgggattgccatgacagcgcatagctcggcggatcagcttgagatcaaggtcgattatctgctgtatacactgaccgaatacgatgagcatgcggatattacgttatctacgctgcctctctacaatgctgaggagggcggtccggcaagctttgaggcgattcagcagtttgtacgggaacggcgcaacgagatcatatactatggaagcagccaagcggagctgaagaaatattatgcgttcctggccggacgggatatccacatcggcgaatggcgcaatatgaagaagattaacggtgaagagggcggaatcaagggctattttcagaaaaatgatgcctttacgaaccacaatctgttcgaaaagcttattataccggagatcggctccagcctgaatgacggggcacgcgaggaggatggttcacttcagcggatgttcaccgatacggcaacggttgcccagcggcttccgatgctggagcagcgggagaaggcttttgccgagttcacggcgcttgctgctccgctgcatgagctggtcaagcagggtgcagaagcggagcggagctttcaggagacggagctgctcggccggcagatttatacggtcatttatgacgagctaagatcagccgaagacaaccggggaagacaagcagacgagctggtccggctgcagtctgaggcgcggcagctgcgctttgaggcggataacctcagctatctgcgcggcaaagaggagcatgatcagaagcaggaagagttcaaggccatcagcgataatcaggggcgggcgcgttcacggcttgatgagtccaaagagcaggagaaacgcctggaagtagcgcaatatctggccaaacgccaggtgcataagcgtgaagtcgcccaatggcagaaggaaattgaagcgatcgaaggctcgcttgaaatgaaggagcgccaggaggttatccagagtgccaaggaggagctgcgcctgcagtgggatcaggtctaccggctgtggcagcagcagctttccggcttcgcaggacgccagcagggactttcagctgaagaagcagggctgcgtaaagaacgggagagctatgttctggagctgggcggactggaaagccggattaatgagcttaccggctccattcgtcagttcaccgaggaagcaggcgtgttcgcttcccggcatggacaggaagctgcaagtgcgcctgggcctgcgctgcagcggacactgctggccgccaatactataacggattcaattgcggaacgcactgctctgcgtagtcagggggaagcgcgtaagcttagcctgcgcacgaacctggcggagcttcaggctaagctggccgctgaacggcgccaaacgggcgggctgcataatcagctggaagcgcaaatgggccgggaatcgcagctgtggtcacagcttgttgtgctgcttgagctgtacgaagagcatcaggtgctgggggcaaccgcgctgtttgaagcaaaagccctgattcaggagcggttcatccgcagattggatgatacagagcagcagaccaagcgtctgcgcagagagtattatcaccagcagctggacgtagagctgcagcaggaaccctattggctgcctaatgcagatgtgcttaccgtcaaggacaggctggatggtctcaagatcagctccatgtccgggagctcctacctgaatgaccttagttatctgcagcgagaggaagagcttggacgtcatccgctgctcccatacggtctgattgttacacagcgcgaagcggacaaaatcccggaggatgcattgaagaatgtgatccttaaatcggctgtgccggtctttatccgcgaggaaatgggaggagcagcagccgtggagccgttcctcctgctggcgaatcaggggccgcagatggttctgcagccggagcagttcaacgactggaagcggggaatcgcctcccggctaaaggagcaggaggaagagcttcaggacgcggaaaattatctgtccaagctgaaaacagcccgtcaggagtttgagcggctgttccagggcgagcatacggtaagcttgaaagccaagcttcttgagctggagctggttgtgaaagagctggatacagcggttgccggtctaaagacagagatcagtgataatgaagagctgcttgcttctattcagaaggagcttaatgaatacgagcaggagaagaccggactggagcaaagagcccaggccctgcggctgtgggaagaacggacccggaagcaggagcaggattacaaggataagcagagagcggtggaccgcagacaggcgctggttaaggaaatctcagtaaaagaccagggactggttcagctaaagacggagatggagaatgcggcactgctgcgggagcagtggatcggtgacacccgctattcgctgttcccaaggctgcagagctggttcccggagcttgttttcccgaatgaccgtcaaattgaaattctggaagaggaagagctgaaccctgatgcacagaatacaatgctgcagctgcttagtacagtggagagcctgcagcaatctctgactcataatgagctggaaatccgcacacggcagggtaacattaagcgtgcaggtgaacagctgagagagcttgaagctgctgtctatcaggtcgaccgtgactggcaaaaagcgcctgagccgcaggatacacctgaagcaataacggcagcccgggcgcggcagaagaatgagacggtatatctcgaggaggattaccagagcgtacgcgaatcctacatccgctgccagacgattcttgagaatctgcagaaggatctgcgcaaaaccgaaaagtctatcaaagagaaacatgaacggcctgtggaattatggactgacgtactctctgtcaaagagcaggagattacggaggatgcccgtgagaatgagcggcagttaagcctatgtaaacaacggctcactgctgtggatcaacggctccaaatgctgggcaatcagagacagattctggacactcatgtggagggccgcgttcagctccgtgatataccggaggaagtacagcttcaggtgcgcgaaagctgtgagcatatggttgctgactggctgctgcagagtaaagaaagccgtgcacagagggctgagcttacccgtaaagtaaaagaagagaaaaacaacttgagcggcaagctggccaagtgcggctggagcaatgagctggagaccaaaatccaggagcggctgaacaccgttcactgggaggacttctttattgcagggcaggtgctggattcaatgctgcagagctcgcgcgatcagattgagagcatccgcagcgataaggagagcatggagctctcacgcaagctgtgggtcggacgtgcggccaagcgggtcgtacagattacggatatactcaagcgcatggagcggcggatgattattcacaacgagaacggtcatgcttttccgctggtgaagctgaattataagcatattaccgtgcccaagacgacagatgacattgagccgctggtcagcgactatttcaaccgctgcatcagcagtctgctggagaaatatccgaagatcgagcaggtgccggcggcagcggttaaggagctgatcaatgacggtaaactcgtgtacgctgctatgcagaaccgcttccctgtgcttcaggtatacaagccagtaacggagaattatttcctgtatgcggcacctgaggagttccactattccgattgggaagtcatcaaccgcggtgcacttgacgaagcagtcggcagcggcggtcagcgccagtcggtacagctgcttgtggcgatgatgatcatgacccataagcgggttaaccgtgagaacaagggctggaccgtcttcctctatgacaacccgttcggggagatggtgtccaacaacgtgcttgatcccgtctttgagatttctaaggctctaaggttccagtggctgatcgtgacgccgccggagctggtaaagaatgatgtcagtgtgcggttcggcgtatattggcagctgtatttcggcggagacaaaggtgaaatgcttgagtcaacgctgataaaaggcggacgtaaaatgatcccggcgtcattattctag

SEQ ID NO: 52379 - DNA, 1509 bp, Paenibacillus sp. FSL R7-0331
atgaactggtctgattttggggaacggaacaagcggcttaatccgctgtggagccttggcgcggggatgaatctcggtgagcttcagccgtacaaggaaatgatcgcactcagtgtgctcctgcaggtctactatctggagctggaatcgaatgagcagcggtccaaggaggatatcgtcggtctggcctggagctcactggagcgctttaagatcaccgggctgggaaccgcagaatcggtggaacgcctggtggacggattactctggagcggcaacggcggcgattttgaggcggtatattacgatgaccacacgcggcagatgaccatgcagaaatataagtattttaccgtggacgaggatgccacacgcagcagctgggaagagagcggaaccactatctaccggctctccgagcatgcgatggagctgatcttcatgagccacgagattattgaggaattccagatcagcatcaagctgctggagattcagatgcatatcaagcatggccgggtaacgcgtgcgctgcaggatgtgaatgagctgatctcacgtgtacgcaaaatgacccagcagcagcaggagtaccggaacgcgctgcgccgtaatccaaagcatatgttcagcgaatacggggtgatgcgccatcagcggctggaggaaatccaccagcagtttgacgaggaacgcaggcactttgacagtattcaccgctcgctggcgcggctggttaatgacgagaaggatctgatcgatttcaacgagctgcggctgctgtctgaacgggtggagctgtcacggaaagtccatgatgagctggccgaggtggtgctgggcatttttgaggctgaaacgaatctgcggctgaacttccctgagctgttctggggggcggccggctttaacttccggatcaatgtatgggaggaatgggtcaaaagtgacgggcttccttccggggacagtcttgagctgcttgtaggcggcttgttcgcaccgcagcaggatttcatttatccgctcgcctgggcatgggaggagcaggaaaccggattcttgcctgaagaatggctggaggagccggaggataccggtgaagagccggaagaaagctatattcccaaaacgataccctggccggagattgccgggctgtggcttcccgtatttgcggggcttgcagcagaaggcaggttcacctttgctgcagaggcttttactgaagaagaaaagcttggctggacgaataaccctaatgcggttgatttatgggcacagttttttcatgctgaggtgaaggtacaggaagccggtgaagagaatacggctggaacagatgaatgccagagactcattcaatacctgctggacaagcaccctgagctggaggttctgcggggcaaggtgctaagaacaaaaattagcggtaccgggcagcagccggcagttaagtggccggggctagagatgagtccgtacactattactatagaagaaagatga

SEQ ID NO: 52380 - DNA, 759 bp, Paenibacillus sp. FSL R7-0331
atgagttatacattggaacaactgcagcaggcgtcacggctgttctttgacctgctgcggcggaaggtcatttcgctggatgatccggcggcagcggagtgtctgcaggacactggcgcttatgatgcactgcaatatctggctaaagagggaggctgccggatcatgaactccggtcaccgcctgcatctgctggtcaatccgttagggtcgggctttgcgactaacttcacccagctgcgcaataaatattcgcggattgagcgcaagacgcatttacatatcatcaacgtcatcatcctggtgtttttggcagaaatggatcaggacgagcagcatttcaaacccgggcaggatagtatgtcttacatccagctggctgatcaggtgtcggctgttttgaaggcctggtatgaaatggatgaagagggcaggttcagcaagcagtggcgtctcgacattcaggcaatgtacaaggtgtgggccagcctgtatatgcagaccaaaagccaggaggatgccgacacactgtccagaggctccggttcacggatcgggctgatccatgaagggatgaagctgctggaggatgagcatctggtattcatttccgagaatgaaaaacggattttcccgcgggaggaattgtacgaacggatgcgctacctgtatcacgatgtagaacgctacaaagagctgaaggcgctcatcggcagcacactggcggagaaggagggggacgcccatgccgcgcattga

SEQ ID NO: 52381 - DNA, 4482 bp, Paenibacillus sp. FSL R7-0331
atgccgcgcattgaacggatccggatcgccggactgaagtatgagaaaatgctcaagaaatacgacgatatggtgcttgacctgtgtaatgaggaggggccggcaaataccctgattaccctgatgaacggcggcgggaaaggggtgctgctgcagtcgatttttcagctcctgattccaaagacttcatgggggaaggataacgagaatcaggttgaggcctttttccataatcataaaaaacagctgaagccctacaccttccacgtcgccattgaatggaagctggactccggtgaccgtaatgaatatattacgaccgggattgccatgacagcccatagctcggcagatcagcttgagattaaggtcgattatctgctgtacacactgaccgattacgatgagcatgcggacctaacgttatctacgctgcctctctacaatgctgaggagggcggtccggcaagctttgaggcgattcagcagtttgttcgggaacggcgcagtgagatcatctactacggaagcagccaagcggagctgaagaaatattatgcgttcctggccggacgggatatccatatcggcgaatggcgtaatatgaagaagattaacggtgaagagggcgggatcaagggctattttcagaaaaatgatgccttcacgaaccacaatctgttcgaaaagcttatcattccggaaatcggctccagcctgaatgacgggtcgcgtgaggaggacggttcacttcagcggatgttcaccgatacggcaacggtagcccagcggcttccgatgctggagcagcgggagaaggcttttgccgagttcacggcgcttgctgctccgctgcatgagctggtcaagcagggcgcggaagcggagcggagctttcaggagacggagctgctcggccggcagatttatacggtcatttatgacgagctaagatcagccgaagacaaccggggcagacaagcagacgagctggtccggctgcagtctgaggcgcggcagctgcgctttgaggcggataacctcagctatctgcgcggcaaagaggagcatgatcagaagcaggaagagttcaagtccatcagtgataatcaggggcgggcgcgttcgcggcttgatgagtccaaagagcaggagaaacggctggaagtggcgcaatatctggccaaacgccaggtgcatcagcgggaaatcggccaatggcagaaggagatcgaagcgatcgaaggctcacttgaaatgaaggagcgccaggaggttatccagagtgccaaggtggagctgcgctctcagtgggatcaggttttccggctgtggcagcaggagcttgccggcttcgcaggacgccagcagacactctcagctgaagaagccgggctgcgtaaagaacgggaaagttatgttctggagctgggcggactggagagccggattaatgagcttaccggctccattcgtcagtttaccgaggaagcaggcgtgttcggctcccggcatggacaggaagcagccagtgcgcctgggccggcgctgcagcggacgctacttgccgccaactctattgcagattccattgcagaccgcgcctgtctgcgtagccagggggaagcgcgcaggcttagcctgcgcacaaacctggcggagcttcaggctaagcttgccgctgaacggcgccaaaagggtgaactgaacaatcagctggaagcgcagataggccgggaatcgcagctgtggtcacagcttgttgtgctgcttgagctatacgaagagcatcagatcctgggggcaacagcgctgtttgaagcaaaagctttgattcaggagcggttcatccgtagactggatgatacagagcagcagaccaagcggctgcgcagagagtattatcatcagcagctggacgtagagctgcagcaggaagcttattggctgcctaatgcggatgtgcttgccgttaaggacaggctggatgcacttaagatcagctccatgcccggcagctcctatctgaatgatcttagttatctgcagcgtgaggaagagctcggacgtcatccgctgctcccttacggactaatcgtcacacagcgtgaggcggacaaaatcccgccggatgcactgaagaatgtcattctcaaatcggcggttccggtctttatccgtgaggagatgggggcaacagcggtggagccgttcctcctgctggccaatcaggggccgcagatggttctgcagccggagcaattccacgactggaagcgcgggattgcctcccggctgaaggagcaagaagaagagctgcaggatgctgagaattacatgtccaagctgaaaacagcccggcaggagtttgagcggctgttccagactgagcatacggtaattttgaaagccaagtcccgtgagctggagctggttgtgaacgagctggatggagccgttgccggtctaaagacagagatcagtgagaatgaagagctgcttgcttccattcagaaggagcttaatgaatatgagcaggaaaagaccggactggagcaaagagcccaggccctgcggctgtgggaagagcggacccggaagcaggagcaggattacaaggataagcagagagcggtagaccgcagacaggcgctggttaaggaaatctctgttaaagaccaggggctggttcagctgaagtcggagatggaaagcgcagcacaactgcgggagcagtggatcggggatacccgttattctctgttcccaaggctgcagagctggttcccggagcttctatttccaaatgaccgtcagagtgaaattggcgcggcagaggaagaactgaacctggatgcccagaataaaatgctgcagctgctcagtacagtggagagtctgcagcaatcgctgacccataatgagctggaaatccgtactcgtcagggtaacatcaagcgtgcaggtgaacagctgagagagcttgaggctgctgtctatcaggttgaccgtgactggcatggcgcgcctgagccgcaggattcacctgaagcaataacggcagcgcgggcacggcagaagaatgagacggtatatctggaggaggattaccagagcgtacgcgaatcgtacatccgctgccagacgatccttgagaatctgcagaaggatctgcgcaaaaccgaaaagtcaatcaaagagaagcatgaacggcctgtggaattatggaccgacgcgctctctgtcaaagagcaggagatctcggaagatacccgtgagaacgaacggcaattaagcctatgtaaacaacgtctcactgcggtagatcaatggctccagacgctgggcaatcagagacagattctcgacacgcatgtcgaaggccgggttcagctccgtgatgtgccggaggaagtgcagcagcaggtgagagaaagctgtgagcgtacagtctctgactggctgctgcagagtaaagaaagccgtgcacagcgtacggagcttacccgtaaagtgaaggaagagaaaaatgacttgagtgccaagctggccaagtgcggctggagcagcgagctggagaccaaaatccaggagcggctgaataccgtgcactgggaggacttctccattgccgggcaggtgctggattcgatgctgcagagctcgcgcgatcagattgagagcatccgcagcgacaaagagagcatggagctctcgcgtaagctgtgggtcggacgtgcggccaagcgggtcgtgcagattacggatatcctgaagcgcatggaacggcggatgattattcacaacgagaacggtcatgcttttccgctggtgaagctgaattacaagcatattactgttcccaagacgacggatgatatcgagccactggtcagcgactatttcaaccgctgcatcagcagcctgctggagaaatatccgaagattgagcaggtgccggcggcagcggtcaaagatctgatcaatgacggcaaactcgtgtacgcagccatgcagaaccgcttccctgtgcttcaggtgtacaagccggttacagagaattatttcctgtatgcggcacctgaggaattccactactccgattgggaggtcatcaaccggggtgcgcttgacgaagctgtcggcagcggcggccagcgccagtcggtgcagctgcttgtggcaatgatgatcatgacccataagcgggttaaccgtgagaacaagggctggaccgtcttcctctacgacaacccgttcggtgagatggtctccaacaacgtgcttgatcccgtcttcgaaatctccaaggcgctaaggttccagtggctgatcgtgactccgccggagctggtaaagaatgatgtcagtgtgcgcttcggcgtctactggcagctgtactttggcggggacaaaggtgagatgctggagtctacgctggtaaaaggcggcagaaagatgatcccggcatcgttattctag

SEQ ID NO: 52382 - DNA, 1506 bp, Paenibacillus borealis
atgaactggaatgattttggagaacggaacaagcggctgaatcccttgtggagtctgggtgcaggcatgaatcttggtgagcttcagccttataaggaaatgattgctctaagtgtactgctgcaggtctattatctggagctggaatcgaatgagcagagatccagggaggacctggtcgaattgacgtggagctcgcttgaacgcttcggcatcgcgaagctcggcagtccggaatcggtggaacggctcgtggacgggctgctgtggagcggaaacggcggggatttcgaggctaactattacgatgatcattcccggcagatggcggtgcagaagtataaatatttcaccgtagatgaagatgccacccgcaccagctgggaagagaacgggactaccatctaccggctctccgaatatgcgatggagctgatcttcatgagccatgagatcattgatgaatttcagatcagcatcaagctgctcgagatccagatgcatatcaagcatggacgggtaacccgggcgatgcaggatgtgaatgaactgatctcacgggtgcggaagatgacccagcagcagcaggaataccgcaatgcgctgcgccgcaacccgaagcatatcttcagcgaatacggtacccagcggcatcagcggctggaggagatccatcagcaatttgacgaggaacgcaagcatttcgataatatccaccgctcgctggcccggctggccaatgatgagaaggatgtcatcgacttcaatgagctgcggctgctctcagaacgggtagagctctcgcggagagtgcatgatgagcttgctgaagtcgtgctgagcatctttgaagcggaaaccaatctcaggctcaacttcccggagctgttctggggtgccgccggcttcaacttccgtacccatgtatgggaggaatgggtgaagccggaaggattaccggatggggatagcatggaaaccctgatcagcgggctattctctcccagccaagacttcatttatccgctggcctgggcctgggaagagcaggatgtcggcttcctgccggacgaattgccggatgacccggatgaagccggggacgaagaggaagtacactatgttcccaaaggcataccttgggctggggtatgtgatctatggctgccggtcttaaccggagtggcagagcaaggaagctttacgttctcggcagaggccttctccgcggaagaacagcggcgctgggcggaaactccggatgccgtggatctgtgggtacaatttttccataccgaaattaccgtacaggaacaggaagcggaaggccagggcggggcagatgaatgccagaagctgattcagcagctgatcagcggtcatccggagctggaagtgttgagaggcaagttactgcggaccaggattgctaacaggcagcagggcagcatccgctggcccggtctggagatcagcccttataccattactatagtagagaagtga

SEQ ID NO: 52383 - DNA, 759 bp, Paenibacillus borealis
atgagttattcgttagagcaagtacagcaggcttcaaggctgttcttcgacctgcttcgccgcaaggtgatatcacttgatgatcccgctgccgccgaatgcctgcaggataccgtcgcctatgatgccttacaatatgtggccaaagaagccggctgccggattatgaactcggggcatcgcctgcacctgctcgtgagtccaatgggttccggcttcgccagcaacttcacacagctgcgcaataaatattcccgcatcgaacgtaagacgcatctacatatcatcaacgtaatcattctggtgttcctggccgagatggatcaggatgagcagcatttcaagccgggtcaggacagcatgtcctacattcaactctcggatcaggtatcagccctgttccagacatggatggacatggacgaagactgcagcttcagcaagcagtggcggctggatatccaggcaatgcacaaagtgtggagcagtctctacatgcagaccaaaagccaggaggaaggcgattcgctgacccgcggtgccggctcccggatcggcctgatccatgaggggatgaagctgctggaggaagagcatctggtatttatctccgagaacgagaagcggatattcccgagggaagagctgtatgagcggatgcgttatctctatcatgatgtggaccgctacaaagagctgaaggccctgattggccggactctcagcgagaaggaggatgaagcccatgccgcgcattga

SEQ ID NO: 52384 - DNA, 4491 bp, Paenibacillus borealis
atgccgcgcattgagcgaatccgcatcgccggacttaaatatgagaagatgctgaagaaatatgaggatatgatcctcgacctgtgcaatgaggaaggcccggccaacacgctgatcacgctgatgaacggcgggggaaagggcgtgctgctgcagtccatattccagctgctgatgcccaaggcggcttggggtaaggataatgagaaccaggtagaagccttcttccataatcacaaaaaacagctgaagccctacacgttccacgtggccattgaatggcggctggacgctccggaacggacagagtacataactaccggaatcgcaatgactgcccagaactccatcgatcagctggagatcaaagtggattatctgctctatgcgctgctcaattatgatgagaatgctgagcttacactgtctacactgccgctctacgatcatgggctgaacagtccggccagctttgaagcgattcagcaattcgtccgggagcggcgcaatgagatcgttgcgtacggcagccatagctccgacctgaagaaatattacgcctttctggcggaccgggatattcatattgatgaatggcgtaatatgcggagaatcaacggagaagagggcgggattaaaggctatttccagaagaatgacgccttcaccaaccacaatctgttcgagaagctgattattccggaaatcgggtccagtctaaatggcagtatgcgcgaggatgaaggttcacttcagcggatgttcatagattcagctacggttgcacagcggctgccgatgctggagcagagagagcgcgcttttgccgaattcacttcacttgccgcgccgctctacgagtcagtcaagcaggggacggaggctgaccgcagctttcaggaaacggaattacttggacggcagctgtacactgtgatctacgatgagctgaagcatgctgaagacaaacgccgcaaaacagctgatgagctggccggacattatcaggaagcgaagcagctgaaatttgagacggataatctgaaatatctgaagctcaaggaagagcgtgaccgcaagcaggatgatttcaaagcggtctcggataatcaggcacgggctaagcaacggctggaagagtcgaagatgaaggaaaaggatctggaggttgcccattatttagccagacgcagactgcagatccgccagatggagcagtggcagaaggaaattgaagccatcgaaggttctcttgcgatgaaggagcgccaagaggttatccaagcggccaagcaggagcttcgggtgcagtgggatgaggtctaccggttatggcaggcacgaattcagttcttcagcggccgccagcaagctctgggtgcagaagaggccattctgcgcaaaggccgggaggcattcctgcttgaactcggcggacttgaaggcaaaatccatgaattgacggcgctcatccgccagtataccgaagatctgggggtcttcgcttcccgccacggacaggaagctgcccattccccggcagccgcacttcagcgcacgctgattgcagccagaagcatcgccgagaatatcattgccctgaacgggcagcgcaaatccgcagaagaagagaagcttgccctgcataccagacatacccggctgactgagaagctgctggggactgcaagccaggcagaggagttaacggaccggattgaagtccagatgggcaaggaatcacagctctggtcgcagctggtcgttctgctggaaatgtatgaagaacatcagctgctcgggacgacggcattgttcgaagcgaaagctctactccaggaacggttcatccgcagaatggatgatgccgagcagcagacgaagcggctcagacgcgaatattataatcagctgctggatgtagagctgcagcaggaagcctattggctgcctaataatgatatcctgacggttaaggatgctctggacgccctgaagatcagctctatgatcggcagcgcatatctgaacgaccagtcttatctggtccgcgaagaggagctggagcgtcaccctttgctgccttacgggctgattgtaacgaagcgtgaatcggctaagcttcagcctgaactgcttcaggagcttctgctcaaatctcctgtcccgatcttcgtgcgcgaggaaatggctgatgcgacaggcgcttcattcctgctgctctcccatcagggaccgcggatggtgcttcagccggaacgcttcctggactggaagcaagggatcgcttcacggctcaaggagcaggaagaggagctgcaggatgcggaaggttatctggcgaagctgaaatcagccagactggagtatgaccggctgcttcagggtgagcacaccgtgagtctgagggccagacagaaggtattagagacccagcagcaggagctgggcaagagtctgaatgaattgaatgctgaaatgtcgctgaatgaagagactctatccggaatttccagagacctggctgtcagtgaggcggagaaaaccgagcatgagaccagggcagcggcgctgcgtgagtgggtggagcggagccggaagcaggagcaggattacaaagacaaacaaaagtcagttgaattgaagactaccttaagcaaagagattgccgtcaaggaacagcagctggcacatctgaaggcagatatggacagcctcgccctgcagcgtgagaagtggctgggagaagctaagtattccttgttcccgcggctgcagaactggttcccggaaatccacttcccaagtgaacatggcggtgctgcacaagatactgtgcaggaggaaacagtgccggatgaggctgtacaggataagctgctgcagctgctgagtaccgtggaaagccagcagcagtccctcagccagaatgagctggagatccgtacacgggctgcccagatcaaggcggcaggtcaacaactggttgaactggaagcagcagtacagcaggtcgatgacggatggcagtccgcacctgaaccgaacgattcaccggaggttattcagtcggccagaacgcgccagaagagtgacactggaattctggatgaggattatcagaatatccgtgattcctacatccgctgtatggcggagctggataacctgcagaaggagctgggcaaatccgagaaggcgatcaaggagaagcacgagcgtgctgtggagctctggcatgagccgctgggccagaaggaagaagagatcagtgcgcgcttccgcgagaatgagcatctgctgaatacctgcaagcaggcgcttgcatctatggatatgtggctgcagacactctccaatcagagcaaagttatggatacccatgttgagagccgtgtgcagctgcgggatgttccggaagaggtgcagctggatgtgcgggagaactgtgagcagctggttgcagactggctcctgcgcagcaaggagagccgcagccagcgtgcggaaatctcgcgcaaagtcaaagaagagaagacagccttaagcggcagattggccaagtccggctggaacgttgagctggagaccaaaattcaggatcgcctgaatacggttcattgggatgatttctcgatcgcactgcaggtgctggactcgatgctccagagctcacgtgatcagattgagagtatccgcagtgacaaggaagatatggagctgtcacgcaagctgtgggtaggacgtgcctcgaagcgggtcgtgcagattaccgacattctcaagcggatggaacgccggatgatcattcataatgagaacgggcatgccttcccgctggtccggctgaattacaagaatattaccgttccgagaacgacagatgacatcgaaccgctggtcagtgagtatttcaaccgctgcatcagcagcctgctggagaagttcccgaagatcgaacaggttccggcttccgcagtcagagagctgattaatgacgggcggatggtgtatgccgcgctgcagaaccgcttcccggtgctccaggtatataaaccggtgaccgagaattatttcctctacgcagcaccggaagagtaccattactcggattgggaggtcattaaccgcggggcgctggatgaggccgtcggcagcggcggtcaacgccagtcggttcagctgctggtggcgatgatgattatgacccacaagcgcgtcaaccgtgagaataaaggctggacagtcttcctgtacgataatccgtttggtgaaatggtctccaataacgtgcttgatccggtattcgagatttccaaggcgctgaagttccagtggctgatcgttacgccgccggagctggtgaagaatgatgtcagcatccgcttcggcgtgtactggcagctgtattttggcggggataaaggagatgcactggattcaactctgatcaagggcgggcgtaagcttgtccctgcctcattgttctag

SEQ ID NO: 52385 - DNA, 1515 bp, Paenibacillus stellifer
atggatcgcatggaattagaaggtacggtttcgggttttcaagagcgtatgtcgaaggttgcgctgttcgatccgctatttgagcttaggcgcaaaaaacagacggatgcctccgggcagccgattgatatgatggagctgggcctgcttgctttgctgttcttttttgaacagaaactgttgagaaatagtcgggtgggtgtcaaggaactggctatttatctgctgcggctcatggagggcaaactgcaggtagacgaagcacaaggcgaggagttggcgagggacatcattcaggtgtttcgcccagcctcgggcaagaagcgcgagttcgccttctataattgggaggcctgtcagcctcagcaggtgcatacttccattctgcgggccaatgcctttgatgcgaagacggggacccagtattatgcgctggatgaggacgggctggagctcgtatttgcaacaaaggagttctattcggaatttcagctgtcgattcaccagcttgtgcttcgcaaacagctcgagaaaggcgaattccagggggcgcttcggcagatcaatgaaatgcgggttgatgttgaatcgctgcaggaacggatgatgaagcttgagcatgaaatcaagcgtagcatcgtgtcggaagagacgctgaagcggtacagcgagttgctggaagatatttatgcacggctgcagcgtgagaacgacgaatttgaagaactgaggcaatttgtcaaagaaacgcgggcgcggctgtatgccgataatcggccggagaaccgggtacgtgcgtatgaatatatagtcaagattgcaggcgagctggaaaaagtgcatgccgaacattccgggctgctgcagcagagtatggaattgaagaaccaggcgctgtattccgccaaggaatcgctgtattacaccggacttagctcatttaacttcgagcaggatgttgcaggactcatcttcggactgccgctgccgctggaatcaatgagaggtatcgtatccccgtttatggcactgcagcagtcgcggaactggtcgccgctgacgctgctggccgagcagaatattagcggcataggggagcaggagccccgggaagaaggctttctggaagcggaggatgacgggcgcgagctgcagtatgcagcgcggcgaagtgctttttatatggaaatcatggggctgctgctgcaggagcttgaacggacgccggagctggaactgcgtgaatttctgaacaggcttagcgaatatggacggcaggattggctggatcggcgcagcttctatgatttctggctgattctgcatcagcggagtccggttcgtgcagtagggatggaccagagggacgataagaccggactggaagaggtgtttggtctgcttgggcggaaagttctgctggtgtgggaggccgtaggccttgtcgaaacgggaacacgctatcaaatccagaatatgaagctgacacaggaggacgaatccattggcttatag

SEQ ID NO: 52386 - DNA, 4446 bp, Paenibacillus stellifer
atgccgtcaatttccaaaattagatttactcatgtgatgtatgaaggcgggaacaaacgctataacgacgaaacctttctgttcgacggccataacggggcaatcgtgctggagaacggcggcggcaaaaccgtgttcatccagacggcgctgcaggcgatgtcgccgcatacggacctggccggacgcaagatcaaggacacgcttctccttgagaacgggcctgcccatatcgcggtggaatggattctgaacgacaagccccgccgccggtatgctgtcgcttgtatcagtctgttcctgagcgcaatcggtgtggattcctaccgttatgtttatgagtacagcgagcatgatgaccacgggctggatcatatcccattcgttaaggagcatatgggcaagacccggccatccgacaaaggcgaaatccaggactattattcttccatggcgcagcgctatccgctgacagcgcggacgttcggcacgatcaaggagtacaggtcttacctcgaagagcactatcatattatagcttcggagtgggaggctattgccaaaatcaacagtacagagggtggaatcgagaatttcttcgatgagtgcaaatcgacgtcccagctgtttgatcggctgctcattccgactgtggaagaagcgatggaaggctttcagccgggaggcttcgcggcgctgttcgagtcgcatcgcgaagagttcaagcgctacaaggaattgaaagaacaaattgccgagaacaaactgattctgcaggagctcagccggtatgtgcttgtatatgaaggtctgcatgaggcgcagcagcggtatgacgaggcccgaggcgaggcaaaagcgtatcgagagctgtccctgcggcagcacgaggagacgaaggcagagcagaccgggcttgccgcaaggctgcaggagtggatgcagcgcagcgaggcgctgcagctggagctgaagtcgctggaaattgcggaggcggagcaggagcagtccgcgctatctaagtgtatgaggcagcttcaggaagaagcggaccggcagctgcagcggctgaaacagggagagcgcagcttctattctttgaaatacgcggagcagcgggtgagccgggaaacggccggcgcacgcctgcagcagctggaactgcagcttgcaaggttggagcagagtgaagacgagcagcggctgcagcagcgctgggagacttgcggcggcaagcttagagccgtattcgcccgggatgaacgtgaagtgtctgcgaagctggacgcttaccgttccgaactcggtagtctgaagcaggaacaggccgagacggagaaggctgtcttaaagcttcggcaagagatacggacatgggaactgcagctgcgggagaaggagacgcaggcgcaggcgaagaaagagcagcaggaacagattgcccgtgctgttctggccaatccttcgctggagaaggtggaagagcagatgccaatctggtcggagcagcagcagcagctggaagaacggcggattgatcatatgcgcgccctcaaggagataaacgcggaacaaaacgcggtccgcagccgccagaagacgattgaggaagacatccgccggacagagcgcgagcaggcgaagctagaacagcagcgggaacagctgcaagagcagcataatgttcttgcttgcgatctggctgcgctgcggccgaattggcaacgcctcacttccctgtatgataaggcggcgtcgatttcagagcagctgcttgagggaatacagaagcggcaggatcagaagagcgactgtctgcacaaggagcggctcgcctaccgctatgtggatgattaccatgagcaggatatgttctttgccgatccggttattgaaggtttcgtccattcctggagcagacagttcagtctgctgcagacgggcatccagtacattcgctcgctgaatctggacgaagagggccgaagccgggcaaaagacgcgttatggccggtcactctagtgacaacgggcgcagagaagaagctgctgatgcagaagctggccgctgcaggcgaggaattcgcctttccggttcgagtgctcggcgcgggagaagcggcagagatcgtaagaggatcagaaggcggcgtaacggaggaacagtgggccgttccggatcattggcgaagcaacgaggatgaagctgtgttccggcagtggaaggcaggtctgctgcatcgcgccggccagattcggaaggaccgtgaggagaaagaagaggaactggtgttatggcagcggatggagcagcgattccggcagtttctcaatcaatatccgctggcggcggtccagacactggaacagcagctgcaggtggcacgcaaagagctgattagctgcaagcagcagcacgagcggcatgaacagcgattgaatcagctggaagaggcggtcgataaatatcgtacggaactggccgagatgcaggatctcattcaccagctgggggtgtggctgaaggacgggcagcggtatcaggcgctcggctttgaacgggagaagctggagaaagagctggtgcctgtcaagcagcagctggccggcctggaaagacagcttcagatgaatcagtaccgtctgcagcggcttcaggaggaacagacggcggtggagcgaagctgcaatgatacgaacatccgcttgcaagtgctgcgcagcgacgaactgtacgggaaagttcagccattcgcgcatgttaactccagccggccgctggccgagcttaaagaagagtatcgggtgctggagcgggagcgcgccggcatcatgaaagaacggaatcagctggaaacggagcaggagtatgaacgcgagaagatcacttttgcggacaaggcgatgcatgagctgctgcgtgagcatccggatcttaatgagcggatgatcctgctggtcgaggcggaaacacagaaggaggcgctgtggcagcagattgagggggatcgcgccgagctggagcgggtctcagaccggctgcaggtgcagcaggccaagctgcagaagagcgaagggcgtctggagaatctgcgtgttcagttcagcggacaatttccgaagaagcatccggtctcgtttggcgaggctttggagcaggtgcggcagcggctgcgccaggagaacgtcaggctgcagcaggagaagaaggagtggcaacagcgaagcgatgcggtggagctcaggcttggcgaactggaacaggtgctgcggctgtgggataaacacgctttggtgcaccggctggatgacagccggctgcggacggccgctctggatgagtgccgcctgatggattttgcctatgcgcgcatggatttcagcgagcgttcggtcgccgggctgcagagctgtcaggagaagatggaggaagagaggattcaggttgctaggggcagggacagtttcaagaattactgtgtctcgcgcgtccaggatgtcaagctccggcaaatggccattcagggcattgaattgaaggattcttatgcggaagtaatggaatttaggcagacgatggagacgagaatccagaaagcgattcatattgcggaggagacgattcagacccatgaccgcgatctacaggagttcatccagcgggttcacatgcatttgaagcaaataatgcaggagttgaaagagctgccaaggaagacgcggatcaagactgcggatgggtggcgggaaatctacagcttcatgattccggaatgggaggatcaggacggcaaagaccgcatccggagccatgtggagtggatactcgagcagttggagagaatcgaaagggaaaggccttcggatgagcagagcaagctgccgcagggcgaggtgcgccggagactggagaaatggctggattccagacagttgctgcaggtggttctgaagaacgaagcgatgaaggtcagctgtcgcaaagtcatgaacgaccatcaggtgaccaaggcttcctattcctgggaacaatcgaaccgctggtcgggcggggagaaatggagcaaaaatatgacgctgtttctcgggctgcttaattatgttgccgaacggcggcagtatatcgaaacgaatatgaaaattcaccgcactgtcattctggataatccgttcggcaaggcgtccagtgatcatgtgcttagcccggtcttttttatcgccgagcagttgggctttcagattatcgcgctgactgcgcatgcggaaggaaagtttctgcacgattacttcccaatcgtctatagctgccgcctccgcagcacctctgatgtcgccaagcaaattatcgaaccgaccaagcgggtgcagtccgcctacttccgggaccatgctccggagacgctggagcgtatcgattcgcgaatggatcaggtgaagctgttctga

SEQ ID NO: 52387 - DNA, 1050 bp, Paenibacillus stellifer
atgcaaatcaaacaaacaatagagcagcatatcagcttaatgaagaaaaccaccatcccgcttgaggaattggagtctttatttaagggcgccgaagtgggcccacgcgcgtttgcggaggctgtccttgaactggagaacagcggggtgctggagtcggtgaaagcagccggacgcactttgaagcagccctcgctggcttaccgctaccgggtgaacaaacaagagatgaccgggcaccatatccggttgctgcagcaggtccgcctgagtcttcatccggcgattcagttggatggctattttgcgctgtcggcggagcaatttcagcaggaccagccgtggattgagcagatcaatcaatatttgaaaatctacggtttcccctcctctgccgtacctgctccggaacgcagctttcagcttaccggtaatgagaagtggattacggatcttggcggacatgctctattaaagcggctgggactttgggaacggctgcttattcatccggtatccgatccgctgatgttcgcggtcaatcctgccttatcccaccccgcctcttcccgctgcctgaacctgattgtcgagaacaagacaacctttcaagccctgcttcctgtccttacctccagcctgttcagcactttaatttatggctgcggcaacaaaattaccggcaatctggatatgtttccgctgcagtatcccgtgcccggacgagaccaccggttctattatttcggcgacctggattacgaggggatcaggatctggcatgaggccagcaagcagcatccgctgcttcccgccctccctttctatgaggcatgtctcgccaagccctatgtactgggcaaaagcaatcagcgaagaaacgaggaagcgttaggagcgtttctttcgtatttttcaggggatgcgcaggatcaactcatacgctgtctgggctgcggcggctatattccgcaggaaacactgacttcggaagaactgcagcaaatatggaggagtcaagagtggaagcaatggatcgcatggaattag

SEQ ID NO: 52388 - DNA, 1443 bp, Paenibacillus graminis
atgaatctcggcgagctgcagccttataaggagatgatagcgctcagtgtgctgcttcaggtctattatctggagctggagtccaacgagcagagggccagggaagatattgtggagctggcctggagttcactggaacggttcaatattacgaagcttggcactgccgaatctgtggagcggctggtggacggtctgctgtggagcggaagcggaggggattttgaagcctactattatgatgatctgtcccggcagatggccgtgcagaaatataaatattttacggtggacgaggatgctacacgcaccagctgggaggagagcgggagaaccgtctaccggctgtcggaatatgccatggagctgatcttcatgagccatgagattattgaagaatttcagatcagcatcaagctgctggaaattcagatgcacatcaagcatggacgggtcacacgggcgatgcaggatgtgggcgagctgatctcacgggtgcggaagatgacacagcagcagcaggaataccgcaatgcgctgcgccgcaatcccaagcatatgttcagtgaatacggtgtgctgcggcatcggcgcctggaggaaattcacctgcaatttgacgaagagcgcaggcatttcgataacatccatcgttcgctggcccggctcgccaatgatgagaaggatgtgatcgacttcaatgagctgcgccagctctcggagagggtggagctgtccagacgggtgcatgatgagctggctgaggtggtgctgagcatctttgaggcggagacgaatctgcggctgaatttccctgagctattctggggagccgggggctttaatttccgcacccatatctgggaggaatgggtgaagtccgaagggctgccggatgcggacagtctggaactgctgatcggcgggctgttcacgcccagccaggattttatctatccgctggcttgggcttgggaggagcaggaggccggctttttgcccgaagatgttttagacgagccggacgaagccggtgaagaagagagtatcccatatacacccaagtctattccctgggcaaaagtttccgagctgtggctgcctgtttttaaaggactggcggaagaaggaagctttacctttggcgcagaagcatttacagaagaggaacagcgcaaatggtcgggtactccggatgcggttgatctgtgggcgcagttttttcacacggaaattactgtgcaggcgcaggacgccgacagccagagcggggcggcagatgaatgccagacattaatccggcatctgctggcggcaaatccggagcttacggttctgtgcggcaaggtcctgcgcacaacgattcaaggcagccatcgccgaaacgtctcctggcccggtctggaaatgagtccttataccataactatcgtagagaggtga

SEQ ID NO: 52389 - DNA, 759 bp, Paenibacillus graminis
atgaactattcgctagaacaattacagcaggcttcgcggctgttttttgacctgctgcgccggaaggtgatttcgctggatgatcccgcagccgcagaatgccttcaggacaacggagcttatgacgccctgcagtacatggccaaagaaggaggctgccggataatgaattcggggcaccgcctgcacctgctggtcaatccgctgggctcgggttttgccagcaacttcacgcaactcaggaacaaatattcacggattgaacgaaaaacccatttacatatcatcaacatcattattctggtgttcctggctgagatggaccaggatgagcaccatttcaagccgggtcaggacagcatgtcctatattcaaatctccgatcaggtatcctcgctgtttcaggcatggatcgaaatggacagcgagggcggattcagcaggcagtggcgcctggacatccaggcgatgcacaaggtctggaccagcctctacatgcagaccaaaagccaggaggaagccgattctctaagcagaggagcgagctcccggatcgggttgattcatgagggcatgaagctgctggaggaggagcatctggtcttcatctcggagaacgagaagcggattttcccccgtgaagaattatatgaaagaatgcgttatctgtaccatgatgttgaccgttataaggaactgaaggcactgatcgggcgcactttgacggagaaggagggggaagcccatgccgcgcattga

SEQ ID NO: 52390 - DNA, 4497 bp, Paenibacillus graminis
atgccgcgcattgagcggattcggattgccggacttaaatatgagaagatgctcaaaaaatatgatgatatggttctggacctcagcaatgaggaagggccggccaacacgctgattaccctgatgaacggcggcggcaagggtgtactgctgcaatcgattttccagctgctgattccgaaagcggcctggggcaaggacaatgagaatcaggttgaggcttttttccataatcacaaaaaacagctcaagccctatacctttcacgtggccattgaatggcggctcgataataacgaccgcaatgagtacatgaccaccggtatcgcgatgacggcccacagctctgtagaccagcttgagatcaaggtcgattatctgctctatgcactgctggactatgaggaacatgctgagcttacactttccacattgccgctctatgacatcgatgccggtggtcccgtgagtttcgagagcattcaacagttcgtacgggaccaccggggagaaatggcctccttcggaagccacagctcggatctcaaaaaatactataatttcctcgcggaacgggatatccatatcggcgagtggcgcaacatgcggcggattaacggtgaagagggtggaattaagggctattttcagaaaaatgatgcctttacgaaccagaatctgttcgagaagcttattattcccgagatcggcaccagcctgaacgaaggcctgcctgagcaggaaggctcgctccagaaaatgtttatggacgcggcgaccgttgcgcagagactgccgatgctggagcagcgcgagaaggcttttgccgagtttaccgtgctggctgcgccgctgcatgagctggtgaagcaggggacggaagcggaccttcgttatcgcgaaacggagctgctggggcggcaaatgtacaccgtgatccatgacgagctgaagacagccgaagaggggcgccgcaaaaaagcagacgagctggttcagctccatcaggaggcccggcagctgcgttttgaagcggataacctgaattacctgcgcagcaaagaggaggccgaccggaagcaggaggatttcaacaagataagcgataatcagagccgtgcccgccagcgtctggaagattcgaaagcgaaggaaaaagagctggaggtggcccattatctggcccggcggaagcttcagctccgccagatggagcagtggcagaaggagattgaagccatcgaagggtcgcttgaaatgaaggagcgccaagaggtggtgcaagctgcgaaggaagagctgcgccagcagtgggagcaagtgtccaggctgtgggaggggcagatttcggcgttcagccgccgccagcaatccttgagcgcagaagaagctgcccgccgcaaggaacgcgaaagctgtctgctggagctgggcggcctggacagccggattcacgagctgaccgcctccatccgccaatacacggaagcgctcggggcatttgcctcccgccatgggcaggaagctgcccattcaccggctgcatcgcttcagcgggccatcgctgctgccagaggtttcgccgagaatatcgttacgctgaatgaacggcgcaaggctgcagacgaggagcacttcaagctgcatacgaagcatactcaggccagcgggaaactccttgcccatgagcagcaggagcgggagctgcaggaacagttggataaccagctgaaccgggaatcacagctctggtcacagctggtcgtgctgctggaactgtataatgagcataacgagctgggcgctacgggcttgttcgaagcaaaagctgctgtgcaggagcgcttcatccgcaggctggacgaagctgagctgcagaccaaacggctcagaagagattattatcatcaattgctggatgttgagctccagcatgaaacctattggctgccgaacagcgacctgttgaaagtgcaggaccggctcgatgcgctgaagatcagctcgatgctgggcagcgcctttctgaacgatcagccttatctgatccgtgaggaagagctggaccggcatccgctgctgccttacggccttattgtcacggagaaagaggctgccaagctgcagcctggaatgctgaaggatctgctgctcaaatcagcagtcccggtcttcatccgcgagcagatggcgcagccggcggagcagccttttctgctgctgggcggacaaggcccgcagatggtgctgcagccggacctttttctggagtggaagcaggggatctctgcaagactcaaggagcaggaagcggagctgcaggatgcggagggatatctggccaagctgaaatccgcaaggcaggagtatgagcgcttgttccagaatgagcattcggttagcctcaagggcaagctgaaagctctgaatagcttgcagaacgagctgcgcacaagcttgggtgaacttaacacagaaataaatgaaaacgcagctgcaataggtgtgatagtgcgggaaatctccgaatgtgaagccggcaaagcggagcaggacgagaaagcggcagcactgcgtgagtggaatgaaaggacccaaaaacaagaacaggactataaagacaagcagaaggcggttgaccgcaaaagcgagctgaataaagaaattacaggcaaggaacagcagctcgcacagttgaaggctgaattggacagcacctccctggaacgggaaaaatgggttggagatacccggtattccttgttcccaaggctgcaagtctggtttcctgagcttgtcttcccggccggactacaggcttcctcaaccggacatgcagaggatcagccggagttcccccttgatgcttccattcaggacaagctccttcagaccctaagtactctggagagccttcagcattccctgagccgcaatgagctggaaatccgcacaagggccgcacagatcaaagcaacggctgaacagctggccgagcttgaagcagccgtgcagcagatcgaggcgaattggcgcaatgtgcgtgagccgggcgatacgcctgactcgatcatggcagccagaacgcggcagaagagcgacacaggaatgctggacgaggactatcagcttgtccgggattccttcgtccgctgtcagacggagctggacaatctgcagaagcagctggccaaagcagagaagtcaatcaaggaaaagcatgaacgggctgtggagctctggaatgaaccgctggacccgaaggaggaagaaatccgggaacggtcccgcgagaatgagtatgcgctgaacggctgcaagcagaccctggcttcactggaccagtggcttcagacactcgccagccagagcaaagtcatggaaacccatgtggaagggcgtctgcagctgcgtgacattcctgaagaggtgcagctgcgcacaagagaggcctgcgagcaagcggtggcagagtggctgctgcgcagcaaggaaagccgcagtgaacggagcgaaatttcacgcaaagtcaaggaagagaaaacctcactcagcggcaggattgccaagagcggctggaataccgagctggaaaccaagatccaggaacggctgaacaccgtgcattgggaggacttctccattgcgctgcaggtgctggactcgatgctccagagctcacaggatcagattgagagcatccgcagcgataaggaaggtatggagctgtcccgtaaaatgtgggttggacgggcggctaagcgggtagtgcagatcgttgacattttgaagcgcatggagcgccggatgatgatccacaacgagaatggccatgcgttcccgctggtgcgtttgaattacaaaaacatcaatgtgcccaagaccaccgaagatatcgaaccgctggtgagcgattacttcaaccgctgcattagcagcctcctggagaaattccccaagattgaacaggcgccggcagcggcggtaagggatctgatcagcgacggcaagattgtctacgctgccctgcagaaccgcttcccggtcttgcaggtctataagccggtgacggagaattatttcctctatgccgctccggaagagtatcactactcggattgggaagtcatcaaccgcggagctttggatgaagcggtcggcagcggcggacagcgccagtcggtccagctgctggtggcgatgatgatcatgacccataagcgggtcaaccgcgagaataaaggctggacggtctttttatatgacaatccgttcggtgaaatggtctccaataacgtgcttgatccggtatttgaaatctccaaggcactgcggttccagtggctgatcgttacaccgccggagctggtgaaaaatgatgtcagcgtccgcttcggcgtctactggcagctttattttggcggtgaaaagggcgacatgctggaatccacgctcattaaaggcggacgcaagctgattccggcctccttgttctga

SEQ ID NO: 52391 - DNA, 1071 bp, Paenibacillus graminis
ttgaaagagttaatcatgcaggtcattgagtgcaaatacggtgcagtgcgccgaacgagaaccaaactgaagctggagaagcttgagcaagaaattataggtacctacgagtaccgttcggattatgtggatgcaggcggtttctccaagtttcaggaggggatgaaggtgcttttagctgaagggtatctaaccccgcttatccggccaaagaaatacaagtcttctgctctggatgaagtctattggctggctgaaactgcgtccactacggaaggctggaacagggcttccatgctgcgggtattggctgcgcatccgctgaagattaactactatatgaaccatcccgcagagcagactgcacaaatatgggaatacatagagcggatatatacttttctgcagtccgcaggagaacgggaaatcatcacccgggaagaacgctcactagagctgttcggcgatgagaagtttctgtccgggaaagaaggcatgcagctcttaacgagattgggcattacattggagaaccttaaggcagtgaccgtgcgggagcactttgagtattatccggagcccttgcagtctgtacgttctatcctgatttcggagaatcattctttttatgactctgccaaaagactgatcaaagcaggcaaatccgtttgcggcttgcagccggatatgctgatttacggtgaaggctggaagatcgccagcagcttaatgtttcttgaagaactggatgtggaccccgttggagcttccatcttctatgttggcgatttggacaaggcgggctgggatatttacggaaatctgaagctcagctatccgcacttcaagctgaacctggcgctcacagtttatgaatacatggtcgatgttgcaaaacaaacatacccttatgcaaacgaacagaaatgtaccgcgtcccacttagagcttgtgctgcaggagttgtctgcggtcccccgtctgaagctgtgtatcgagaaattgcttgaagtgaacaacaggattccccaggaagtcctaaactacgaagtgatggcgaggttggcgtaa

SEQ ID NO: 52392 - DNA, 1443 bp, Paenibacillus odorifer
atgaaccttggcgaaatccaaccttacaaagaaatggtatctttaagcgttctgctgcaagtctattatctggagttagaatcgaatgagagaagatccaaagaggatattatagaacttacttggactgcactggaacgttttaatatcgccaatcttgggactaccgaatccgtagagcgtctcgtggacggtttattgtggagcgggaatggtggagatttcgaatcccttttctatgatgatgtgacccggcaaatgtccgtgcagaaatataagtatttcacggtggacgaggatgcgacccgcagcagttgggaagagaatggaagaaccatctatcgtctctccgaatatgcaatggagcttatttttatgagccatgagattattgatgaatttcagatcagcatcaaactgctcgagattcaaatgcatattaaacatgggcgcgtaactcgggctcttcaggatgttaatgaactgatctcccgtgtccgtaagatgacccagcaacagcaagaataccgcaatgcgttacgccgcaatccgaagcatatttttagtgaattcggagtggctcggcatcagcgactcgaagagattcatcatcagttcgaggaggaacgcaaacattttgatagtattcaccgttctctggccaggctggccaatgatgagaaagacgtaatcgacttcaatgagatccgtattctctctgaacgagtcgagctttctaggcgtgtacacgatgagctggctgaggtagtgttgaatatttttgagatggagaccaatttaagattgaactttcctgaattattctggggagcagccgggtttaacttccgtactcacgtatgggaggaatgggtgaaagaagagggtctgccaagcggtgacagtcttgaactgctgctcagcggattattcgctccgaatcaggacttcgtttatccgcttccttgggcttgggaggaacaagaggtagggtttatccctgacttagtgatggatgatttcgaagatgaggtggacgcagagcctgttcaatatattcctaaaggtatcccatgggcaaaagtagtggatctgtggaagccggtttttactgccttggctgagcagggaagctttacctttactgcagacgctttttccgccgaagaactgacagggtgggcaaacacaccggatgctgttgatctgtgggtgcagttttttcatacagattttttagtgcaggaacaggcaccagaaggtggtagcggcgtttctgatgaatgccaacagctaatccaatatgtgcttgcagaagatcttctgttggagagtttacgcggcaaaacgctgcggacgagcattgctccagaaccagcctcaagggtacggtgtcctggtctggatatgagtccatatatgattacgattgtggagaggtga

SEQ ID NO: 52393 - DNA, 759 bp, Paenibacillus odorifer; identical to SEQ ID NO: 52262

SEQ ID NO: 52394 - DNA, 4482 bp, Paenibacillus odorifer
atgccgcggattgaacgcatacgaattacaggacttaaatacgagaagatgctcaagaaatacgacgatatgattctggacctctgcaacgaagagggacccgctaatacgcttattacgctcatgaatggcggtggaaagggagtactgctgcaatccatttttcagctgttaatgcccaaaacaccatggggcaaagacagtgagaaccaggttgaggctttttttcataatcataaaaaacaacttaaaccgtacacttttcacgtagctatcgaatggcatctcgacaacaatgagcgcaatgagtatatgactacgggaatcgctatgacggcacataattcgcttgatcagcaggatatcaaagtggattacttgctgtacgcacttacagattacggtgaagcggctgaacttacgctatcaacgttgccgttatttgacgaagtgactgctgaacctacgagttttgaaacgatccagcaatttgtacgcgatcggcggggggagattgtaccttttggcagccatagctcggatttgaaaagatattatgacttcctggctatccgggatatccatatcgccgagtggcgaaatatgcggcggatcaatggtgaagagggcggtatcaaaggttattttaaaaagaatgatgccttcaccaatcataacttgttcgaaaagctgattattcctgaaatcggatctagtctgaatgaaggattaaaggaagacgacaatacgctgcagcggatgtttatcgatacagcaacagtggctcagcgcttgccgatgcttgaacagcgggagcaggtctattcagagtttcttggtatggctgcaccgctttatgagctggtgaaacttggcgtggaggcggaaaacgtagtacaagaaactgaactacgtggacgccaaatctatacggttatctatgaagagcagagaaatgcagaagttgagcgaagtaagattgctgatgaactggctggacgttatcaggatgcgaagcaactgcgctttgagacagacaatcttaaatacttacgcagcaaggaagaaacggaactgaagcaagaagagtttaagaagctcagtgatgatcagagccgtgcgcgtggtcggttggaggattccaaagcgcaagagaagaagcttgaagtagcttattttctggctaaacgtttgctccatacccggcaaattgagcagtggcaaaaagaaattcaagctatcgaaggttctctggagatgaaagaacggcaagaggtcattcaggcagccaaggaacagctgcggaaacagtgggatgtggtgtttaatctctggcagcaaacgattagagagtttgagacagcgcagcaagacctgacggcggaagaaagggaattgcgcaaggaaagggaaagtttcttggtagagctggcggggctggataatcagatcaatgaattgaccttatctattcggcaatatacggaagaactcggagcattcgcagcccaatatgggcaggatgccgcccattctccggcagctgcgctgcagcgtacggtctcagcggccaaaacgattcttcaagacattggagacttggaagaacagcacaagcaggaagagattcggaagctggcactgcataagagtcatgctgagctgagtgagaaacggcgttcttatgagcgtgaagcggacgagcttggggttctgcttgagtcacagactcagaaagaatcccaattatggtcacagctcgttgtactgctggaaatgtatgaagagcataatcgtttaggagctactggcctttttgaagaacaagatgttatcccggcacgttttatccgaaaaatagatgaagtagagcaacagactaaacgttccagaagggattactataatcagctcatggatgtggaactacagaaccaatcctactggctacccaattcagatattctgacggtcaaagatacactcgattcgttaaagattcaatcaacgctaggtagttcctacttaaatgaccgtccgtatcttgaacgtgaggaagaactggagcaatatccgttacttccatatagtttgattttgacccggcgcgaagctgataaaattcagccggaactgatgaaggacaccttgctgaaatcagcggtgccgatctttatccgtgaagagatggcagcttcgcatcaagcatccttcatgctttttgcgaatcaagggccgcaaatggtcttgcagccggatcgtttccaggattggaagagtagtattcaggggaagctcaaagaacaggagcagatccttcaggactctgaagcttatttatctaagttaaaatcggtgcgtcaggaatatgaacgtttattccaaaacgagaataccatgacgcttacaaccaagcatgaggcccttattaaactgcaggctgaacttcagcagagcattatcaatctgagcaatgagatgaatgagaacgaagggacgcttacccggatcggacgggagctcgcggagaacaaagctctaagtgtggagcatgagcagagagcgggggttctgcaagcttggattgaacggacgaagaaacaggaacaagattataaggaaaaacaaaaaataatcgaacgaaagaatctggtgagtaaagagttagcaggtaaagatcagcagcttgaacacctaaaggtgcaaatggaaagcttgagcggacaacgcaataaatggacgagagaaaccgaatatgcgatgttccctagactgcaacgatggtttcctgagattgttttcccaacagatcgccagctttctgatgaaggagaagtcatacctgtagatcctgtagagcagaatcttctcttgcagcagctcagtaccgttgaaagcctgcagcaatcacttaccgaaaatgagctggaagttcggacaagagctgcacagattaaggcagcaagcgagaatctggctgagcttgaatccagcctgaatcaagtagatgtgaattggcggaaggcgactgaacctacggaaacgtccgagtctattatggctgcaagaaatcgccaaaagacggatactacttcgttagaggaagactatcagattgttcacgacggttacatccgctgccagactgaattggagaacttgcagaaagagttgcgcaaagtagagaagggtatcaaggagaaacatgaacgtgccgtggagctttggaatgaggcgctagaggataaggagacagaaattcaggagcgctgccaagcgaatgagcttatgcttaaccagtgtaaaagatccttggatcgaatggatgtcctcatccagactttatccaatcaaatcaaaataatgaatgcgcatattgaggatcgcgtcaacctacggagtgtaccagaagaaataacgctgagggttagagaaagctgcgagcctctagtagccgactggcttctccgcatcaaggatagccggattagacaggatgaaatctccaaaaaggtgaaggaagagaaaaattcattaaccgaaaaacttgcgaaaaatgaacggaactccgaactggagaccaagattctagatcgattgaatacggtccattgggataatttcgctattgcactgcaagtcctagattccatgctacgcagttcgcgtgatcagatcgagagcattcaaagcgataaggaaggcatggatctctcccgcaagatgtgggtaggccgggcttctctacgtgtggtacaaatcattgatattatgaagcgaatggaacgccggatgattattcataacgagaataattatgccttcccgctggtacgtctgaattacaagaatatcaatgtgccaagaacaagcgatgaggtagagccgatggtgagtgactacttcaatcaatgtatcaatgaattgctcaaaaagtatccaaagatagaacaagtgccggcactggtaatcaaagaggttattaatgacggacgaattgtctatgcggcgctgcagaaccgctttccagttcttcaggtgtataaaccggtaacggagaattatttcctctacgccgcaccggaagattatcattattcggactgggagattattaatcgcggcgcactggatgaagctgtcggcagtggggggcaacgtcaatctgtacagctgctggtcgcaatgatgatcatgacgcataaacgggtgaatcgtgagaataaaggctggacggtctttttatatgacaatcctttcggagaaatggtctccaataacgtgcttgaccccgtcttcgaaatttccaaggcactcaaattccaatggctgattgttacgccgccggagcttgtcaagaatgatgtcagcgtgcgttttggcgtgtattggcagctttattttggaggcgtcaaaggggacatgctggaatcaaccctgatcaagggaggaagaaagcttattcctgtctcgttgttctga

SEQ ID NO: 52395 - DNA, 1551 bp, Actinopolyspora erythraea
atgcgatccgacgagggaacagacgcggttccgttagcccgcgacgtggcgataccgaccgacgacgagtcgatcactcggcggcgacgtgcgttggcgccgatccaggtgctcaccgacatcgaacgcaccaagaccagcctcgacggcgagttctgggagcactacgatctgttcaccctgtccttggccgtcgttgaccaggtcgcgctcgccatgggcatctcggcgggacggacgtgggacgagatcgtcgagtacgccgcgaagcaggctgctcgccaacatccggatggtggagtctccgagtgggacacggtcgcggagcgggtggtggtctcgctcgtgaccaccgaggtcgaaaccgttccctacctgtcgcacaccctcgatggtccgcgctggctcgcccaacggttccggttgctctacatgcaggccagtggcacggagggaacagaacacctacgcgcttcggaacaagcgatcaacatcttcctcgaagcgttggatctcgatatcgaggcggcgcagatcgccaacgaggcacagctgtccgccctgatcgaacgaggagcggtcgagtccgccgtgcagatcgcccagcacgagcggtaccgatcggtccagttactggaacggatacgccgtatcgtggccgacaccctgctggaccccgacacgcacgactggatcgaggatgttccagccctactggggcgttcactggatcatgtcaaggccaggttggacgcggaggcggagctgctcgaggcggttaccgatcgccgtgccgagctggacgacccgcatcgactcgacgccgcgaaccagctcgtggaggtcctgcgggagtgccggcatcgacacgaccagctacatcgccatctgatcaacgcgcggtcgaagttacgggaggccgtggacgaccgactctcgcgttccacgcgggcggtgtcccgttccgagataggtaaggacctgctgagcccttatatgaggaattcggtccgggaggccgccgcctcgtgcgaacggatgatggccgcggtcggcggggtgggcagccgctggatgcctgccatgtcgacgttgatcgaggagttgtgtgcgccgccccgtcccccgcagcagggtgaggaatacctcgcccccgaattcgacgacgcggaccagcccgagtggtgggaaccctacgaggacaccgtcgaagcgatgttcgaggcgatcgaggagccggtgacactgtccgccttgctggagcgcgccgcggggacgcacgtcacggacgtggacggtaccgcgctcgacaccggtttcctgcaagcagcactggtgcacgccgcgcatcgggtgtgggcgacgtggctggccggccgcagcgcgggagatcggatgctcgtcgcggttcccaccggtgagcggctcgtgtccgagcgtgtggactgttccgagctgttgttggtgccggcggtgatcaccgctgacatcgatgcccggtacgacgtggagacgggcgtgtcgaccgaggagagggagacgacggaatga

SEQ ID NO: 52396 - DNA, 4452 bp, Actinopolyspora erythraea
atgagcgaggacctgccgaccccaccactgcggctgcgcaggatccatctgcacggggtcggtccggatcgggcccgtttcgacccgttggatctggacttcgccaccagcgacggcgcggcctcgcgggtgctgctgtcactgaccaacaccgggggcaaatccaccctgatcacgctggtgaccagcctgatcgtgccgtcctcccgtgcgcaggtgggcggcaggcagctgggtgactacgtgctcaccggcgacacctcacacgtggtctgcgagtgggaggacgagacgaccggtgtgcgcatggtcaccggaacggtgatggagtggaaggacggtcgccgccagcccgggccccagcagcgttccacgaccaacatgtaccgccgctggtatctgttccgtacacgccccgatttcccggggatcgatgatctgccgtttctgaccgaaggacgacgtaccaccttcgaccagtacctgacgatggtgaaggaactcttggatccgtatccggccgcgcaggcggtgttcgcgaagacacagcaggagtgggtcgagacgctggagcggcagacgaacatcgacccggtcctggtcggataccagatgcggatgaacgactccgaagcgggtgctgagaagctactggagtccttcgactcgccggaccacgtggtgcggttcttcgtcagcgcgctcaacgacgagcagcacctcaccgacttcaccagcaagctccgggactacgcggaactcgccgtcgaccgtccccggctggaggcgctcgccgccttctgtgagcaggccggagcgcgtgtggaacgggtggctcgaggtggggaggctctcgcggacgcggaacgcgaggaaaagcaggcacggatctcggggggagaacacgccaccgcgctgagcaaccggatcgaacaggaccggcagcgatgtgaggaactggccctgcggaaacagcggacgcaggagaaagccgccgagctcagacggaaattcagccaggtcagcgacatccgtatgcagctgcatctggagtccgctcgggtggagctcgccgcggccgaatccgaggaggagcaggcccggaaggccgaggaggaacacgggttcgaggccagagcctgggaggcggtccagctcgttctcgacatctccgaagctcgtgctcgtgtgcgcactgcccagcgcgcttacgataccgccgaacaggggatggaaccgttacgtcgtcgtgcggatcaggccgcggccgccctcgccgcccgtctggacacgttggccaccgaagccgagcgcaaggccgaggacgcggacacacgagcgagcgaggccacggaggaacagcgtcgtgcccaggaacggttgcaggaggcgactcggcgtgtcgacgccgtacgccgcaggatcgacactctcgaaacgacagtgcacgaatccgaggccgcgtacgaggcggccgtgtccgcaggctggatcgcggacggtgaacctgtccgggactgtgttacacggtggaccgagaggagggacacggcccggcaggaggaagccgaagcggaacgagtcgcggaggaggccgaggccgatttcgaccgggcggaagccgacatcgaggaactcgagaacgaactcgtctcccttcgtgagaaggcatacgaacaccgcagccgtctcgaggccttcgacggagaggtcgccgggctggccgacgacgaggttctgctgagtgtgctcggcgcaccacccgctgacgtcgcctccgtgcggcgggccgccgatctcaccgagcgtgccgcccatgagtccgaggagcgcgcagccggacaccagcagcgggccaccgaagcacagaaggaggtggcccacctggacgaggcgggtaccgcgccggccggcccggacacgctcgctgtgctgcgggtgatcacggaggcgaacatcggcgcggtcacggggctgcggtggatcgagaagaacgtgcccgatcccgaggcgcgcgctgcctacatcgccgcccatcccgagctcgccgggggagtggtggtcagcgaccccgggcgattcgacgaggtcactgcgttactggccgagaacgcgccgcgtacacgcacgacggtgaccgtgaccgtcgctgccgacgagcacggcacgaccaccggagacgcggaacggttccactacgtcgtggttcctcaccgcgccacctgggacgcggagtgggcggcgcgcacacgggagaacctgcaccgaaccgccgtacacgagggcgagcaggcggcattggcgcgtgaggctgcacgccgcaaccgagcctgctcagcggcgtgcgtgtccttcgccaaccgttgggaggaaacctcgcgggagaaactcgtggccagggcggaagaggcggacagcacgctccgggcgcgggacgaacagcgtactcaacggatgaacgaacgccagcgtcaccgtcaggaggcggccactgcccgacagaaccgcgacagggcgcgcgacagggcctccgaagcggaacagtggctcgtcaaggccgaagagctccgtgcgcaggtcgaggcggccgagcgtgctcgttccgagaagtccgcaggggaggcggaactggcgcaggcgaactccgaggtggactcggcgcgacgtgccgagcgggagtaccaggtggttcgcgactcctgcgttgcggaagccgccgagcaacgggccaaccgcgatccctggctcaaagaacgtgcccagctcggaaccgctccggcagcggtggatcctggcggcagtctcgaagcggtgcgcgcggagtgggaaacagcgcggaaccagcgggatgccgccgaacgcggcatgcccgaggcgttggagctggaccacgcgaagcagcttctgtcccagtgggaagttcgtcgtgaacggcacggcacacgggagtggaaacgcgccgaggagctttccgagacttcggccgcgtcatccgccgcgtcgttgaacggcgcactcacccgtgcgaaggaagcagccaggagtgccgagagcaagcggctggaggcccagagcgcggtggaacgggcacgcggccacctcgaggaggtccgtcccactgaccggcagaaccacgtcgacctgtcccgaactcccgaatgggaacccgccacaccacaggagatcccgtccgtgctcgaacgtctcgacacgtatggagctgaggtgcgccgagagcgggacgaggcggagaacgaggtagacgaggtggcggaactccacgaccaactcctcaaggacatcgaagtcttcggcgacatcgtcgagatctggaccgccgaccgcagcccgaccacgcacgtgttccaggggacgaaggagtcggcgcgtacccggatgctcgaattgcggcatgaccacgtgagcaagaaccgggcgttgaacaccgctcaggacgaacttcgcgaggcggtccaccacgcccgtgctgtggcctccgacgtgcgctggaaggatctcggagagccggtcgtggtacggatccgttctctgtccgaaccggacctggtcggtgagtcctcgacactggctgagcggatccgcgccctgggggagtccgcgacgggtgatctggaggatttggacacccatcgcacgatcctgcgtgacgacctgatcgtgctgtgccgtgagcagcgtcggttgctgcgtgaggtggtgcgttcctcacagctgcccgtcggcctcggtgaactgtccacacaacccgccatcaggattcgcttcgcggacgccccggacgacgaagccgccgctcgtttgtcggaccggatcgacacctgggcgcgagagctcgccgagaaccccaagcgtgcgacctccagcgacgcccgggctcggtggcttgccgacgccgtgcgtgacacggtcgtgaaccgcacacgcgccggagcctggtcgatcgacattctcaagccgagcatcgacggccaagtgttctactgcacgccggagcggatcccgtacgagttctctggtgggcaggagctcaccctcgctgtcctggtctactgcgcgctctcacgggtgcgcgcggcgcatcgggtgggcggtccgcgcccgccgggaacgttgatcctggacaatcccttcgggtccgcctcggcggaaactctcatcgcgatgcagcatcgcctcgccgcgcataccggtctgcagatcatctgtgcgaccggcttgcacgacaccggcgtcgacgcggcgttcaccggccccggatcggtgatcgtcaagctgcgcaacgatggtgaccagcgtcgtaacctttcgttcctgcggcttcgtgcgaacgttgtcgacggtgtcgacgtcgccggagcgatgaccggcgggcgggatccgtccgcctcgaccaactgggtcgacgcgttgcgctacgaggtggggcgatga

SEQ ID NO: 52397 - DNA, 1056 bp, Actinopolyspora erythraea
atgagtcgggttctgatccagccctcggaagtggaggcactccgaacgaggctgcacgatgccggcactgttcgtgtcaccctggaggaactctggcggttctgggtcgaggcggcgccacgattggtcggttctcccgaacaaactcccggactctccgcagccctcgccgagctcggttcacgccaggagatcgagttgccgcgccaagcctgggacaggtcgaccacgccccctctgccacggtccgtccgcgttccgaaggcacggacggcctcgcgcaaacgtcagtgggtctcgtacccctggtgtcgggatctgggatgggtgtcctcgctaaccacgctgacggacacccagttcgataatctggtggccgtcaacgcttggctcacccgccgtcccgccaatgtcgtgccggtgccgatgcggtatcggtccgcggagatcttcggtgacgagaaacgtcttgaggcactggcgaggacaacactcttcgggcccggccggctctcactggagctgctggcctgcgtccgacgagcacctccgcttcccgccgtctcggttgggacgggaccggacgtgctcgtggtcgagaacagcgacccctactgggctgcggtcgatgtgctgtcctaccgcgacaaccatccggttggggcggtcatctggggagctggcaactccttccccgcccaggtcggtacactcgctgtcgacgtcgcggggcgcggaccagtgacgggcgagatctggtactggggagatttcgacccgcctggcctcgcgatcgcgaccaacgctgctgcagctgcggccgaactggacatggggcatctcaaaccagcccatctcctgtgggaggagatggccggtcggccgacacagaacccgggccactgtgcatggacgggcgaggtcgccgagtcctggctcgggcccccgctgtgggagcggttctcccgcgttcgggccgaacagggacgcattgcccaggaagcagtgccgccgtacaccatcgccgaatgggcggtaacgctgttgaaggagtag

SEQ ID NO: 52398 - DNA, 1506 bp, Bacillus niacini
gtgaacgaatcatgggaaggatttgcccagcgaatccaacgattaaatccactgtttgagcttggcaggggaatggaagtaggggaattgaaaccacatatccaaaccattctcatgcaagttcttctcaccatcttttatcgtgaattaaatgatgatgatcatcgtcgtaagtcagatattaagtatatggtggaagattctattaaacagatgaaactattagcagacgaaaagcaaattgaacggattacaagcgggctcctttatcagggtaaagaagagtatagtaaaccgtttgaagccttatattacgatgaaataaaacaatcctgggagacacaaacctttcgatatgtcaccatggatgaattatatacgaatttggagatgggcggatccattgtatataaactcaccgatgtcgctcaggaaatgatttttatgagcagggaaatggcagaggaattctcgattacgattgaacaactctacagtatgcagttgattaaaaacggtaatttcagaaaagccactcgtaacctcgatcatctcatttcacgtgtgaaccgcctaatggcaaaggaattctcctttcaaaaggaaatgattaataatcccaaaatcttattaattgaagatgaatggcaaagggcagacaatcgtgttgaaattgagaagcaatttgaagaagagaaaaatcacttccggacgattactagtatgatagataagacaaaacgaagaaacgaagaagatgattttattcaaaaagaattgattctacttcaagaaaaaattggccatactaggcagctgcatgatcgttttgccaaactcgtcattcaaaatatttcctatgagatgaaattaaaagctgaaaacccttcattgttttgggaaaacagtctcgtttcatttcgagagcatttttatgaaaattggttaatgaaggaaggcgttcaacgtttcactgtcatagaaaaactactatctcctttattctcaccgaagaatgaatttatcttgccgcttgactggatttggggtgagcaagaactcaatgaaaaacaagtaactgatacaatcattgaagaggaacaagaagaaggaatcaccagactacgagtgaccaactgggattctgttatcaaggcatggagttatgtatttcagtttttacaaaccaacggtgaattttcattaaccgatttaaaagagctgccattagaagtgcaggacttatggtttgaagaatctgaaacgattgatttgtggatgatgttcgataaaaagccgctgaaggtccaagtgctccatcgaaaggaagaaaccttaagcgatgagagggaaattcttctttataaactaatgaaggaatatccacaatttgaaatgtttgaaggcttaaaaatctataccatgttcgatcatcaggcggaaccttttctgtggtatcaaacgaaaatgaccccttttaaaatttgtgtagaggagaataagtga

SEQ ID NO: 52399 - DNA, 747 bp, Bacillus niacini
atgaatgcagaaacaatcaaaaaagcatcagctgtctattttactctattaaaagaaaaagtaattgatgaaaatagtgaacacttccaaacctattttgatccggaagtaagacagacagtactattattagcagacgaatccggtacatatatcattgaagcccctaaacgcatccatttagtggttcagccaacgggttcggtctttgcaaccaattttacccatttaaaagataagcataagcaagtggaaacgaaaaaacattttcatcttatcagcattatcattatgtcttttttggcagccatcgatcgaaaccaggctgcaaaaatccgcacgaagcgagaaggcattagcttttatgcattagaacgccaagtaaatgatctcatcatgaaatgggagagcctgcttaaaaatcaacccacctttggagaagaagaacgaattgatatgaaggaagtggtgattacatggaaatacatggaggtcgatagtgacgattttgggttaaaaaagggcaatagacgaactaggattggtttaattgccggtgctatgcgcttattagagagtgaggggcttatcgtcatattggaccgagacgatatcgctaaggtcattccaaaacaagaactttttgaacggattgaatacttgtatcatgattatgaccgttatgaactttttaaaaagttaatgacatcagaggaggatgagcatgccgaaaatccatcgaattag

SEQ ID NO: 52400 - DNA, 4464 bp, Bacillus niacini
atgccgaaaatccatcgaattagaattgtcggcctcaagtatgatggcatgcaaaagcaatataaagataccacgtttaatttccataatgaggagacatccacaaatgggctgattgcgatgatgaatggcggcgggaaaggtgtgtttcttcagaccattttccagatacttaaaccaggtacctcttggggaaagcaaaacaatcgttattaccagcagttcttttttaataataaagagcaatttattccctatacttttcatgttctcattcagtgggagttggacggtgcggaccaccgccatttgataactggaggaatgttttcagctgagcagcggatttcgatgagtgaagaaaacgaaaataaaacattagaacaggaagctaagattcttcctaatataacattctatacaagagaatttgaacggaaggaagaagcttccattgagcatattccgctctatgaaaatggtgaggtggctgaaaccgaaggcttaaaagactatttaaagtggaatggatatgacgtttaccgagatacgaaaaagcattatcgcattcttgatacatacggcattaaccgtaaagactgggatattatgaaggacattaataaagatgaaggcggcgttggaaaatacttcgagggagctgaggatgatcattccctgttccaaaaacgaatcattccaaccgtaagtcaggtcttacatcgaaccgaacaccaaaagaacgatctagtggagatattcaaaagtcaggccagtatcgcaaaggatctgcctgtcctattgaaaagagagcaagctcataaagagtttttagaagacattgtcccatttgaagagcacttagctaaaggggtagaacataaagaaattgttcaggcaagtatacaaactggcaggcagcttctaggtgcgctggagcatttgaagcaaacagaagaggaaggtttgcttactctgcagaaagacatagagaaactaatcattaagcaagcagatttacgttatcaaaaggataatttggagtttgcaaaagctcacagagacgtcatggattgggaaaagaaattagtacaagaaaaggaaaaacatgtttccttacaaagtgttgtgaaagaaaaacaggaacgaaaagaacagcttgcttttcaagcgttattgaaagaatggaatgaaaatgaacagagtattgtttccctctctcagcagattgcaacattggaacaaaatagcgggttagagcaagtgaatcaaagaatggacgaaattaaaaaagaagcgagagaacaatggaatcattcttttctatcgatacaagaagggataaaacagtatctagggtatcaaaagttcttaactaaaaaagcaaaagagctgtcgcagcaggagaaacaaaagacgacagagattgctcagctcagttctgaaattgattttctttatacgcaaatgcataactttgattctaaggaagcagcactcattaaggaatttggcgaccgcttaacttatgatttaaagggcttgactgacagtttcttgaagcaaattgatgagaaaaatgcaagattagtagagctgcatacaaaggataaggaatctagtgaaaagcaaaacaagttggccacttcccatggtacacacgttcaatcgattcagtattcagaagagaaatatgaggaattaagccttgcaaatgaaaagcaaaaagaaagagaagcaaaactagtagatcggctgcatggtttactggatgatgttacagcaccgttaacgcactctctcttatccaagtatagcctgcaaatagaagaaatattgagcaataaccgacaacaagcagaacaaatgaaaaaagaactttgggaaacacaacttgactattccttaaacgatgagcccttttggattgccaataaagatgtgaaagagttaaaggaatggattgatgagaagactggaattgatgtcttttatggaactcaatttcttcaatctttaagtcccgaagaattggcgaatacccttattaacgatccgctgcttccatacggtttggtcgtaagcgggcagcaatggcaaaaaattaaccagcaggttctctcaggaagaatgtttaagagtcctgttccgattttcttgcgtgaggaaatgaacaatgaacagcaacaaccaacctttgtcatcattaacggaaaagagaaagagcttttaaccgataaaaatcaatttaccagctggaaaataaatattacaaaacaaattgaagacaagaaagataccctttttgaaattgaaaaaacagaaacctccttgcgtcgtgttttaaaagaaatcgatcgtttttcatcaagtgagctttctagtgatatcgaaaaagcgatgattcaggaacaaaacactcttctttctttgaaaacgaagctacaggaaattaagacacaagaagagaaagaaaaagaatcacagcttgcgttaagagaacagctggaaaagacaaaagggaagatagaaaaattttcaaaaaatgttgagacattagagggttttgatcaggaaaaaacgcttcacttagaaaataaacgggtaaaactggaaaaagaaaaacagaaggaagccttgacacttcagcaacaagaaataggtaaagagcaccagcagaccgttgaactgcaaaatcagtggaatcaaacatacctagaatggaaacttaccaccgaacaaaatataaaggaaattgccttctttattgaagaagccgtttttcctgccgaacaaaaagcggagcaaagtgaagaggttcctaagctttcaccacatttattacaagagataaacggaagtatcggggagctaaggcagctgcaaaaatccaaagaagaacaagctagggaattactcgttcttcaagcaaggaaagaaacggagcaaaagcagcagaagaaattagagaaaaaactccatacccatgatgaggagtggaataaagcagccgaaccggaggaaccgattagtatattagaaaacatgctgcaaaatgctcagaaggaagcaaaggcagcggaaaaagaagaacgggaacaaggaactgcggtaacggtggcggaaacttccttaaagcacgcgactgaacagcgtgacaaattaggtaaaaagatagaaaaacatgaaaaacagccagaaacctgggaagaccttgatttagaagtcaaagaagtagagattaaagaccaaacaaaagtaacgaaagaggaagtaaagaaggctgagaaggttcaaaaagaaacagaaacgaatatagctggctatgaaggagacttattaaccctatcggttatccttaaagaagaagcagctgtatttacgaataatgatgttgaaaaaattaagagtcaaggtaaggcatgtatcttgtcttggtgtgaagaacatcaagcggttcaagaagaaggtcaggaaaaacatgcgaagattgaccaatcattgcgcaatctcaagcttacgattgaagggaaggattgggaagttcgttttaaaaatgaagtactaaccacccttgaccatttggatacgaggcattatacgcatatccaaaccattgttaaaaatatgaagcgtttttcacaaagtggtttggaacaattagaacgagataaggaaagggcagagaaggcgcaaaacttctgggccagccgtgccagcatgaaagtgatgagcatttcagaggcaattcgttcgatggtggcgaaaatgaaactgaaaaatgaacgaggatctttcccgctcgtccagcttaaagaagatatcttacctaaaaagcctgaagatatcgaaccactgctgaaacagcattttgtttctgcgattaacaaaatcacgaaacaatttgttatgattgatgatcataaccgggccttagacgaagaaattaaacagctgattagtgatgagcaaatattatttgtgtcacttcgaaatcgttatcctgagcttttggtttacaacatgcgaacggataatgcctttatgtacgggaagccgcaaagagagcattattcaacctggcagacaatcaatcaaggttctaagacgaaatcagacggcagtggcggacaaaagttatcagcacgaatggtgatgatgatgatgttattatcggttaaaagtgaaaccgaccatagctgggttccattagtctgtgataatccgttcggacaagcggcatccgcacatgtccttgacccgattttcgccgttgctgaaaaactgaagttccaattcattgtggttacgccgccagagctagtgaaaacggaaattagtcaacgattcgacgcctattataaattggatttcattcgtgaaaaaggaaaagaaatagtatctgacacgattgttccggcctttcggatttaccagggggaggaagtttctcaggtaaggtaa

SEQ ID NO: 52401 - DNA, 1071 bp, Bacillus niacini
atggtcatcgacatcattgaaacaagggtgagagggtttattgctgatattcaacacccaaaacaaaaaaagaagattaatatcaacgatttagagattcagttgcgcaggcttttggatgattatttcgaaatggacgggtatgcattgttccaccgtgccattgaagccttgcaagctgagggaattcttattcctatacaaaataatcaatataatggcagaacaccagggctgccattatattactgggttaatataaaagttcaatcagccaaatgggatcgtcttgggatgatgaaattaagtgatcagtttgacttttccttttatgaacggcacccccaatggcaaacgaaagacgaatgggaccgaatccaccatttatattcgtttctacaatccagtcaggaacgggatattgtatcagtcgaagaaagaagcttggagctcttcggtcatgaaaaatttctactcgacggtgatagttttcctgaagggaaaggatttttagctagaataggagtatcagaagagcgtcttaaaatggttaactacggggagccatttgtattttggatgaagcaagggaaagaaattaacgatattcagcgggtactgattgttgagaatctatcttttttccatacttccattaagttattggaagccaatcaacttgattatgaacctgaactgattatttacggtgaagggactaagattgaacggagcttttcttttttcttccgaatgtttccagccaaaaactatcttttctattacgcaggtgatttggatgttgcaggatacggcatcctcattcggcttatcgaaaagtattcggattgctgtattcagcctgccttaaaaatttatcgaaaaatgcttaaatgtatagatcagcgaaatgagcaaaagcaaggccaaacacagaatcttaaataccgtgacgccttctttcaatggtttaccgaagaggagcaaaatctattaatgcaattatggcaggaaaataaacggattccgcaagaggttttaaacatcgaaacatggaggagatggctgtga

SEQ ID NO: 52402 - DNA, 1419 bp, Desulfosporosinus sp. Tol-M
  modified_base (1203)..(1217): a, c, t, g, unknown or other
atgagtcaagaatttgagtttttggaaggtttcgaaaagagaatgcggatcgtggcggcgattgattctattgtcaaccgcggcaaccggaaaatggaattagaacgtttatttagtttcggccagctggataacctgattttttctgtgctggtatttattatggaacggaccttgtctgaagatgaagagtgtaccatgggcagtatcgctgattttgtccgccggatcctgcccgcttatggtctggaattaacccccgaaatcattcatcagctaacggaatacatcatcaaagatattttgcaaaatggcggcgaagcacgtttttatccgatcatgacttatggtcaggggatgacggaaaccaggattcgcctgattgaagataagctgcgcgaagacgaccggagctatctgattacctatcagttgaccgatcagggatatgatttactttttcgtaccaaagaagtggaacaggaaatcagctttacgattgaagagttaaaactgcgggaattgattaaacgcaaaaactacaaaaaagcgatcgggcagagcagcaacctgatccaaatggtcaggcagaagaagaacgaactgcggcagttgatggaaaagatcagagggaacatctatgatgtcgatattcgggaatacgaacgcctgaccggtagtacctatgctttgctggaagaagagtatggcatgatgaatgagattctggggatgatcactctctccgaagagcgtttaagggtagaagaacaaacccagggcaccctggatgaagcgatgaaaaaggcccgcgctgaaataatcaaaattcgccgcaatatacataccaccattaatgaacagaaagaactgatcctggatcgtcaccacctgtccgcgatctataaagaaactttggaagattcttttttcctggcccaaagtaaaaagtttgattttgaacaggaaatcctggcaagactagaacagtgcgatgagcggcatatcccaatgctttggcagttgttcaatcctttattcaagcccaaccctgtgcgcactttaaatgttctttcgctctatgaagcccagagccgtttgcggcaggaagagcaggaaacggtgaacattgagattgaggagctgggagaggataaggaacgccttaaggcagagaaaatcaacacagccaacattgaattnnnnnnnnnnnnnnntgccaccggcgaacttgatttggattattgcctgaactgtatcgaatacgatcacccggaactgttcggtatagaaagcctgcgcgttgtcaaacttagtgataaaatactggaagaagagattgtctttcgtcagggtgaggagtattttagcaaaacgattagcatcaatgatttcttctttgaggtgaagataaaatga

SEQ ID NO: 52403 - DNA, 708 bp, Desulfosporosinus sp. Tol-M
atgagcaacctgaatatagctctgcgtattttcaaaaggctattggataaaggtcagttggatcgggagacggaaagcgatctcttcctggaattccgtaatccggaggttcggcaggcgctgaccgagatggaagaagagctggaattccggattgtggaagcttccggtacactctactttgttccggccggcgacaacagtctcttgggttttaccggcaaggatttccgggaatgggtcgcctctgatgcccgtttggccgatgcttatctgctgagttatatagcgatgtttattttcttccttttttacggtggtaagaaccagaaccccaagcaacgggaatttttacgcatcagtaaattgctggaagaactggaccggcgttttgccgctgctgctctgaatgaagagcagactttggctattgaagagaaatattctttgaactttatgagaattgctgaactatgggaaagcaagcaagggtttgaagagaatagacgcaagaccaaagcaggaaccattctcaatacctgccgcttactggagcgggaaaatctgatccgcattccggataatgaacgggagattcgtcccacccggaaactggatgacctgatgctgaactactatttgaatgaaagccgggtcgaagagattatcagcctgtttgaaggagctgaagcaattgccgaccattaa

SEQ ID NO: 52404 - DNA, 3410 bp, Desulfosporosinus sp. Tol-M
ttgccgaccattaaccgcattcgcatccttaatttttcctacaataataacacccggcatatcctggatgagtcctttaacttccatggcggagaaaatgtgctgttaaatctggccaatggcggcgggaaaagtgtgttggtccagctttttcttcagccggtggtgccggggatcaaaattcaggggcggcggatcagcggcttcttccacagacaaaaacagcctaccttcatcctgttggagtggaaactggatgagggaggcggttatctgctgaccggaatggccctgattcccgccgaagctgccggcggcgaagaagggaaggggaaaatcagatactttacctttacctgcaagtataacggtggcaatgcctttgatatcgagcatattccgcttgccgagaagcagggcaatttgctccatttgctttcttttcgggaagcgcgggacttaatgcgagaaaaacaacagaaagatccttatctctttgcttatttccctgaagaagatggagcagattacggcagacatctggcccaatacggcattgtccagggtgagtggcgtaatgtgattgccaaaatcaacgataatgaaggcggcattgaggaaatctttcaaaagtataagacttccagtcagcttctggatgaatggattattaaaaacattgagaaatcaatgtatagggaaaaagccgaactgcaccggctggaagaaatgctggagaaattagtgcaggaagtaacggaaaatgaaagctatatcctggagaaagccttgttctctgaatttctggctgtttatggcaagcaaagcgaagaactggccaattttctccagcacctggaggaacagaaaaacctggcggaaaagctggctgccctgagtgcttatctgacggcccagttggaggctttccaagacaagaaagcagaaaacgaactggccaaggataaagcccgacgggaagaacagcgcattgagttagaggatcgttcccatagttaccttcaaaagaagacaaagtatgaagcagccctggaactgttaggtacggtggaaaatcggctgaaagatacggaaggttcgttggaacaggctcaaatggcggaaaagatccaacaggctgccaggctgctgggtgagatccggcgtaaggaagctaagctttccgggattgaggaaagtttagctgctgaaaaagcaaactacgataaagatcaacggatcggcgaattggaatattctttaaaaaatctgcttgaaaaagaactgacttatctgcgggagaaggagcttagttggcaggcggagaagcaggccggggaatcaaaccttcagcaagtagaagacgatctgcaggctaatgctcaaaaaaagagttcagttgacagtcaaaaaggccaactaaccgaacgcaaaaaccaaatggaaaaagaggctgccaatacgctgcagaaactgggcctgagcctaagaagaaacctgcttggcgagttaaacccggcggaagtggagcaggccaagagcaatttggccaaggctttagctgctttggaacaggaagaaaacctgctggcagccgaacaagccgccaatgcgcaagaacggcgggaattggagacagacattcagcagtgccaggcccggcaggcggaagaaatgatgcagctccagaatatcaagcgggatatcctggaatatgaacaactggaagcggaagccaaggaaatactcacacgctatgacttggagtcggcactgctttttcagccgacacgcctggccgccgctttcaaacaaaaaatccaagctttggcgggcagtgtagagcaagccggcctgcgctggcatgacgctcaggaaaatctgctttccctgaaaaacggacgtctgcatgtaccggcggagttggtgacgttattttctgatttggatatttcctatgatacgggcgaaacctatttacgcggtctgcccgctgatctctgtcaaaagatgctgcagaataacccgctcttgccgtatgccttcatcctgtcccgcagcgagatcgcccgggtggcagaggcgatggagaatctgacccgtaaggagaacctgaatcagaaggagagcttgaatcagaaggagaacttgatccagcaggagaacctgaccttgaaacgggtgattccgtttatttcctatgaagatttaaatgtcgaaatggaaagcagcgggcgaatggtgcaaaccaaccaaggaattaccctggcgtgtttttatgaaggacgcatttttgcccctgattctctggaaaaattaatcgccgaactggagcaaaagagcagtcaggcccttgagcaacgggaacactatcgtgaagaacaccgcagaaccgtagccgaccaggcaacttgcgcccggtttgcttatgctgcggattatcgctataacttgggcttaaaggaaaacgcggcagaagaaaagttggcggaattggatcggcaagttatggaagcggaaattaagagatccactttgttgattagacaggaagagatcagtgatcttttaaaagaaaatcagagcaagcagctgccggcccagagtagaatcgaaagctttcaggaatttttagaaaaagaaccggcttatcagctttgccgcagggaactgagcggggttttggacgaaagcaaagcgttagagataagaaggattaaattggatgagcagcggaatattcttcagaaagaactttccacggttagatatgccttgcgcgataatgagaggcaacagttagatgttcaaaggcaatatgaactttaccaaaaggcaccccagaccaagctcgttgaaggaaccatcgaagaattaacggaaaggctgcgggttgtaagagatacctatacggcaggaattagggaattagaaacgcaaaagcaggatttgcagggagacatcaggcaaaaaggaacggaactgagtaatttacaccttcaagaagaggcgtatgccacagttagatacgaagcagaaaaagccggtcgtctccgggaagaaattagcggattggaaaagttagtcaaagaactgcaggttgatttgagaaccgccatagccaaagaagcatcggccaaagccgtcttagattcagccttggatgaagtgaaacgtctgggctatgagaatccgctgcctccggaagaaatatcgggagatttctccggacgccgtaaactggtccgcatccagcagaaggaattggataaagagagcctggcactgcaaacacagagcactctctatgaaaaactaaaaagccaggtcgcacagactatggattttcaggggattaaagcggcgaaaggttttgtgccggaacaggatctcgaagcacagaccaaaat

SEQ ID NO: 52405 - DNA, 1053 bp, Desulfosporosinus sp. Tol-M
atgcctaaaacagatccgaccataagtatctttgactggggtaaaacaaaaaccacaatcactgtgctggaactccaaaagttattcaaggagccggattatgaagccttttataccttgacgttgaaaatgattgctgaaggaaagctcgttgccattacagcttccggccaaaatgggcgtctgccttcactttataataaatatcggataatcaggccgctgaaagaccacactgactgtttggaacaaatccgctgtttggaaccttctttaaatattgccgcctacctgcaaaaacccgagcgatatatcaagcatcgggaagtcctcgaaggactgagccgttatctttggtatcaggcttcattactcttacagccaatgtcccgtaaggaacgttcgttttcggtctggggaaaagagaagttgctcgatgaactactgccgctgattcgggaagtccttagatttaatggtttgacggagcagtttttgaattattatgatacacctgagcctttctttgaataccggcatgaacgcactgtgccgcttgccctgctgattctggagaataaagatacctggttcaccttgcgaaagctaatgcaggagacggggaaaaatcatttagccggcaggacaattgacgctttgatctatggggaagggaataaaatcaccaaaacaggcgcattagagaactacgccaaagaaatgttcggagcggcaactacagcaaacgggattttctactattttggggactttgatccggaaggaatccgcctgttttatcgtacccaaaaggctaatccgaacttaagggtgcggccttttatcgaactttaccatcagatgcttctcctggcgatgaatagggaacttccactcagtccggatagccgtcagatggatgtttcctggcaggattttgagcaactgctcggtttatcagcagcggaaagcaaattggaattcttgcagcagggccggtatattccacaggaaatattgaattatcaagtgttggcagaaatgttagaatga

SEQ ID NO: 52406 - DNA, 1518 bp, Lysinibacillus manganicus DSM 26584
ttggacacagagctaagtgaaaccatcgtaaaagatagtcgcgaacgtctgaaacgtgtattattattcgaaccactttttgaactagaccggagaacttttaaggatttacatgaaaaacgagtagatctacgtagttttggtttatatgtattactatatttttttgaaatgaagctaatacgtgaaaaacatattggtgtaattgaaattgcgcaatttctgaaaagtataagtaaggacacttatgctttatctgattcgcagttagaagaaatcgtaaaaataattttagcagtatttagaccaaccggtgggcaaagaaaatcatattcattttataattttgaattacaaacggaggattcgattgatttccattatataaaaacaaacgattttgatattcaaacaaaccgacaatactatgcacttgatgatgacggcttggaactagtgtttgcaacaaaagagtatttccaggagtttcagttatccattcaccaattgatgctgcgcaaacttctagaaaagggagaatttgttggtgccttacgtcaaattaatgaaatgcgtatggatgttgaaacgattcatgaaagaatgaataaaatcgaacatgaaattaagcgtaatgttgtttccattgaaacgcaaaacaagtttatgaaagtaattgaagatcgaaatttccgtttaaatcgagagaatgaagaatttgaagaacttcaccaatttgtctatgaaactaaacaaaactactataacttagcagatgaaacccaggaagcccgtgcatttgaaattcttttaaaagttgagaaggctttgcaccaagtacaccaccaacaccagcaattattaaataaaagcctgcagttaaaaacacaagtcctacaatcggcagaagaagctttgtactatatcggtgtaaattcttttaactttgataatgaggtgacatccaaaatcgtgagcacaccatatcctcttgagtctatgaaagggattatggcacctttcctaccattaggacagtttaacacttggtcacttctcacagtgttctcacctcaatcatggagcgagacagaagatggacacacgagtaaaacatttgaaaaaataatagatgaaaaacaacaagaacaatatgctagaattatccgaacttactataaagaaattttccaagatatgatgactgcttttgaacctgaatctgaatggacattgaaggaatggattgaaaaacttcaatctagcaatgatcatcgcctactacaacgccgattttatgattttttcatcctatgtcatcaaaaaagccctgttacttcacaaattgaggtgcaatcagaggaatccctgcatttacttgccgaggtgatggaactactacacggaagaacattgatatgtaaagaacttcctgatcgaattcaagttaatgagcgatttgaaattcaaaatatgcaattttctttagttaaggaggtagccccaattgagatttga

SEQ ID NO: 52407 - DNA, 744 bp, Lysinibacillus manganicus DSM 26584
ttgagatttgatagtcaagaagtagagcaagcatttgaactataccgtgaactagcgttaaaaggtgtcatttcgggagataaagcaaatacgtataaggtgaatgaggccatctatacattaacgaaccaatttgtagataaattagacgcagattgtattactgttggacatgaagttcatttaatccctagaacaaaactatctccatttcacattagtaacgaatatattaaacgtcaatttttagggtcaaaatcatcgaacagtgatatttacttaatgtatttatgcagcattgtgctaattggaagtttttataatagctatcaatcgacagaaccaacgatagaatttatgacctatgaagtgtgggttcagcaagtaaacgatcggattgaaagtttaaagagacacgatcaagaacaattagagaaactagaaaaagagtactcatacagatggtctgccattattgaaaagtgggaaacattagatgaattaaaagaatccgcctctaggcaaacaggtcggacaatgagtagattaagtttcatcgatacagtcagacgttttttacaagagtacgatttagtagaattcataggccaaaatgaagtgtcactaacagaaaagacaaaggtcattgttggtaggtactttatggaacgtgaattcaataggggaatactagaattcttatatggatttgaggaacaggaggatacacatgccagctattag

SEQ ID NO: 52408 - DNA, 1011 bp, Lysinibacillus manganicus DSM 26584
atgcgtggtaaaatctcaaggttcaaaaatagctttataacattagatcatttagagcagtttgcagaacataatatatcatatgagcaattcgccttaagtattttagctcttgaagaagagggggtcctcgttgctggaaaatcaacacatagaaatctcaaagtcccatcgttagcctataaatatcgtattaataaagctctattaaaaaaagacgtttatcaagatattgaaaaaaaacgatttaaacttcataaactcctcattctcgatgaatattttcacctaccaccagaagtgtggaaaaatgattatccctatattgaaaaaattaatacatatattgaaacaaatggtttacccaataatgaagttcctgcccctgaacgaagtcttgctttagtaggagatgaaaaatggatccaagaaaaaggcggacaaaagatattagaaagattaaatatatgggatgcacttcaaattactcctgttagtgacccagtagcatttattattaatcccaaaaaagtaaccagtgataagcatctccatcttattgttgaaaacaaaacaaccttcgatggattgtcgacagcaattctagatactcagtttaccacacttatttacggacaaggatacaaaataactagtagcattgattacttccataaacaattgccactggaccgtgttcaccataagttctactactttggagatttagattgggaagggattaagatttggtacaaattaagacaaataattgatattcatttagctattcctttttatgctgagtgtattgataaaacacctacgacattgaaaacaaaacaaaaaccttccgaagaagcaatagagaaatttcttagttattttgactcaattcaacaagagaaggttaatatcacacttgaaaataagaaatattggccacaagaagttctttcttcgaaagaattaaaacaagtttggagggaatcgaattggacacagagctaa

SEQ ID NO: 52409 - DNA, 1509 bp, Lysinibacillus massiliensis 4400831 = CIP 108448 = CCUG 49529
ttggaccagtcttttatcgaaacaatagctaaagattataaagaacgtgttaaaagagtctttctttttgagcccttacaagaattaggaagaaaaaatcgaactgataaaaagggtaaagaaatcgatatgaaaagtctcggtttgtttacactactgtttttctttgaaatgaaattgatgagagaaaaaaagagtggaatttctgagcttatacaatttttgcagaaattcactaatggtacatatgatttagatgaaaagcaactggaagagattgcccgaatcatacttagtacgtttcgaccaggtacaggaaagaagaaaatacaatcttttttcaattgggaaactcaacaagatgatcaaatagattattcatatataaaagcaacagattttgatgttaagaataatcgacaatactatacccttgatgatgatgggttagagctcgtatttgcaacaaaagagtattttcaagagtttcagctgtctattcatcagctaatgctacgaaaattacttgaaaaaggggaatttgttggagctttaagacaaattaacgaaatgagaatggatgtcgaaacaatccatgagcgaatggtgaaactcgaacatgagattaaaagaagtattgtgtcgattgaaacgcaaaagcgttttatggaagtcattgaagatcgtaattttcgtcttagtttagaaaatgaagaatttcaagaactacagcaatttgtttcagaaacaagaaacaattactattatcaacctaaccctgaaaaagaaaaagaagcatatgagttgttgttacaaattgaaaaagagttaagtatcgtacatagtcagcatcgtgatttactaaatcaaagctttgtattaaaaaaacatgcgttagaggcggcagaggaatcgctatactatattggtgtggatacgtttaatatagaccaagatattgtgtcaaaaattataagtactccattaccacttgaatcaatgaaaggcgtactagcaccatttttaacaatcgaaaagatcgaaacatggtcattactttccatattcgcaccacaatcctggtcagaagatgaccaaagtagtaacaatgcagtatttgacacgatagatgaagaagaagctaatgcaaaatacgtaaatataaaaagaaagctttatgctgacatgatgaacaatatggtggaaatatttgaaggaaaaactgaatggttactttctgaatggattgaccagttacaaaccagacaacatccttggctaaataaccgtgctttctacgattttattattctctgtcatcagaggagtcctctcttccaagagaaggaaagcgaagaagaaagtgcgctacaccttttaagtaacgccttagaattattaaataacaaaatagtagtcattgaagaaattcaagagattattaaagtgaatgaacggtttgaaattcaaaatatgactttttatctaaaggaaaattcacatacataa

SEQ ID NO: 52410 - DNA, 735 bp, Lysinibacillus massiliensis 4400831 = CIP 108448 = CCUG 49529
ttgcgatatgaacaagaccaagttttaaaggcattttcattatattccgagcttgctcaaaaaggagtcgcttcaggtgaccttgctcgagcttacaaagtagaagaagcgattagatcacttactgaccattttgttgaaatgaatgatgcagtctgtctttctgttggacaagagttataccttgttccgaaaacgaaactatctccatttcatgtgaccaatgaacaacttaaaaaaatgcatctaggcacaaaggcgacgaatgtcgatctatacctattgtatttttgttcaattgtcctaattggatgtttttatgatagctatcaatcaatagagccaacgttaaacttcattaccctagatgaatggttaaatgaagtaaataatcgtatcgatagcttgaaagaacatgatgtagagaaattggaacaacttgaaaaagagttttcatatcgatggacagcgattattgaaaaatgggatgcattagatgatgttaaagaaacagcgaataaacaatcaggtaatacgctaagtcgtttaagtttcttagatactgttcgcagatttttaatcacctatcagattgtcgaaaatattgggaatggggaaatcaccattactgaaaaaacaaaagttattgtaggaagatattttatggaacgtgaatttaatagaggaatactagaatttttatatgcttttgaagaagaacaaaaaagtgattaa

SEQ ID NO: 52411 - DNA, 1032 bp, Lysinibacillus massiliensis 4400831 = CIP 108448 = CCUG 49529
atgatggaactaatagatcacttgtttactttttcaaaaacttatatcacactagacgaactagaaaaaatggactcaacatatcaaacttatgaacagttttcgttaaaaattctcgagttagaagaacaaggactactacaagcggttaaaagttctggaaggaatggaaaaacgccttcacttgcttataaatatcgcatttactattcaaaactgaaaaaagattcacagggggaaattgaaaaattcagtcttttcatccatccagcaataaaactggatgcttacttaagtgctttacctcaaaagtggcaagaggacaagctttacatagaaaaaattaattcttacttacaaaagcatggtttcccagaagatgaagttcccgctcctgaacgtagtctcgcacttgtaggtgatgaaaaatggattcaagaaaacaatggacaaaaactacttgaaagtataaaaatatgggatcaattgaggattatccctgtacatgatccattaagctttgcaataaatcctcttcacataaataacagtactcagtatcatctcatcgtagaaaataaaacaacatttgatggactaattggaaaaataacagatactcaatttacaacattgatctatggacaaggatataaaattacaaaaagtattgaacatttcaaaaaacaaatacctattcccactgcaaaacatgtattctactattttggtgatgtagactgggaaggaattaagatttggcatttgcttactcaaaaaatcgatgctattccagcactttatttttaccaatctatattaaagaagcaaccaatcccaattaaaacgaaacagacaaaaaacgatgctgctaatgagcaatttttatcttatttcaacgaacacgaaaaaagtgaacttctaaaaattttaaccaatgatacctactatcctcaagaaatgctatcatcaaacgaattaaaacagatctggagtgaatcggattggaccagtcttttatcgaaacaatag

SEQ ID NO: 52412 - DNA, 1512 bp, Bacillus ginsengihumi
atgatcacacaattaaaaggggtaacggaaaattatcgtgaacgaatgcagcggctagcattatttgacccgttatttcgattagaaaataaacgggagaaggatgagaatggtcaaccaatcgattacttcgggtacggcttgctcacccttttatttttctttgaaaatatgttaatacgaaataagaaaacgagcattcaagatttagcaaagtatttatacgagttaaatcgaggggaatattcactctcccttgaaggctatgaaaaggtggctagagccgtcgtagaagcgtttcgcccacctagtggaaagagaaatgaaaaaacgtattataattgggaaacaagggaacatgaaactgtacattattcaattttgaaagctgatcgtgcagatgtcactacgaatacccagtattataaattggatgaacaagggctagagttagtttttgcgacgaaggaatattttactgaattccagttatccattaaccagttggtattgagaaaacaactagaaaaaggggaatttgtaggagcgttaaggcagatcgatgaaatgcatatagatgtagaatcgttaagaaatcgaatgacggttgtgaaacatgaaatccaacgaaatatcatttctgatgaaacatatgaacgttataaacaaatggtcgaggatatcaatgcaagattaacgagagagaatgaagaattcagtgaattgcatacatttgtcaaagaaacgaagaaccgcttagcatatgatatgaattcggagaaggaccgaaaagcttatgaattaattttacaaattgatcgagagcttggggaagtgcatcatatccataccatgttattaaaggaaagcattgatttaaaaacaacagcattacgtgcagcccaagaagccctttattatgtaggaatttcctcctttaacttcaagcaggaaattaccgctgcactcgtaagcaaacctttacctttagtcgcttcgaaactattaacagagccttttctgatgatcgaacaaagtgaatcatggtcgccactagttatcttttccgaacagcgaattgaaacaaaagacgggggagagcacaccaacgattttgatgatctctcagatgaggcattacaagaattggagaatgcgaaggttcaaaaactatttggagatattatgaatctcgtattagaggcaatgcaaggaagggatgcaatttctttaaaagaagtgatagaccatattagcgaagctgactcagactggttgaaaagaccaatcttttatcaattttggtatgtcatgcatcaaaggtctccaatttcatttgaaaaaaatgaggaacgtaatgaatcattatttaaggaagttttagaattagttaaatatcagtattcaagtatagaagttgaagaactacacgagattatgactgtgacgaagcgattttcaattcaaaacatgatgttacgtttaatagtgggtgaacaagatggattatag

SEQ ID NO: 52413 - DNA, 735 bp, Bacillus ginsengihumi
atggattatagtcaagatgaagtgttaaaagcttttcaaatttacgcaaagattagccgaaatggatatagtgaaggggacgaactcagaatttatttagcagaagacaaggtaaggggactcgtcgaccagtttgcaaaagaagtagattgtaccattttttcagttggggaacgtctctattttgttccacttgcgcttaattctccctttcatatttctaatgatacattgaaaaaaaactattttactggaaaaacagtcaatgcagatatttattttatgtatgtgactattattattctcattggcgaattttatgatagctatcaaacaatagaaccaacacgtgatttcatttcgatgagtgattggctagagcaagtgaatgatcggctagaaacattgcacgagatagaagaggaagagttaaaagagattgaaaaggaatatgaatacaactggagtgcgattattggaaaatgggcggatatggatgatataaaagagaccgctaaagtacaatctggtagaacgattagtagacttagcttcctttatacagtgaaaagatttttaattgcgcaagaattagtgcaagatatcggtaatgatgagcttcagttaacggaaaaagcgaaagtgatcgtgcaaagatattttatggagctagagtacaaccgaggaatcttggagtttatttattcgatagaccgacaaaaggaggaggtataa

SEQ ID NO: 52414 - DNA, 3189 bp, Bacillus ginsengihumi
atgccttctatttcgaaaattagattcacaaatgttgtgtatgaaggtggagcaaagcgttataatgacgatattttcctatttgatagccataatggtgcgattttacttgaaaatggcggaggaaagacagtatttattcagaccgccattcaagcgattctacccaatgtagaacttgcggagcgtaaaatgaaagataccctttcccttgagtcatcaagtgcgcatattgcgattgaatggattattaatgaacgaccaagacgttatggacttactgctgttacattatatatggcaaaagaaggagtaaaatcctatcgttacacatatgagtatgaggaaggggacaagcatcgaattgaggaattgccatttattcgtacgagtatcggtggaaaggtaagacccgcaagtcgtgacgagatgaatgaatattatatgacaatgaagtcatcccatcctttaaaggccaacacatttgatacggtaaaaagctatcatcagtacttagaagaacgatttaaaataattgcttccgaatggaaaaagattacagtaattaatagctccgagggtggagtggaaagtttttttgatggttgtaaaacgacttcacagcttgtggaccaattacttattccaacagtagaagaagctatcgctggaaaaggatcagtcgattttgtacaaacctttgagaagcagcgtgaacatttcaaagcacataaacggttacgacgtgtaattgaagagaacaaacaagtagaaaagcaaattgaaggctatgtttcttgctttaaacaattagatcaagtagaaaaacaattagaagaacaaaaagtgaaagcaaaagctctttaccatcatacaaagcaagaggaagaagagataaaaacggctttaacaaacatacaagctagtttagaagattggcaatctgaaaaggatgaatgggagcgaaaggagaaatcttatgagatttcacttttggagcaaaagaaagctgaggcatatgagaagtataaattagaaaaagatgaatttgataagatcgtacaggaccaaaaagaaaagaataaccgtatagccaaattaagggtagcaagggttaatgaggaaataaagaaaaatgaagaattacagacccattttctagagcagttaagtttgctagaaaaagatgaagaaataattgatttagaggagcaatttgcagataatactgcatttttgaaaggatatttcgtaggcgaagaagaaaaaattcaaggaaatataaagcaaatagagttccaaaaagataggaaaagagaagagatagaacaagagaaaaaagtttatgatagcattgttgaagaattgaataaaagattattaaaagaaactgagttagatacgaagaaaacgcacttggaaaatgatatggcagaaatcgcaaaagccatattatctcatccccttaaggaaagagtcgaggatgagtttcctaaatgggagagtgattttcaacggtatgaacaagagatactcgactttaataaacaattaaaagggctggaaaaatcaaaacacgagcttaaggaagctatcccaaacgtacaaagcgagtacgaaaaattacaggaggaagcaagaacattaaagcatcaaattaaggcgatagaagatcaacaaaacgaaattttaacagaactggttgttcgaatccctcaatggcagcattactattcgatttatgaaaaagaagaaactatcataggtcagcttgaggaaaaagttgaaaagctatcaagagaaagagaagagttgctatttaaggaaaggcaggcaacaagaattgcggatgactatgaaaataatatatcgtttaccgcggatcctaaactagaattatggaaaaatagatggagaaatcagtttgcctatcttgagctaggaactgatttcgttcagcaggcagctcgctcattggaaggatcagtagaggaataccataccatttatccatattgggcaatcacattcattgtgacagaaacagaagtttcaaagctacatgataagctactttctgtagaaatggaaatgtcgcatccggtatatatttgtacggaagaagaagctcggatgttaatacgggaacaggggaaattaaatgatcaacaagtttttccacgtatatggaaagaaaacctttcaatagagaagtttaataactggaaaatagaggttcagaagctggcaattcaatcaaaggagaaacggacgaataaagaattagaacttcagagctggagaacagtcttagcaaaagttcatgaatttgtacgaaattccccatttaatcaatacacttacttaacagaacggtttaaattagcttctgaggatgaagcaaaacaaaaaagagtattgcatgaattaaccatgcaaattgaaacaaaagacaaggaaatggaagtttataacaaccgtttagccgaagcaaacaatttgtataacggtttaatgtcaaggttggatcatggaagaaagtatttttctaaaaaaagggagtgtaaactatgcaagcaagaattaattaaagttcgagaagagataaatgaaggaaaaagaaagcaggagaaatcaaaaagacttcttaataatgcgaatgaaatatttgaagaattagacggacaattaagattagctaaggatccattatataaactaagaggcgattcgtattacaaagaagtggcagcggaggaaccgaaatattcctttaaaagtttggagcttttagtaaatgaacggaaatcattaagaagtaagttggaaaataagcaacaaggaagagggatattggaagaaaaactagctgcagtaaagtcaaagcttaatgatttaactaatgaaaggaaactgctacaagaacaatatggaaacgttgaagcactcgaattccctgcatatggttatgaagaaatttcacagcttaataaaactattaggaatctagatggaaaaatcgcttcgttaagacctactgttgatagactttgggggcagtggacaaaagctagtaatgaattcgatcttcgaaaaggtgatttttatgaagtatatcaggaactagtaaactttaatgtgccccttaaagaggtgaaggatcagcttgatatagaacagaaaatttaa

SEQ ID NO: 52415 - DNA, 1017 bp, Bacillus ginsengihumi
atgaaaaaaagaataatctcaatccttgaattagctaaaaagtccacgataacactaagtgaattggaaagggttgctaatccccttgatacgtatgatgattttgctgccgcagttcaagccttactagacgaaggttttattaaagctgtaaaaagtcatggaaccaattggaagaacttgcctaatagctttcgcattcagaaagggaaagtgatgcaaccattaattggagagattcaggagatgcaatttaaagttcatcctgccatagatttacgaccttatttttcttcatctaaaaagagatggatggaggacaagccgtggattgtgatgatcgatcaatatatacaaaaaaatggccttcctaccaactatacaaacagttcggaacgttcatatgaattaatgaaggatgaaaaatggattgatgaaaagggcggaaaagctattttagaaaaaattaatctatttgataagttgaaaataatgaaaaccccagatcctctcatgtttgcgataaacccaacccaactactatcgaatcaaagagtgcataaacacctcattgtagaaaataaagctacttattccgggctattagattcgttatcaactaccaattttactacacttatatacggttcaggttggaaaattgcttcgagtttaaaccaactatccaaccaacttggtcttacaaaaaaggaagaacagcatgaagtctattattttggagatttagattacgaagggattagcatctattttcatctttatgaaaaatacaacgtgaaactagcccagtgtttttatgaagcattgcttagaaaggccttctacaaagggaaagaaaatcaaactagaaatgatgtagcgtttcaacactttttacattatttcggtaaagatgatcaagagatcattgcagccttgtttgaggaaaatggttattaccctcaagaagcattaacgaaggaagagttatacacaatttggaggaccatgttatga

SEQ ID NO: 52416 - DNA, 1467 bp, Escherichia coli
atgtcgctagggtttttggagcaggctcgtaatgaatcaatggcacgtcgcgagctgtctattcagtctcacgccttgctggtcgtgcgaacgctggattcaatatatagcgcccttcagcgaaatccgttcgatggtgttgagcttgatgcgctggcggcaatcatgtatctctttgacgccatgctttattatgctgaccgcgagcgccagcctggaatgacgcgtaaggaagcggagttatgtctggttgggcacctcaatgaagcctatccgggacaagaagaacccgactatgcacaagtggccagcaagatttttgcggcgatcaaagatcctttccgcctccgttattatgatttctcgcaacgaacgcattccgaagagcagatagtccgtctggtacgctatgaccagctatccggctcagatgatattctctggtcgctgaccgatgacggaatgttgttctataccctgcgcttggatgaaacgccgatagaacgcgcagctattctggcctggcgcacgcttaaaaccatccgtcgcggtgagatcgacaaggcagtacaccagatccaatcaacacagcggcaactggagcaatatctgattggaatgcggatgaaagtgcgagccgcccagtctggtgatttgagtgcatcctatgcacatgatattcgtcccgtactcaatgattcctttgataaaacccgagaggttttggaacatatccagaactcaatgtcggccattaccgaaatgctggttgaaggaagttcaaaattaaatcccgacaaactaaataagctacgtaaggcacaggagatttttgctgaggtctgcgcttttacgcagcgctatcaagactgcttactggatgtgaataaagattttgagcgagcacgtctgaaactcattattcccagagataatacccttttccgggaaacgctggaaaaaggtgcactcatacccttgctgtctcattcccccgacattgtcgaaaaggaaatcgatggtctcattgcacgcctgttggctccccgaaggcaggatgatgatcggcacattctgtttgaccctgaagcgctgcttaacctctatctcgatagatttgaacaggcgcttccacatgagatacaggaccccaccgatcagcctgtagctattgaaaccaacctgcgaaatatccctgaatccgtcattaaaaaatgcagtgattgggttagtgaccgattgaagaattgggggcatgtgagctttagagatgtttttgacgcctatgagtgcgaagaattttccgaacaagaacaacaggtttgtttacttcatattggcagcctggcagctaacagcgatcccgcaatagaagtggagatagacgaagctatcgaaacaacgctctggcgggctaacaatgtcaaactgttaacggtcgctcccttagacccctttgaggagtag

SEQ ID NO: 52417 - DNA, 4437 bp, Escherichia coli
atgtggctgattaaacgggtttatatggatggcgcaggccatgaagaagctttctacaaggacctcacactggactatattggcctgtctcaagcggtcagtagccctgttgttgaaggcctgcgctcgcccgtcaggaatgcgacggtggtgaccagtacttatcagcagcttgtgaatgggggcggtaagtcgacctacatcgcgctgctgttatcgatttttgagccgtccgttagtgacttcacccaatatctggcaaatcatcgccagagtgaataccactaccgcaattacttctataaagaactctctgttgttttggttgagatggtcaatgaatcaggacaaacattattactggggcatgctcatcagcgtaatggagatgatgttgaccgcacactgtttatttgtgatgcgcccgactccctgatgggcgcgccgtttgatgaagtcccttcttattcccgcgcggaacgcaattccgagctgcgcccctatgccaatagcctgcgcagttttgatagctggcttaatctcaaggctggtagtgaaggcggtatgcattggcgtaaaaccaccagacagaacgagtggcgcgcatttttactggaacaacaaattaacgttgatcttatcaaaacaatggtgaccttcaactccgaagaaggtggtctgacccgttttatcgaatacaaaactgaacatgatttccttggcgcgttcttcgcctgcaccatgtctaaagatgcggctgagcggctgcgggaactggtagcgcatgaagttgaacgtcagggagagttagaggggatccgtcgtaacgagtctttcctgaaggatgtgttggccaactggctggcgtttcttgatccggctaaacagctggaaagcatccaggcgcagcagcaactgctggaggacggcttccgagaagcaatgcgcgatctcgcagcctttgtcagggatgctcaggttgaacagacgcagcttgaagataacatggatagtttgcaaacgcatattggccaggcgatgtctctgcgtgagcagttaggtaagcgcagagcactgcttgaatatgatctcgtgcagcatcagttcaacaaacaaaaagcgatagtcgatgtacttcaagacgaagccgataccaatcggcaccagattgagattactcacgctgctatagactacaaagcctatgctaaggccctgaatgagtaccgccaggcagatgaagatctgaaggtattccaaagtgaaacggaaaggccgctacaggtgattttcgagcgtactgctagcgaagccttgggcacattagagtgggcaatcggcagacatcgccagcgggaggctacgcttgaggaagaattagggcagatgggcagggaaagccatgtcctcagacagtcatacgataaactacaaaagacgttgggtggtctggaaacggagcgtgacggatataaaagagacaaatttcagggtgaattgcaacggaatgaattatgtgaagcagggttgatccagaaggatgaaacaccagtagcagcccaataccgactggaattaaccttacgcgatgcgaagcagagtgaagaactggctaatacaattcttcatcagaaagagcaggcgctggaagcgcagctgcatgttgtgcgggaggcatcaattgataaaagtgaggcccggcaaaaactcattctggctgaacaaaaacaccagtcagctgtggatagtgctttagttttagcaaaaacctatcaaaaactgccaacgtcaatgcaacatgatctagatattgaagacacgagttggcacagcgagttgtgtggattgcagttcgacaatgtattgaatgcgaactctcaaacgctgaatggaatgaaagagcgtttactgcaagcccggcacgaactggacgagttgaggatgacgggacatgaactggtcgctaagcaggtcaatgaggcacttgaagcattttatgcggcgggcattgcacgagataagctatggacatttccacactatttggcctctgcttacaacgatgatgcacaaaagattgcagcggtgatcgatcaaaaccctggccgctacctgagcctggtcgcactcgacaatgtaacgtttgaacaggtccataaaattagtgagatcctaccctggaagaaggcacctattgctatttacttgctggatgaagcacaagatctccgccgagaaacgtctgaattagtacaggttgtcctctcaaaccccgataagcacggatatagccaggccgcttacgaaacccggctgcaagatctggagaataccgtagcgtcgcaggaagtcagtgtgaatgctgcggagagcgcccttaaagtactggaatctttcaggaatgactggagtcggcattacgaacagtatggtaagcattgggcgggactgcttgaccaacgggagctggctctattaatgctggaaaatgctgatgcagcacttaagcaagctgagcatgatgagcaaacactgcgtgacgagaagagagatgtccaggtgcgtttaaacaacgcccaacagcagaaaattcaggcagaaaaagcatatgataaagtgagtctttttgtagaaaaagaatgggcgaagcgtgaaacggcgataatgaaactggagcagttagctgcacagattcagcgaagcaagaacactctttgcacccagagagagaggctggaacggctgagcgagctcgagaagaacaaacgctccgagaaaacccttttaaatatccagataggtagctggagtaatctgtgtaacgaaccgttctattcagagattacggcgactgaaggtatggaaggacgaagccctgaatatgcccatgagatggctgctcaggcgcacaaaaaattgctcgaagcagccaacggtgatcaagtgaccgttctcaagcaacaactgaaagatgctgaacaggcacaacgttacgcctctgagcgtttgaccgctcaacccacctacaatacatatccggatgaggtaaaagcttcggccatcaatgagctaacggtaattaataaccgcatcgtacgcctcaaagaacagcaaaagcaattcacgcaaaatctaattagctctcaggtaactctgcaaaaattttcccaaagctgtgaggaggctagtaaagcacttgacgaggattttgtctgggaagagaagcccattgagatagaggcaatccaaacgtctctggctgaaatcgtcaataacctttatgcgattgaacaccagatcaaggcccaactggaacaaaagacactgctgttgagaaagattgaaaatgtgaaagagcggctacagaacgccaaaacagctcaagcgatgatccagcccattacgccgagctctgccgcgggtctacctggtaggatcctgagcatcatagaatatgctgacgatctggctgcacaatgccaaatgtatgcaggtttaaatgagacgctaaaacaacaaaatatacgcgtctctacggtttggggatacttccgcaaacggatcgaagaagagttggccaaggatccagacgcccgagccagtcaggaatacttacggcggttggactcaatcgcaacttatcatgaagtgctgggcgatttggagagggtcggtacagggatctcgcaggtattcgaagctgtgcaggacagcctcgagcaattccaacgttcgattgatctgactgtcacccatctgactgctcatctggaaggggcgattaagcttctcaggcgcgcgatgtcggtcaaaattcctgaggattgccccgtactgcctggtcggcccattattaaaatgaccgaccggttgaatgatgttgccgctgatctcaggggttttgccagcagccgcttgcagcagtggatagccaggggacagataccccgagcgcccaatcgggacgccttgacagctgatttggttcagtcggtatttggcgaaggggaactggaggtgcgtttgctgaagacgaatgccagccgtccacaatggactcctgtcacccgacttgaaggttcgggtggacagcgccttacatctgcctttttattgtttgtgacggttggtaaagtacgagagtacgatacgggtatttcaagtgcaggattcttgttagccgataacccgctggggaaatcgaatgccaatgatctaatgcgcattcaaacccaaatggccaaagcctataaaatccagctcatctacctgactggtatttcggatgaaaacgcccaatcaatgtttgataaccatctcttcctgaacaaagttcaaaaactgaggcggcgtgatttggtaaccgttgataaagaacgccatgccctgtgggcggcttctctggctgctaagccacagttcgatccagtcatttaa

SEQ ID NO: 52418 - DNA, 1044 bp, Escherichia coli
atgatctggctatcccgactggagtcgacagccaataaacatcgtcttgccgctggtaaggccgcgcgtacagtgaaagctaatgcggtgctggatgaggtattacgcgcacacaaccaggaggccttgagccaggaagtgcctgatttgttgagtcaggctgttacgcaactgcttgagagggactggcgggctcagcctaagcacaaagcgagttggcagcgctactggcggggtatgagcctgccaagtacttttgtttacgaaggtgccatcgttcctacgaagacaacatcagaaatagcctggcatccctggttggcccgacgtattacaggacaacttacccagccaatcaaggtacgcttacaacagctgaatacatatctttttcgccaaaccgggtgcgacaagtcactattcccgggcttgcttggacatcgtgagcggtctctgcttatatttggtgacgaaaaagcgctggactccttgccacctgatggctggaagcatgtcactctgactttggctgatatgggcgcgtttcgacgtgcaccgcctttaccgtatgagtcatcacgttgtcatgatcttccggctatcattgttgaaaactccgacgtgtattatcgactatgccaacttaatcaaattcagactcgctggtcactggtcatttatggcgcaggtaacaaagtttccggtcaggcggagtgcgtgtcacaacttcttgaggccgaacaggtagaacaactactttattttggcgatctcgatgttgcgggcttaaaaatcgcccatcagttacgttgtaagttgcttaatgattacggtatcagcttgcatttagatgaatggctttataatgaactgatcttaaatggcctgatgacagcggaagggaacgccaacaacgaacggtttgatttcgagttacagtgtggctggatgccaaagtttgttttacgagaaatgaaaactcttctggcgatccaccggcgtctaccccaagaaggtgtggcttctttaggtttagttatatag

SEQ ID NO: 52419 - DNA, 1467 bp, Escherichia coli; identical to SEQ ID NO: 52416

SEQ ID NO: 52420 - DNA, 4437 bp, Escherichia coli; identical to SEQ ID NO: 52417

SEQ ID NO: 52421 - DNA, 1044 bp, Escherichia coli; identical to SEQ ID NO: 52418

SEQ ID NO: 52422 - DNA, 1614 bp, Desulfosporosinus sp. BICA1-9
gtggctacgacaaaacttgagtttctagacggctttgaacagaggatgaagctggttgcggcgattgactccattatcaatcgcggcaatcgaaaaatggaatttgagcgcttgttcgagcctgggcagttagataacatcatcctttctgtccttgtgttcatcatggagaggacgttaaccgaggacgaagattgtaccatggagagtatcgctaactttgttgctcagatcctcccagactattctctgaacctgacctcggacatccatcgaaagctgaccgaatacatcatcaaggacatactgcaaaatggcggtgaggccaggtactacccagtcatgaagtatggccagggcatggaacaactgcggatcagactgattgatgacaagctcatcgatgatcagcgcggctatgtcttaaattatcagctcacggatcaagggtatgacttactctttcgaaccaaagaagttgagcaggaaatcagttttacaatagaagaactgaaactcagagaactgattaaacgtaaaaattacaagaaagccatcgggcaaagtgcgaacttggtccagatgatccggcaaaagaagaacgatatcaggcagtttgtccagaaagtccgagaaaacatttacgacgtgaacatcgaagaatttgaacgcttagtctccagtacctataccttactcgaagaagagtacggcatgatgaatgagattcgcggcatgattgtgctttcggaagaacgcctcaaagaagaggaaaacactcggggagcgttggatgagcaaatgacgaaagcacgctcagagattgctgtgatccgacgaaatatcaatctaaccattggagaacaaaaggaattgattcttgagcgtctcagtctgtcacgaatctacaaggaaaccattgccgattcctttgctctgtcgagggcccgttattatgaccttgaacaagtcatcttgaaacccctagagcaatgtgaagaaaacaaggttccctatctctggcaattattaaaccccttattcaagcccaatccggaccgcacacttaacttactaaccttgtttgaacggcaagcacgactcaaacaggaagaagaggggtctcagagtattgtcgtagaggaattaggtgaagacaaagaactgctcagaattagtaaactaaacgacagtaatatcgaatttatccggagcctattagagtttgcccatcgcaaacgggagtcctttagatttagcgagttctttcaggatctcgaaactcaacaaaatatctttaaagaattaacgatagacgatttgattttcaagacgatgttaaagctctatgatctccaagtgatcgatataaagaaatggaaaacacagcaggaagatgtggtcgcgaatgccacaggggaacttgatgtcagctattgtctgtatcgtattatgcaatatacacagccggacttatttggaatcaaaaaattagagattagtaaaccggacgaacacctatttgctcaagaaatagaggcccagatcggggacgggaagtttagcaggcgcatcgctatcagcgattttaggattgaggtgagctttgagtga

SEQ ID NO: 52423 - DNA, 702 bp, Desulfosporosinus sp. BICA1-9
gtgagcgatattaaaacggcgctcaagatctatcggaaattagtcgaaaagggacagctggatcgagaaactgagggggatctcttcctggaatttcgcaatgtggaagtcagggcaatcctggccgaatttgaagaagaactcgattttaagaccatcgaagtggcgggaacgctttatctgcttcctaatagcgggaacggtgttttgggctttacgacgaaggatatccgggagagtgtggcaacggatgctagactagtggatgcctacttacttagctatatttccatgttcattttatacttattttatggtggacggaatcggaatcccaagcagcgagagtttttaagaattagcaagttaattgaagaactggacaggcgctttgccatggccttggctgatcgtgagcaggtgaaggtgctagaggaaaattatgcccttaattttacgaggattgcagaactatgggatagcaaacaggacttcgaggaaagaggtcgtaaaactaaaacaggtacgatcttaaatacttgtcgactcttagagcgagaaaacctactcagactcgtggatgaggatcgggaactacgtcccacccggaaactggatgacttgatgctaaattactacctggacgatagccgagtagaagagataaaagggttcttcgaaggagctgagctggatgcctag

SEQ ID NO: 52424 - DNA, 1278 bp, Desulfosporosinus sp. BICA1-9
atgcctagaatcaatcgaattcggattattaacttttcgtacaataatgattcgcggcatattcaggatgaaacctttaactttcacggtggagaaaacgccctccttagcttagccaatggcgggggaaaaagtgtcttggttcagctcctatttcagcccatcgttccagaaatcagaattcaaggccgtcgcatcaacgcttttttccgcaagaaacgcttaccggcttatgtcctgatcgaatggaagttagatggggccggcggctatctactgacgggtatcggaatggtgtccgcagaagtttccggggttgaggatgagaaaaacaaggtgaagtattttaccttcacgtcaaactatcctggctcgaacgctttcgatttagcccatatcgagctagttaaacaaagcggcaatattctggagatcaagccctttagagaggcttgggagatgatggccgataaggagaagaaagatctttatcattttggctgtttttacgatgatgatggggaccgctaccgaaaacgtctggctgaatttgggattgcccaggatgagtggagaaatattatcgccaaaatcaatgatagcgaaggcggtttagacgagattttccaaaagtataaaaactccagccaattgctcaacgattggatcatcaaaaccatcgagaaagtgatcttcaaagatcgttctgaagctcacagactagaggaaatgttggcaggtttagtgcgggaggtcatcgagaatgaacgctttatcttagaaaagcaagttctcgacgaatttctgggggtctatggagagcaagtaggggctttagtcgaactgcttaaccgcttggaagaacaaaaacttattggaggtaaactggcggccttaaacagttatttaaacactgaaaccatcgtgctgaaaggaactcacgagcaaaataaagaggaattagtcaccattaaccaagaacagctgcgaatcaacctagaggaacgctccaatacgtattggttaagaagtgacgagcatgctttggctgcctcaagactggcagaggctgaaaagaatagtcaagaaaacgaagataagcttgaagctgcaaaacggtccggaaaaataatgcaagctgctggcctaagagctgagatcagaggaaaagaagccgatctttccggaatcgatgaaaagttggccacttctaggtcacaatgcgatacggatgagaggatgcgtaatctggagtattccctcaagaaattatcttaa

SEQ ID NO: 52425 - DNA, 1056 bp, Desulfosporosinus sp. BICA1-9
atgaaacgactcgaacaagttcttaaaaatcccaagaaaacgatttctgatcaggaactacaacagatcttccaagaatcagattatgacctctttcacactgaagttgaaaggttggtagagcgcggaattcttagtccagtaaagtctgccaagagcaatggacgcttgccgcctctctttaataaatatcgaattatcaaaccgcaagctgataataccggttaccttgagtcgattcgtcgcctcaatccggttttaaacctttccggttatttgcaaagaccggaattatataaaaagcacttggagattattgaagggatcagtcgatatttgtggtttgctaaggatttattaaaaatgcccatgtcccgtaaggaacggtcattttcggtgtggggcagggaaaagatgttggatgagcatagggccttagttatggaagtgctaaagtttaatcgcttagacgagaactttcttaattattacgatactccggaaccgttttttgagtatattcatgaccgtggcgagcccatgactatcttagtgatcgagaataaagacacttggtttaccttcagaaagctgatgcaagctacgggcaaaaattgcattacaggcagggtcgtcaatgtgctcctgtatggtgaaggaaataaaattactaaacaaagggccttggaagactatagcgccactatgttaggtggacaaggggaccaggctggctcttctggacaggcagcccgctttctctactttggtgatctcgactgggagggtatccgtctgttttttcgtacccgcgaagccaacccgaccctcgagctaaaacccttctcccctttgtaccggcttatgctcgaaatgggtcaatcgcttgaactgccaaaatctctcgatcaaagaggagttagtgctccactttcagaatttctcgccttattgggattgcctgaggaggagagcctcggagcttggttggctgagggtaagtacatacctcaagaaattattaattatcaggtggcagcaaagattataaagtag

SEQ ID NO: 52426 - DNA, 1506 bp, Paenibacillus sp. IHB B 3415
atgaactggaatgattttggagaacggaataaacggctgaatcccctatggagtctgggggcaggcatgaatctcggcgagcttcagccttataaggaaatgattgctctaagcgtgctgctgcaggtctattatctggagctggaatcgaatgaacagagatccagggaggatctggtccagctgacttggagctcgcttgaacgcttcggcatcgcgaggctcggcagtccggaatcggtggaacggctggtggacgggctgctgtggagcggaggcggcggggatttcgaggcaaactattatgatgatcagtcccgtcagatggcggtgcagaaatacaaatatttcacagtggatgaagatgccacccggaccagctgggaagagaacgggaccacaatctaccggctctccgaatatgcgatggagctgatcttcatgagccatgagatcattgatgaatttcagatcagcattaagctgctcgagattcagatgcatatcaagcatggacgggtaacccgggcgatgcaggatgtgaacgaactgatctcccgggtgcggaagatgacccagcagcagcaggaataccgcaatgcgctgcgccgcaatccgaagcatatcttcagcgaatatggcgcccagcggcaccagcggctggaggagattcatcagcaattcgacgaggaacgcaagcatttcgataatattcaccgctcgctggcccggctggccaatgatgagaaggatgtcatcgacttcaatgagctgcggctgctctccgagcgggtcgaactctcccgtcgagtgcatgatgagcttgccgaagtggtacttagcatttttgaagcggaaaccaatctcaggctcaacttcccggagctgttctggggtgccgccggcttcaacttccgtacccatgtatgggaggaatgggtgaagccggaagggctgccggatggagacagcatggaaaccctgatcagcgggctcttctctcccagccaagacttcatttatccgctggcctgggcctgggaagagcaggatgtcggcttcctgcctgacgaattgccggacgacccggatgaagccggggaggaggaagaactccactatgtccccaaaagcataccgtggaccgaggtgtctgagctttggctgccggtcttcgccggactggcagaacagggaagctttacattctcgacagaggctttctctgaggatgaacagcggcgctgggcggatacccccaatgcggtagacctgtgggttcaatttttccataccgaaattaaggtgcaggagcaggaagcggaaggtcacggcggggccgacgaatgtcagaagctgattgggcgtctgatcgcggaccacccggagcttgagaccttgcggggcaaagtgctgcggacaagaattcttgccgggcagcaaggcagtgtccgctggcccggcctggagatcagtccttataccattactatagtagagaagtga

SEQ ID NO: 52427 - DNA, 759 bp, Paenibacillus sp. IHB B 3415
atgagttattcgttagagcaagtacaacaggcttcacggctgttcttcgacctgcttcgccgcaaggtgatatcacttgatgatcccgctgctgctgaatgcctgcaggataccgtcgcttatgatgccttagaatatgtagccaaggaagccggctgccggattatgaattccgggcatcgtctgcacctgctcgtgagtccaatgggttccggctttgccagcaacttcacacagctgcgcaataaatattcccgcatcgaacgcaagacgcatctgcatatcatcaacgtaattattctggtgttcctggctgagatggatcaggatgagcagcatttcaagccgggtcaggacagcatgtcttacatacagctctcggatcaggtatcagccttgttccagacatggatggacatggacgaagacggcagcttcagcaagcagtggcggctggatatccaggcgatgcacaaagtatggagcagcctgtatatgcagaccaaaagccaggaggagggcgattcgctgacccgcggcgccggctcacggatcggcctgatccatgaggggatgaagctgctggaggaagagcatctggtattcatctccgagaatgagaagcggattttcccccgggaagagctgtatgagcggatgcgttatctctatcatgatgtggaccgctataaggagctgaaggccctgattggccggacactcagcgagaaggaggaggaagcccatgccgcgcattga

SEQ ID NO: 52428 - DNA, 4491 bp, Paenibacillus sp. IHB B 3415
atgccgcgcattgagcgaatccgcatcgccggacttaaatatgagaagatgctgaagaaatatgaggatatgatcctcgacctgtgcaatgaggaaggcccgtccaacacgctgattacgctgatgaacggcggggggaagggcgtgctgctgcagtcgatattccagctgctgatgcccaaggcggcctggggtaaagataacgagaaccaggtagaagccttcttccataatcacaaaaaacagctgaagccctatacgttccacgttgccatcgaatggcggctggacgagccggaacggacagagtacataaccaccggaatcgcaatgactgcccagaactcgatggatcagctggagatcaaagtagattatctgctctatgcgctgctcaattatgatgagaatgcggagcttacgttgtctactctgccgctctatgatcacgagctgaacactccggccagctttgaagcgattcagcaatttgtccgtgagcggcgtaatgagatcgttgcgtacggcagccacagctcggatctgaagaaatattatgcttttctggcggaccgggatatccatattgatgaatggcggaatatgcggagaatcaacggcgaggagggcggaattaaaggctatttccagaagaatgatgccttcaccaaccataatctgttcgagaagctgatcattccggaaatcgggtccagtctgaacggcagcatgcgcgaggatgaaggctcgcttcagcggatgttcatagattccgctacggttgcacagaggctgccgatgctggagcagagagagcgggcttttgccgaattcacttcacttgccgccccgctctatgaggccgtcaagcaggggactgaggctgaccgcagctttcaggagaccgaattgttcggacggcagctgtacacggtgatctatgatgagctgaagaatgccgaagacaagcgccgcaatactgcggatgagctggccgggcattatcaggaagcgaagcagcttaaatttgagacggataatctgaagtatctgaagctcaaggaagagcgtgacagcaaacaggatgatttcaaagcggtctcggataatcaggcacgggctaagcagcggctggaggaatcgaagatcaaggaaaaggatcttgaggttgcccattatttagccagacgcagattgcagatccgccagatggagcagtggcagaaggaaattgaagccatcgaaggttcccttgcgatgaaggagcgtcaagaggttatccaagcggccaagcaggagcttcgcctgcagtgggatgaggtctacaggttgtggcaggcgcgaattctgttcttcagcggccgccagcaggctctgggtgcagaagaggccgttctgcgcaaaggccgggaggcattcctgcttgaactcggcggacttgagggcaagattcatgaattgacggcgctcatccgccagtataccgaagatctgggagtgttcgcttcccgccacgggcaggaagctgcccattcaccggcagccgcccttcagcgcacgctgattgcagccagaagcattgccgagaatatcgttgccctgaacgagcagcgcaaatccgtagaagaagagaagcttgccctgcatacccgacatacacggctgactgagaagctgcagggggctgcaagccaggcggaggagcttacggaccggattgaagcccagatgggcaaggaatcacagctctggtcacagcttgtagttctgctggaaatgtatgaagaacatcagcagctcgggacgacagcattgttcgaggccaaatcacttatccaggaacggttcatccgcaggctggaggatgccgagcagcagacgaagcggctcagacgggaatactataatcaattgctggatgtagagctgcagcaggaagcctattggctgcctaataatgatatcctgacagtgaaggatgccctggatgccctgaagatcagctccatgatcggcagtgcatatctgaacgaccagtcttacctggtccgtgaagaggagctggagcgtcatccgttgctgccttacgggctgattgtaacgaagcgtgaatcggctaagcttcagcctgagctgcttcaggagcttctgctcaaatctcctgtcccggtcttcgtgcgtgaggaaatggcggatgccacaggcgcctcattcctgctgctctcccatcaggggccgcagatggtgctgcagccggagcgtttcctggactggaagcaagggatcgcctcccggctcaaagagcgggaagaagagctacaggatgcggaagggtatctgtcgaagctgaaatcagccagacaggagtatgaccgtctgctccagggtgaacacaccgtaagtctgcgggccagtcagaaggtattagagacccggcagcaggagcttggcaagagtctgaatgaattgaatgctgaaatgtccctgaatgaagagactctatccggaatagccagagatctggctgtcagtaaggccgagaaaaccgagcatgaggccagggaagcggcgctgcgtgaatgggcggagcgtagccggaagcaggagcaggattacaaagataaacaaaagtcagttgaattgaagacggccttaagcaaagagattaccgtcaaggaacagcagctggcacatttgaaggcagatatggacagcctctccctgcagcgggagaagtggctgggagaagctaaatattccttgttcccgcggctgcagaactggttcccggagatccacttcccaagtgaacatggcggtgctgcacaagatactgtgcaggaagaagcagtgccggatgaggctgtacaggataagctgctgcagctgctgagtaccgtggaaagtctgcagcagtcgctcagccagaatgagctggaaatccgcacacgggctgcccagatcaaagcggcggggcaacagctggttgaactggaagctgcagtccatcaggtcgatgacggatggcagtctgcacccgaaccggatgaatcaccggaggttgttcagtcggccagaacacagcagaagagtgacacggtgattctggatgaggattatcagcatatccgcgattccttcatccgctgtatggcggagctggataacctgcagaaggagctgggcaaagccgagaaggccatcaaggagaagcatgagcgtgctgtagagctctggcatgagccgctggcgcagaaggaagaagagctcagtgcgcgcttccgtgagaacgagcatttgctgaatacctgcaagcaggcgcttgcctctatggatatttggctgcagacactctccaatcagagcaaggtcatggatacccatgtggagagccgcatgcagctgcgggatgtgcccgaagacgtgcagctggatgtgcgggagaactgtgagcagctggttgcagactggctgctgcgcagcaaggagagccgcagccagcgtgcggaaatctcgcgcaaagtcaaggaagagaagacaacactcagcggcagactggccaaatccggctggaacgttgaactggagaccaaaattcaggaccggctgaacacagttcactgggatgatttctcgattgcactgcaggtgctggactccatgctccagagctcacgtgatcagattgagagtatccgcagtgacaaggaagatatggagctgtcgcgcaagctatgggtaggacgtgccgcgaagcgggtcgtgcagattaccgacattctgaagcggatggaacgccggatgatcattcataatgagaacgggcatgccttcccgctggtccggctgaattacaagaatattaccgttccgagaacgacagatgacatcgaaccgctggtcagtgagtatttcaaccgctgcatcagcagcctgctggagaagttcccgaagatcgaacaggttccggcttccgcagtcagagagctgattaatgacgggcggatggtgtatgccgcgctacagaaccgcttcccggtgctccaggtatataaaccggtgaccgagaattatttcctctacgcagcaccggaagagtaccattactcggattgggaggtcattaaccgcggggcgctggatgaggccgtcggcagcggcggtcaacgccagtcggttcagctgctggtggcgatgatgattatgacccacaagcgcgtcaaccgtgagaataaaggctggacagtcttcctgtacgataatccgtttggtgaaatggtctccaataacgtgcttgatccggtgttcgagatttccaaggcgctgaagttccagtggctgatcgttacgccgccggagctggtgaagaatgatgtcagcatccgtttcggcgtgtactggcagctgtattttggcggggataaaggagatgcactggattcaaccctgatcaagggcggccgcaagctgatccctgcctcattgttctag

SEQ ID NO: 52429 - DNA, 1455 bp, Paenibacillus sp. IHB B 3415
ttggagaagatggatcaaccattaatttcgatatttcagacgaacgaatccaaaccggaaatgcatcaggccttaagggatattgcactattatcaggagtgctgaatgatcttaactcacaaaactttctgcaaacacctatcgaaatattacggttcttacgtattattcaactgatcaatgaggaggccttgggactggatgaaccgattgagaacgtagatacactgtattttcgttaccggaaccgctataaggaccttgacccgccaagcaagaaaaaggttgaacagattgtaaatgtcctggtgaagtataactggatatccaaacaaacaaggcagctaaaaatgcgtgatgtagggaagcggatgatggatacgctcatacgacttgccaatgattctttagcctattacatgcatgatgatattggccgatcgttattccaggccagacgggatgccgagcttagcgaagcctatgatgatcatggcatttccggcggcaacaaaatagccagtatgattcgtaatgtggaaaatgctatacaactgatgaaagaacgtgaattagaaatgctggccgaccgtaatgcactgcctcagttagagatcatccatcagttgatgcaggagcttgaaataaagctgacggagcgtttccgtcaatttcatacgttagaggacagtcttgtgctcagtcatttaatgcaggcaggaacttctgcacttgccgatggcacgaatctgagtatgggaatgattaataaatatctcaaatttacgatgatgaagcaaacgatgctcttgtcctcgattaatccggaaaaagtcaggatgttcattacacaaatgtatgacccgcctcaagaatcagatattcctaatgctcatcagattatgagctttatggagcagaatgaatacgagggggagtccatggatggtctgtggatgcctgttaaattcgccgcttcgctgtccggtgtagccattagtgaagctattcaatatctggaggactatgagccgctagtggacaggatgcaggaagatatccaggacacccaatatatccatgaggaaattgatattacacaattagaggatatgatgggagattcagagtggttgctgactaaatctatgattgagacggacgccattgaactattcatgcaggaagtggagcaagctccgctagagacggtaatcattgaagcaacatctgcggagtggggcgatgcgattaatgcacttacggcgttatctgcgttagtaggcagcaagaagttgacgatggaagaagctgcagagaattcagaattccaggccccgctatacgacaaagaatgggactggatgaatccggaggatattaatcaagtagttaaacataacaaatcttcaatgaacatgcagaaaaggagtgacgatgagcttgacggatga

SEQ ID NO: 52430 - DNA, 675 bp, Paenibacillus sp. IHB B 3415
atgagcttgacggatgaattaaatgtaaatccgcttaatgtcatgcaggcaatcaaaggcatgctgaccgaggcggaagagatcgtgtttatgaatcttttattctcatcctctgcaacaatacgtgtgggcaatttcggcttatcccggcgcgaggtggagaagcaattaaagatctctgatgatggcgaacagttcaattcgtttttaatacgggtgaatcaggcggtaagccggtattttaaagtaatctatgatgtgaaaagagatcaggtgatcgtgatgatgcgggttcctgcccgatcggcacgtagtacgttgtccaaagaaagtctggccattctcttgtttatcttttatcagcaagaagtgttgcagcatgagttcacgctattcgatcagttgctaaatgctcttggacatgagacaacaaaggcaaatcagcgtttgattctaaatattgaccaattaaaaaaaatcggggcactcgaagaatatgatacaaattcaaatgagaaggcgtataccatcactggaattggtgctaatatgttctcggattcctttctgcggcgtacggttgaatttagtcaatccaatcaattaaacaaagaggaagttctgaagtttttcaaaagatataatctgtatcaggaaggaactgacgaagaataa

SEQ ID NO: 52431 - DNA, 3222 bp, Paenibacillus sp. IHB B 3415
atgataccttggaaaatgtggtttactggcattcgggattatcagccaacgatgatggacttgtcaggaaaagaatcacatatcttgatcaccggccctaatggagcagggaaatctaccataacgtactgcatgggggttgttttgtattcttccaaggtagatatagatggtctgaaatcccgcaatctccttccggatgatacgtggaaagctcatattcggctattgtttaagaacgagggaagtatgcgcattgatgcccctgcttttatcgaattctcgatttatattctgcaggaaccgggacagcccgcgaagaaggaatttatcattcaatcgggggatgatccggagcaatgggatgagactattaagtatacttccggtgaccgtcaatacaatttcactacgtacaagaaggacctccagtacaaatacaaaattgatcccgatctgttctacctgatttggtatcagcaggaggtcaatcaattcgcggtcatggacccgcaggagcggtttcgtatttttgctgaaatgcatggcattgatcaggtacagcacaactgggaagaaagtatggagaagttgaaggaagtacaggagagtctaagaacagcggatataaacgtggccaataaaaagcaatggcttgggatggcgaaggtagcgctggaacgatatgaggataatcgcaagcgccttgtagaaggaggccggatgtacgctggagcactgctgaaattagaaagcttttacaagcaggaacaacagcatttagtagcgaagcaagaacaattgctcgtggaccaggaagcagcgaaggatagccttgacctattgcaggaacaagccgaacggattaattatgagctgtcgcaggtccaaacagaaaatgagcggattaatgaggaaatcattgtattgcaggagaagctatctgttgtaaacaatgaaataaatgacaccacgaacgttattaatgaattgaacaaccagctgaaggagctgaatcaagaaaagtctggaattacgcggactgaagaagaggtacaggggcagctcgcggccatcactttacagcttcaagcgttgaataatgacacagggaaagccgaagctgacattcagggatctgaggctgttatagaagacttaatgaattcaagctatattctgcatgcgcagattcagcaggataaggcactggagtatgaacaccagggtcggttatggcaatatcacagcagttatgatgtgaataagaatattgcagcattagagcaaagaattggcgatttcaagcatgagcaggacaggaaagtgaagctgcttcaggaattaacagaagagggacttcagcttgagcataatagattatggtcggaccgccaaagagaatcacttgcgctatttcaagcgaatggggtgcgtgcttatactttaaatgagctggttgaattagacgagtccgcccggccggcagcagaggagcaattcgaagctattaaatatacagtgttttttgatggtatgcatgtacaggctccgaatgatttgtatcatgttcctctgcggagtatcgtgccggatcgatcggttactgacattgaggagcttcagattcatgtgaaaaaaggcatcagagatgatgtgtttccgcatgcagttaaagctctatggtgggtagagcaattctatcaggcaggagaaatacgtgtagagaagggtctgctgattgatccgagggggattcgcgggccacaggagaagaagaactatatcctaagccagaaggctctgcagaagcgtaaagaggaaattcagaagaacattggccaattaaatacagtgcttgcggatatcgaagactccattaagagtgatacgcagactatgcaggaattgcatgcgattattcaatctgttcgtgaatcagaagctttcctcaccaggaagcatgaacgtgaaggcagggccgcgaaatataccacagaggtgctgcgtcttgacgagcagaagctgcagcttcaggaactaaaggttgtgcataaaaagtgtatcgagaaacaggtcaagctggagcatacgcgggatattttgcagcaggaagcggatttttatgtgcgcttgggacagcagaaggaacagtatgaaatgctgcagcaaaaggcgaaacaccgccagagcctaactgcgcaacaggatatgatgaagcagcaatctgacacacttgaagaacagcttgatcaaatagcagacaatgaacgcaggcttaaccgcaagcaggccaagaatcatgacgatgctgaacaggtaacgcgtacgttacagcaagtgaatgttcaattaaaagatacaaatgaggcgcttgatgcatcacaaataaatctgcttacggctatcgaagaaattgaggatttcaaaggaacggcccgatttatttatgatgagctgattaacgagcttgaaccagaacctaataatgtaaaaaaaaagcagtcgctggtcaagcttcgccaagagtatgagtctgggaaagttacgtttaataatgccagatatgaaacgggtcttgatcctgcggcacctgacaattacaaagtcattgaagaagaggttctccggctgaaggatgagtataagcggacaagcttattgtttgaagagaatcaggaacgggctgagacgctcagggatcaattggagacaaccatcaatatgagagtgctggaaattcagcagcgattcaagaactatatgagcggttttcaattcgaggggcagattgattggaagcagcaagaggatcgcaagggacgggtactgttccatttattcatacgagcccgtaaggaagggcaccgcggaacgttagaggatgtcagtgtaaaggcacggggaggaagagtgggcaaaggtgtctctggcggagaggaatcgcttagttcacttttgtttgcactcgctttgttacagaatctgcaaacggcccccggctttattgtgatggatgaattcgatagtgcgttagatgagcagcgaaagttaaaggtatttgatctttatgccagcgagctaaagcgcaaattaattatcctgtctccgaagtcgcatgagaactcctacctggatcgtttctccaaagcgtacattgtgcatcatgatcctactgtaccttggagtaaagtgacggggttaattctaaagcgtgaatga

SEQ ID NO: 52432 - DNA, 1626 bp, Clostridium pasteurianum DSM 525 = ATCC 6013; identical to SEQ ID NO: 51992

SEQ ID NO: 52433 - DNA, 708 bp, Clostridium pasteurianum DSM 525 = ATCC 6013; identical to SEQ ID NO: 51993

SEQ ID NO: 52434 - DNA, 4386 bp, Clostridium pasteurianum DSM 525 = ATCC 6013; identical to SEQ ID NO: 51994

SEQ ID NO: 52435 - DNA, 1008 bp, Clostridium pasteurianum DSM 525 = ATCC 6013; identical to SEQ ID NO: 51995

SEQ ID NO: 52436 - DNA, 1626 bp, Clostridium pasteurianum DSM 525 = ATCC 6013; identical to SEQ ID NO: 51992

SEQ ID NO: 52437 - DNA, 708 bp, Clostridium pasteurianum DSM 525 = ATCC 6013; identical to SEQ ID NO: 51993

SEQ ID NO: 52438 - DNA, 4386 bp, Clostridium pasteurianum DSM 525 = ATCC 6013; identical to SEQ ID NO: 51994

SEQ ID NO: 52439 - DNA, 1008 bp, Clostridium pasteurianum DSM 525 = ATCC 6013; identical to SEQ ID NO: 51995

SEQ ID NO: 52440 - DNA, 1560 bp, Geobacter pickeringii
ttgcgtaaagttaacgatagcgaacagccgcttttagcctttaatggactttttgacccaggcgaagaaaacaggcctgatgaggatgaagctcttgatcgcgatgaattcgaaagaatggaggcgatcgctcttaaaaacagagcacagactataactacgctttccacactcacttctatcgttgctcaaacagcagccccaccattttcattcattgatccacataccaccggacttctcgctttaggttacgccatcgattcattgaggctcctcgatatcgagaccagtgacctgactgtaaaggagctggaagccaaggttgccgaagatctgcggttgcagttcactgcgcttgagaatgaaaacgttattccggagatgcccggaacaaaagaaattgaaatatgggccaaaggtgtagttgataagcttctgtgcaaaaaggagcacggtagcagcactgagcggatgttcgacacagactcgaagcaattctatgaatttcagcactcacttctggaagaatatgcgcggggcaacgcgatttatgtgcggccgactgcaacatgtctcacgctctatctcggtactctgacacagggcatcggcgatatccaaacagcgttgaccgccgttatccaacgccagatcaaacgtggtgattaccatgctgcttttcaggctgccatggaacaccaacgaattaccaaacagcacggggagaagatccgaggtatcaaaagaaaattacagtcaaatgcgggtaaatatagctggaatgatgtgatcctacctgacattctgactgcgcaagaagatgccaaagatgcggtaaacgccgatacaatgctggaggagctcctggaagagcgaatcgacgagctaccgcctgccaagcgaccgcttgcgcagaaagttctcatagtgatcaggagttgtcgtgacgcgtatcgggaactacagacattggcaatgggactcccgcgattctattcggcatgcattcttaaccagggaccggcaatcagcctcaacctgccatccatgagatacgatgtattcgaccctctcttctacaatatttcagatcccgacaaactcctgtcggtttgcgatgtcatagactccgtatttactcttccagcgccaccggtgttgcacgacattattgccggtaccgaactgctcctcaaaccacggacagaaactgaagctactgacatgtccgaggaagacgagtttacggatgaggaagatatggcgttggtgatcttcgacacagaaactatcaacagagccaagagtaaaatttccgagatggcagatgtcagaccgacccgcctttccgaagtaactgctgtgttcgatccggaggggttcacagaagagtgcatcgtgtcagcgatcctcatcagcagtgcgtgggccagggatcggaattatgccgaccgataccgggtcactcggttaccggaggctttttcctgcgaggcatgtgccggggatgattataggatagaactgatggaggacaccgatggacttcacgcttaa

SEQ ID NO: 52441 - DNA, 4392 bp, Geobacter pickeringii
atggctgaactcctctcggtacgattctccaaaatcggccactcgacggccaggcttgatggtctagcatacgatttgaccggtgatgatggcagtccagaaaattcgatgatcatcgcgtcgaacgctaccggcaaaacaagtcaactccatctgctgtattccattttcctgcctgcaaagcatgatctggctactcatttggatgaagatggccggtcatttccttactacttccaggataatgaggtcggatttatcgtaacggaatggactatccccggcagtaaccgcagcctccttgggggaatggagaaaacgagggttgtgggaagatttacccaatattcaaatcgtgatgaagaaaaacatgaaacttattttttctcgtttatcgctgacgaagaggtgggtattgacgacttaccgctcacatcgtcgatccaggtgggtcgggttgagaaacattgcaggactatcagcgagaccaaaaaatatctcaatgaggtattcaacaagccggggcgcgaattctactgtaaggacgtcattcgcgactggcacgacaatctccggaaaatcggcttcaatattgaccagttcaagatgatgatgaagtttaccctgagcgagggcgattcctcgtcttttctaaaaaaattcaaagacaatgatctgattctggattttctctgtggtgaagtcatcgacaagaaggcaactgaccagatccggagaatgttgagcgaacatcgtgagtcggtacggatggaaccggaaatcagggcgcagctcgacgccttcactgcgcttctcggccggttgtcacttataaaaccggtagcggacagttataaagcttcgatgacaaatcatgccgctgccaaccggcagttgcaatctgtagcgtcccggctggatgctactaaaatagcctgtgagaccaaactgaaagaactcaatgaaaaactggaaaactctgagattggcctcgctgacagcaaggccgggctggagcatctcacagcaactctctacggtgttcaggagaggatggcatttttatccagcctcgcagcagacgataatttccgggcatgtgagaaagatctcgaacaggccaaccgcacgatcaaggctctggaagccttgctgaagtccggagaagtcgacgatgcccgcgcgacgagagatcagcttctgaatcagctcgatcttcttgacggtccggtcagggagaaatctgaagaagttgccatggcgagtcacctgcttgattcctatctgcgccaggattatgccaccgcgaccgtggaactttcccgccgccaagatctcttgaaggatgcggagaaaatcagaaaagaacacgaagacaagcaaaggggccagtctgccagccataaccagatgatcggagagaaagaagggctcgacaagcttgaacgggaacgaacaagatctgttgagaacctgattttttcagggattctgaaggatgctcatgattctgttgaaaaagctttggcaggctcactgagtgcggaagaacggttgacggaggagaaaaatcggctggatagtctgaaagccgaactggacagcaggttgtccgggctcggcgagcagctcaagggacagcgtaaagagctgaacgggctggaggcggagaagataaaaaaagagctggatcagagcaattaccttactgctcgttcgattgtttccagcttacctggtatcaggagttgttttgagcaatacgatgaggcggatctgttttacccaggtttaagcggcaggctgaatgaccgttatgatatgttcctgcgcgaggaccaaagggtcagagaaaagatcacaaaattgaacgaaaaaatttctgcgatagaagcccatggaggattgcagccaccggcgcaggatgtgattcgggttatcgaaacccttggtaaagcaggaattgaggctttctcctggtggcagattttttccgagcggaattacagtgtcgctgaagccgaagccctgatcgcccttaatcctccccgatatggcggagtggcagtaaagaccaagaaagccctcgaaaatgccagggaaattctgggtgttggctgcggggttctggcaccggttatcgtgtcagtgtacaccgatgattcttctgatgcccagtataatggtctggcagtgcttccggatgtggcactggccattgatattgatctttccaaaggtttttgtgatcgaagtcgggtggaaatagcagaatatgaagcatcgttgccgttaataaaggagagtcagatcgcggctaatacggccaaggaaaagcttacggtttttcttggcacctatagtgaggtgtctgagacggttctgctagatgccattctcgtggcaaaaagccgggtggcgacctgccaggaagaactggctactcttcaggcaaaagaacaagaagcgatcgcggaacgtgacagcttaaaaccgcttattgaagagaaaatagcagaactcaggggagttaaggaacggcttggtgcgttgtcagcccaccaggcacggcacgaacaggatcgtgaggaacgcctactgcgcattgcagaactggcatcagatatttctggattatcactgttgattactgctggtcaggaagcaatcactgcggcggaacagaaggttctacagcggagggattcggttacagaatgtcaaggaatcgccaccggcctgttgcaagagttcactctgctcaatattgagagaaaagtgcaacctgatatcgcctttgcccaattggcaaccagctcaaaatctgcccgggagctgcgggacacgaagcagcgcgctcttgaagccgcaagcactgacaaggaatatataacggtcaaggcaaatgccgacatatccaagaaaatgtacgagaaagttttcaaggaataccaggatgatttcggagcggttccggaagatgacaagcaatctgcagccgcggagctcggtgaacgggcggtaagcaaaggcgacatctcggatgcccagtctaaccgggatctgctgatagaacgcaaaggtcaggcgaaaacaactcaggaatcagctcagaaaatctacaatgatctcaagaaaaaacaccatggcatggccgttgtccaatttatcggggatgatacggcctgtgtcgaacaggagagcttctgtaacggagaaatcgtcaggctgcaggaactgatcactaccaccaataatgatatcacggaacacagattcgctatcgagcattgcaggggtgagctgaaacatatttccagccttgctgattccgttagtctggagagagccaccggaggagagccatttgcttgtgttgacgaggctgaaaccgagttacatgtaagtgtaaaacaggtggaaacttttgctggagaactgatgcggctcgaagacgccctaaagagacagagcagggatctgggcaaactcctggatgaaccactctgtacgtcggtgccgatagcggtgtccacgatcaaagaggaaaagaaccggcgggaagatggcatcttgcgtgatggaatagacgaattgctggtttatatccaacaggcagcagacccactccctcacgagctcgccaagcttgaacaggacaagcagacaaccgttgacgaggtcatgcatgtggccaagaaggccttcaagctattacagaacctcggtaaaaaaagcaagatcccggaactaggcggtatctggcatagctggttcggactcccctttgttagatttactaccagggttgatccagattcagaatcgtcccgtctggcggtcgctggctcggttacccgtctggcacagctggaaggagaactacccaacggagcggcgatcgtccggaccgctttggccgaaatgttgagtggcgccttccagattgaaacgttaaagccggatcccctgccgacgacgaaatattacccgatttcccacaaagaaggtgtccgctcatggtcaggcgggcaaaagctttctggatcggttcttctttatatggctttcagtaaccttctgatggttgaaggacaagctgctggcggcgtgctgttgatggataatcccttcggttcctgcaaccatattgaatttgtccggttaatcgtggcgttgactcgtcagtatgggatacagatggttgcctacacaccggtggtcgatgaagaaattcgcagaatgtaccggaacaatgtcctcttgaggaagggaggggcgtccggattgagcaaacggggctttaccatggtgcagttggaacagaaaatctacaataatggcgaggctgccagactgagaatcaaggccgaggtaccgaatgctacctga

SEQ ID NO: 52442 - DNA, 1089 bp, Geobacter pickeringii
atgctacctgaatcgcaacatttcattgacgctctggcaaccgggcggacatctctcgttgagatgtggcaagctatatcgaatgtcatgactcttccacatggcggtcagagagaagcgttgatggctgtacttgatgagttgcgggaaaatggccttgtcgaattccccagatccgataagttgtgggataggagcgcggtgccgcacctccccgcatgggtaaacaagctgccgacgaagaaacaggcaaaggatgttgcaagggtgatttggtcaccagaattagcgtttctagcagaacagatcattcggcaggattctccttgggtgaaagtagacgcctggctgaaaaagtaccgagggaaaaaactggaatttaagccgattagggagcgatctcttgaaatttttggtgatgagaaagcgctagacagggtcgttggtcttacccccttcaaacaggggcagatcagcctggaatccctcggatgtctttatgtccccgaaccaattccgtggaagccggggccaccggatagcagaaaattcagtggtatttgcgtcgagaactcaactacctttgatacattatgccgcttcaacagcgaggccggttactgggcatttgtggcatatggtcggggcaacctatttgtttccatgactgatggtcttgcttcggtggttaaggagtatgggcatgatcgggttcagtattttggagatgctgatctcgagggaattgagatagctgctcggggcgcaaagcgactcttggagtctggaatcttactagaactggatcatcgactgtacaatctcttggttaagtttgggcaagttgtgccatcaaaaacaggaggagaggtgtcggaggacgctgccagacttcttgcacaagcggaactaagcagtttatctgatatgttcacgcattatcagaggatagcccaggaatgggcagggctggaaactttgaaaattgcgttcaattccgcgcaaactgtgacttataagctaaatgttgaccggcttctgggggtgccccatttagatgcaactcataaggagaaggtatgcccataa

SEQ ID NO: 52443 - DNA, 1467 bp, Escherichia coli
atgtcgctagggtttttggagcaggctcgtaatgaatcaatggcacgtcgcgagctgtctattcagtctcacgccttgctggtcgtgcgaacgctggattcaatatatagcgcccttcagcgaaatccgttcgatggtgttgagcttgatgcgctggcggcaatcatgtatctctttgacgccatgctttattatgctgaccgcgagcgccagcctggaatgacgcgtaaggaagcggagttatgtctggttgggcacctcaatgaagcctatccgggacaagaagaacccgactatgcacaagtggccagcaagatttttgcggcgatcaaagatcctttccgcctccgttattatgatttctcgcaacgaacgcattccgaagagcagatagtccgtctggtacgctatgaccagctatccggctcagatgatattctctggtcgctgaccgatgacggaatgttgttctataccctgcgcttggatgaaacgccgatagaacgcgcagctattctggcctggcgcacgcttaaaaccatccgtcgcggtgagatcgacaaggcagtacaccagatccaatcaacacagcggcaactggagcaatatctgattggaatgcggatgaaagtgcgagccgcccagtctggtgatttgagtgcatcctatgcacatgatattcgtcccgtactcaatgattcctttgataaaacccgagaggttttggaacatatccagaactcaatgtcggccattaccgaaatgctggttgaaggaagttcaaaattaaatcccgacaaactaaataagctacgtaaggcacaggagatttttgctgaggtctgcgcttttacgcagcgctatcaagactgcttactggatgtgaataaagattttgagcgagcacgtctgaaactcattattcccagagataatacccttttccgggaaacgctggaaaaaggtgcactcatacccttgctgtctcattcccccgacattgtcgaaaaggaaatcgatggtctcattgcacgcctgttggttccccgaaggcaggatgatgatcggcacattctgtttgaccctgaagcgctgcttaacctctatctcgatagatttgaacaggcgcttccacatgagatacaggaccccaccgatcagcctgtagctattgaaaccaacctgcgaaatatccctgaatccgtcattaaaaaatgcagtgattgggttagtgaccgattgaagaattgggggcatgtgagctttagagatgtttttgacgcctatgagtgcgaagaattttccgaacaagaacaacaggtttgtttacttcatattggcagcctggcagctaacagcgatcccgcaatagaagtggagatagacgaagctatcgaaacaacgctctggcgggctaacaatgtcaaactgttaacggtcgctcccttagacccctttgaggagtag

SEQ ID NO: 52444 - DNA, 4437 bp, Escherichia coli
atgtggctgattaaacgggtttatatggatggcgcaggccatgaagaagctttctacaaggacctcacactggactatattggcctgtctcaagcggtcagtagccctgttgttgaaggcctgcgctcgcccgtcaggaatgcgacggtggtgaccagtacttatcagcagcttgtgaatgggggcggtaagtcgacctacatcgcgctgctgttatcgatttttgagccgtccgttagtgacttcacccaatatctggcaaatcatcgccagagtgaataccactaccgcaattacttctataaagaactctctgttgttttggttgagatggtcaatgaatcaggacaaacattattactggggcatgctcatcagcgtaatggagatgatgttgaccgcacactgtttatttgtgatgcgcccgactccctgatgggcgcgccgtttgatgaagtcccttcttattcccgcgcggaacgcaattctgagctgcgcccctatgccaatagcctgcgcagttttgatagctggcttaatctcaaggctggtagtgaaggcggtatgcattggcgtaaaaccaccagacagaacgagtggcgcgcatttttactggaacaacaaattaacgttgatcttatcaaaacaatggtgaccttcaactccgaagaaggtggtctgacccgttttatcgaatacaaaactgaacatgatttccttggcgcgttcttcgcctgcaccatgtctaaagatgcggctgagcggctgcgggaactggtagcgcatgaagttgaacgtcagggagagttagaggggatccgtcgtaacgagtctttcctgaaggatgtgttggccaactggctggcgtttcttgatccggctaaacagctggaaagcatccaggcgcagcagcaactgctggaggacggcttccgagaagcaatgcgcgatctcgcagcctttgtcggggatgctcaggttgaacagacgcagcttgaagataacatggatagtttgcaaacgcatattggccaggcgatgtctctgcgtgagcagttaggtaagcgcagagcactgcttgaatatgatctcgtgcagcatcagttcaacaaacaaaaagcgatagtcgatgtacttcaagacgaagccgataccaatcggcaccagattgagattactcacgctgctatagactacaaagcctatgctaaggccctgaatgagtaccgccaggcagatgaagatctgaaggtattccaaagtgaaacggaaaggccgctacaggtgattttcgagcgtactgctagcgaagccttgggcacattagagtgggcaatcggcagacatcgccagcgggaggctacgcttgaggaagaattagggcagatgggcagggaaagccatgtcctcagacagtcatacgataaactacaaaagacgttgggtggtctggaaacggagcgtgacggatataaaagagacaaatttcagggtgaattgcaacggaatgaattatgtgaagcagggttgatccagaaggatgaaacaccagtagcagcccaataccgactggaattaaccttacgcgatgcgaagcagagtgaagaactggctaatacaattcttcatcagaaagagcaggcgctggaagcgcagctgcatgttgtgcgggaggcatcaattgataaaagtgaggcccggcaaaaactcattctggctgaacaaaaacaccagtcagctgtggatagtgctttagttttagcaaaaacctatcaaaaactgccaacgtcaatgcaacatgatctagatattgaagacacgagttggcacagcgagttgtgtggattgcagttcgacaatgtattgaatgcgaactctcaaacgctgaatggaatgaaagagcgtttactgcaagcccggcacgaactggacgagttgaggatgacgggacatgaactggtcgctaagcaggtcaatgaggcacttgaagcattttatgcggcgggcattgcacgagataagctatggacatttccacactatttggcctctgcttacaacgatgatgcacaaaagattgcagcggtgatcgatcaaaaccctggccgctatctgagcctggtcgcactcgacaatgtaacgtttgaacaggtccataaaattagtgagatcctaccctggaagaaggcacctattgctatttacttgctggatgaagcacaagatctccgccgagaaacgtctgaattagtacaggttgtcctctcaaaccccgataagcacggatatagccaggccgcttacgaaacccggctgcaagacctggagaataccgtagcgtcgcaggaagtcagtgtgaatgctgcggagagcgcccttaaagtactggaatctttcaggaatgactggagtcggcattacgaacagtatggtaagcattgggcgggactgcttgaccaacgggagctggctctattaatgctggaaaatgctgatgcagcacttaagcaagctgagcatgatgagcaaacactgcgtgacgagaagagagatgtccaggtgcgtttaaacaacgcccaacagcagaaaattcaggcagaaaaagcatatgataaagtgagtctttttgtagaaaaagaatgggcgaagcgtgaaacggcgataatgaaactggagcagttagctgcacagattcagcgaagcaagaacactctttgcacccagagagagaggctggaacggctgagcgagctcgagaagaacaaacgctccgagaaaacccttttaaatatccagataggtagctggagtaatctgtgtaacgaaccgttctattcagagattacggcgactgaaggtatggaaggacgaagccctgaatatgcccatgagatggctgctcaggcgcacaaaaaattgctcgaagcagccaacggtgatcaagtgaccgttctcaagcaacaactgaaagatgctgaacaggcacaacgttacgcctctgagcgtttgaccgctcaacccacctacaatacatatccggatgaggtaaaagcttcggccatcaatgagctaacggtaattaataaccgcatcgtacgcctcaaagaacagcaaaagcaattcacgcaaaatctaattagctctcaggtaactctgcaaaaattttcccaaagctgtgaggaggctagtaaagcacttgacgaggattttgtctgggaagagaagcccattgagatagaggcaatccaaacgtctctggctgaaatcgtcaataacctttatgcgattgaacaccagatcaaggcccaactggaacaaaagacactgctgttgagaaagattgaaaatgtgaaagagcggctacagaacgccaaaacagctcaagcgatgatccagcccattacgccgagctctgccgcgggtctacctggtaggatcctgagcatcatagaatatgctgacgatctggctgcacaatgccaaatgtatgcaggtttaaatgagaagctaaaacaacaaaatatacgcgtctctacggtttggggatacttccgcaaacggatcgaagaagagttggccaaggatccagacgcccgagccagtcaggaatacttacggcggttggactcaatcgcaacttatcatgaagtgctgggcgatttggagagggtcggtacagggatctcgcaggtattcgaagctgtgcaggacagcctcgagcaattccaacgttcgattgatctgactgtcacccatctgactgctcatctggaaggggcgattaagcttctcaggcgcgcgatgtcggtcaaaattcctgaggattgccccgtactgcctggtcggcccattattaaaatgaccgaccggttgaatgatgttgccgctgatctcaggggttttgccagcagccgcttgcagcagtggatagccaggggacagataccccgagcgcccaatcgggacgccttgacagctgatttggttcagtcggtatttggcgaaggggaactggaggtgcgtttgctgaagacgaatgccagccgtccacaatggactcctgtcacccgacttgaaggttcgggtggacagcgccttacatctgcctttttattgtttgtgacggttggtaaagtacgagagtacgatacgggtatttcaagtgcaggattcttgttagccgataacccgctggggaaatcgaatgccaatgatctaatgcgcattcaaacccaaatggccaaagcctataaaatccagctcatctacctgactggtatttcggatgaaaacgcccaatcaatgtttgataaccatctcttcctgaacaaagttcaaaaactgaggcggcgtgatttggtaaccgttgataaagaacgccatgccctgtgggcggcttctctggctgctaagccacagttcgatccagtcatttaa

SEQ ID NO: 52445 - DNA, 1044 bp, Escherichia coli; identical to SEQ ID NO: 52418

SEQ ID NO: 52446 - DNA, 1461 bp, Pseudomonas fluorescens
atggatgattatttcgcctccggctacggcgctctgctcgatctaacgtcacaccagcgcaacctgttgctgatcaggcccatcctcaagctcgacttcaataagctcatgcacacccgcgacgacgggtcgtatctgctcgaaagcattgacaccaattacctgtgcttagctgccttgtattttatgatggaaggctcggccatacagcagggctacaccttgggcgaggtgcgtgatcacttgaagatgcttgccggttctatgcagcgcaccctcgatgaagagagccgaggtcgaattgccgatatcgtattggatgccctaagcaacaagtcgaaaaagtacattgagcacagggaaagctatttccatgccccctccggggaaacgaaatttctgaacttcaggctgatccgtttcgagccagatctcgatcaaaactaccggtacagcccgacaagagaaggctacctcgtgttgatgggaatgcttgacctggaggttgaggactatcaagtgctcatcgagaaaatgcttgtttacctaatggaaaatgggcgtttcgagcaggcctatgacctggccaaccgggcactctcgctttcagtggagcatcgccagatgatccgcgattttgttcgacaggctgccaggtcgccaggctctgtgaaatggagcaccgacatccagccaaccctcaataatgctcgtaagcatgttgaggagcgccagaccattgacttttcaatgaaagaatcattgaccgagaagataagggagttggataacgctgaggcaagggcaccactttccaggctgcatggccaactagatgccgcgaatcttcagcgcatgaagcttctgactgaaattggtggggcggggcaggtttttctcgatggacaagtcagtggcttcagagcccgccgcgcatccggccttccggatctcgagtacagcatccttcctgatttgatgggtcgacctacaggtgagattgctgcctttgcggatacggttctgcttagcctttaccctgcggtcaatctaatggttccagatctctcgaacctgtttcatttgctccttgaacggcgaaatagcgaactgcccggcgaatcggaggatgaaccaagtgaattcgaggacttcctggaaatccccatgccattccctaaggaaatgatctccaaagtccaccgttggttagatccaaaaatgcacggctcggacattttgcacttaggccagattcttgatcaggccgaggacgatgggctgacattcatggagcagaaagctgtcgcttttgagctataccgggcatttgctgacagcgaatccagatacaagaatcgccacgccatcattgacggtgaatttgaaagctcggttgtgtttggtgacaaccttcgattcgaacaggccgctgcaaatcaggagacgagcgatgagtaa

SEQ ID NO: 52447 - DNA, 4314 bp, Pseudomonas fluorescens
atgcgcatttctcgaatctacgtcgatcactttggcgccccgactggctggtatgagcaaaccacgttcgacttttgcgacccggacacaaatgcacccggcgatgcctgcgtcaatcttgaaaatgggggtgggaagacctctttgctctcctatattttcagctgctttgatccaaggcaggatcgttggctccagtatctccagtcgaagacacactccttccgcgactatttcgctcgtgatggcagaccatcctttctaatcatcgaggccatcatgccggccaagacggttggtggcgcagaatatccgctcattattggtcagtcggttgtggtgaaagagcacgcagatcgtgcatctgaggttgatcgtcgctttttcacttttgaagccaattctggactgaggtgggaggatcttcctgtcccagatatctccattgctcccgtcaaaactatgccggaatttcttggatgggtgcagcagtcgtcacgcctaagtggcggagacttctacgtcactcatcgtcaggacgaatggatgtctcatctggaagatcgcaggatgatcgaccttgagcttttgaaaatgcaggtggctttcaacagccgtgagggcggtagctctgaaggctttctttcattcaatactgaaagcgaccttgtgtcgaaactcctgaatctgtccatgagcaaggatcagactgctgagctgcggaatatggtcgggcaggcggtggataatctgaagtcaaagccacgtctggaggaaaaacttcgtcagtttggccacctgcagcaagtaatggggccattcagcggtacagcccttcaactgttgggtgctactgaagcgctaaaaaacatcgagcaacaggcggtgaacgttactgctgctatgcgaagcaggctggttgtgacggaaacggaagtcagaaatagcagtgagtccattgaagatcttgaaaagcttgcaaccaaactccttcaagatggcagcacggcgcattccgattatgtcgcaatcactggccttattctgaagcgggacgacgaggctgcttctcaaaacctgaaccaagtcaccatggaaagcaagcaaggtgagcttcaccttaaaggcctcagggccggtctggcgcttagggagatcgacgcgatcaccaccagtcttcgtgatctggaagtcaagaaggaggccattactcaggagctcaaaccccttgagcaagagtgctccaggaatggttccttgcttcgttacaaactggagcaagaaattggaaggctgagcgacaccataaggcagctggtgctgaagcgtgatgctgcgcaagtacacatcacagagatcgaccaggcctttaaagagctgaataagacctctggcgatctgaacgagcagcaaggagttctcaaggggaaaatcgatgctgctcagaaaatctacgacggtctaatttccggccagttattgctgcctaccgacatcgatgtcagcgccgcccttgatcggtttactaacaacattgaggaacaggaggctctactcaaagagcataaggctagccgttccgaaatgacgattgctctcaatgagctacgccatgcctctttgcaggcaaatcaaacgctcagcagtgccaataatggccaagactcacttaaaaaataccttagcgaacatgagcttgcgattgagaaattgcaaatgaatccgctactgatagatatggttcaaggcgcctgcgacccacgatctctggttctggtcggcgatgttcaaaagcttatcgagcaaacccgttctgagatatcgaaaaaagatattcgcctggatcaattcgaacgtgagcgtgagtcaatcatccatacgggcctatctggtaaaaacactgacgttgagcaggtagttgaggctctttccagagcaggtgttcgctctgccagggctgcgaacacttacgtggctgatcttcgtcacgatgcagacgaagccagggcattggtgctttccgacccaagccggtacctcggcgtgaacgtcgcatcggttgagtgggatagggcaatgagtctgctgcctgagtttaacctggagctctccgcaccagtcaccttggccattgcctcactgacgccgacgagcgctgattcagagcgtgttgttcttcgtcctatcaatgactcggcatttaaccgtgaggctgctcaggtggctctggccacgtttgaggccagcattgcccaggtgagcaacgagcgtgacgagtttgtagagcgggataacctcgctcaggcggtgttgagcgaattgagggccttccaggtgagttactcgcaccagcaggtggtaagtgctgaaaacgagctggacaggcttaaagagcaggctgctttgactgtggagttaatcgacaacatctctgctcagattacagattttgaacagtccattgcagccattacgcctaaagtagagcagttgcctattgcaatctccgcccttgacggtggaaagaagcagcttctcaactacctggataattggcaggggccggcccaggaagctcaggcttctctgagagaaattctggccaagctctctcaaatagatcaccagattcgtgatcttgatgtcacgaagaccgaaaaaactatagaggtcagcgaactttcaaagcaggagagcaatcttaagccgggcttggtttttctccgaactgagcacgaccaggttgggcggtacgaccctgaatttgaaacttcagccgattcccaggtgtacagccttgaatcactacgatcaaggtatgccgaagcaatggctttgctatccgtggaggaaaaggagcgccttggccttatcggacatctgctcaatgctaagcgccaggatctggaaaaagcagaaaaaaattatcgccaggaatactcgggtgttgacggtgagatcgtcaaaaccctcatgcaactggatctggaaagtgaaattggtaaccagctagccaagctcactgaacttgctaaaacccggcaagaaaagcagtcaatccattccgatgccaaagcagcgatcaaggaatattggcgagagcgcgagcaaatcgaaccttctgatgagatgttagtcttggcggacgacgatctgcgcattgctgccagcaatcgcctcgacttctatgaggaaaaaaaggccgagcgcgagacagcccttgagcaaattggcatccagaaggtaaaagccgccaagcaacgccagtcgctgaaagatcttcattccaatctcaagaacctcgaagctacgttcgaccgcaaaaatctagcgactcaagacgtggagctctcagatgatattggtgaaatagtcactgacatcatccgtaaactccgcgcacgtgaaggtgaggtgtcgcggcttcgcgcagcggctagcaacgcataccaggccgtgatcaggattgcaggaacgtccgagtttcgagctgccgaaggtcagattgccgagatgttcgcatctgaggatcttgatcgggcgtgcgccgataatgaacacatcacggacatgatcgccgatcgagtttctgctttgcaggggacactagatggaatggttcctgatttcgagcgatgcgttaccgagatctacaaccaagtggcgtcagcgacgtctttgctcaagcatgcaatgtcgatcacgatgccaattggcacgccttatgtaagtggtcgctcgatcctgaaaatgtcgagtaacttacatggcatgtcgactgaccaacgcaaaagcgagattgcccagtacctcaaccgcctaatcgaaaccaccctcatcccggaaacagggtctgaggtcatcacgcagtgcctgctccttttcacccctcgccagaccttcggtcttcagatcctcaaaatggaacagaacaccgagttccagtatcagccggtgaacaacatgaagaagtcgggcgggcaaggtaccgtgatcgccatgttcctctacatgttggttagccacctgcgtgtcgatacggcagccaaagccatgagaggaggaggtgggccattgcttctggataatccattcgcgaacgtgcaaacacgtgcattgatcgatgctcagcggatactagcccaaagcctgaagatccagctcatctgcctgaccgccaatgccgacccgaacatcattgaaggtttccgccgtgtgctgaggttgcgcaaggccggtatgcagaaaagctcccatcgcactcacattgaaatggttaaagccacatttgtagatgaggtcgccgaagcatga

SEQ ID NO: 52448 - DNA, 990 bp, Pseudomonas fluorescens
atgagccagctgttcttcggaagactgatgctcagcccacagaaacgactcgacctcaaggtgctgcgctcgacctggcttgactgctttccagagcagcttcagacatatgatcgagacagattgctacttgatgctcttcgtcaaggtgagcaggaaggtcttctcaagctgccggcaaagcaaagctatgagcggcttggaaatccgcctatgcctacgttcatcacactgattcgagagcccaaaaaggtaagtgactttgattttgtaaaggtggcctgggctcctgaaatggggttctggactagcctttctgcgtcagagctcgtaaccgctctcaaaatcaacgagtggataattcgacgcaggggcaaatacatggtggttccgctgcgcgaacggtcgttggagatctttgacgacgagaaatatctggattccagggtgcgggatggcgctttgtttagcggacggctgccgttaagcgtgattggtaccaggcgcgtagagcacccgttggcatatagacctgctgatgcagaaggattgccagtcctcctggtggaaaatcaccatacattctggagcctaggtgagtggaatgaatcagcgaagatgtatagcgctgtagtttatggccacggaaaaaccatttacgcatctggcctagcgttggtcgaggtaatgcgggaaagaggggcggttactgctgaatacttcggggatcttgatccagaaggtgttgatatccccgtcctgttcaaccagagaaatacccagcaggtcaccccgtgcatctccctatatgaacgccttttagccatcgggcgtcgcagggatggggtctcagcaacggactttcacgtcgccagggctgagaaatggcttccaactctgagtggtgagatagcagcactatggggcaaaggaaattggattccccaagaggggcttggcctcgagcagcttttcaattacgagttctga

SEQ ID NO: 52449 - DNA, 1521 bp, Bacillus thermoamylovorans
ttggaaagccttgatctaaaagaaataacgaccggttacatggagcggatgagaaggcttgccctctttgacccgttatacgatttggaacggaaacgggaagttgacttagaaggtaaaaacattgatatgaaaggccttggtcttttagctttactatttttctttgaaaataaactgattcgtgaatcaaaaacaggtgttaagcaattggcggcctttcttaaagaaatgacccatcaagtttatatattgcgtgacgagaaatatgaagagtatgcccgtaccatcattcaaacgttcagaccgacacatgggaaaaaacgaagctatgaatattttgattgggaaaaaaaggaaacgggtgtcatcgaatattcaatactaaaagcaaacaattttgatgtgcaaacaaatgcacagtattatacattggatgacgacggactggaactgatttttgccacaaaagagttttacagcgagtttcaattgtcaatcaatcaattaattttacgaaaacagctggaaaagggcgagtttaaaggggccctcagacaaattaatgaaatgcggattgatgtggaaacccttgaggaccgcatggagaaattaaaacatgaaatccagcgcagcatagtatctgaggaaacctttgaacgttacaaacagcttctcgatgatatttacggccggctcgaacgggaagacgaggaatttaaggagttgcgtaattttgtcaaagaaacaagggaacggttatatgcccaagatgtccataagaaagaacgaaatgcgtacaattatattttaaaaattaaccgcgaactggaagaagtgcattatgagcattcccacttacttgaccagacttttcatttaaaaaatacaaccttaatgacagcgcaggaatcgctttattatgcaggcatgcaatcgttcaattttgatcaggatttagtgtcacgagtcgtatcagcaccactgcccatggacgcaatgaaagggttgcttcatccgtttttaaaagtagaggaaaatcggacatggtcaccccttactgttttggcggaacaaaacctggttgaggaacgcgaggaaaaagtggaatatcatttccttgacgtaaacgatgacaataccaatgatccgtatcgtttatggcttacaaaaaaatacggtgaattaatggaactgtttcttcaatcctatgaaaacaatggtgttcgaacattatccggattttttgcctatttggaaaatcaagggatggaggagatctatcaacaaagatacttttacgacttctggctgattttgcaccagcgttcaccggttcatcacggaaacgaggatgaaacaagcggcaaaacggtgcttggtgaggcattgtcccgcttaaacggacgggtcttaatagtaacggaaaaaaatataattattcaaaaagtcgacaggtattccatccaggatatgacatttgaattggaggggacagacgatggactattcagagagtaa

SEQ ID NO: 52450 - DNA, 744 bp, Bacillus thermoamylovorans
atggactattcagagagtaaagtaatccaagcctttcaactgtatacaaaattggcgcgagacggtgtgcttggtgttgatagtgtccaactatacaatgccgatgacgatatccgcgcattactggacctatttagttacgaagtcgattgtgtcatcattaaaacaagtgaacaacttttcttcgtaccaaaaacaaggctttctccattccacgtatccaatgattggattaagaaaaattatttacggtctggcgcaacgaacggagacatttatttgctctatttttgtacattaatcttatttggcagcttttatgactcctatcaaagccatgagccgacaagacaatttctgtcattggaagactgggttcattctatccaggaccgcatcgaccaactgaagtctcatgatatcgatgagctaaaagaactagaaaaagagttttcttataattggacggtaatcatcgagaaatgggatgatatggatgatattaaggaaaccgccaaacgacagtccggaaatacgatcagtcgattaagctttatcgacacggtacgaagatttttaaaagaccaagatttaatccaagatatcggtaataatgaagtgactttgactgaaaaggcgatgaccattattcagcggttctttatggaagtcgaattcaacaaaggaatttttgaatttatttacggttttgaaaaggagaatgaagatgccggctatcagtaa

SEQ ID NO: 52451 - DNA, 4422 bp, Bacillus thermoamylovorans
atgccggctatcagtaaaatccgactaacaaatgtagtgtatgaagagggaaagaaacgctataatgatgaactgtttttctttgatgggtacaatggtgcaattctacttgaaaacggcggcgggaaaacggtttttattcaaacggtcctacaggcgatcatcccccatactgacctggctgaaagaaaaataaaaaacacattagttcttgaaaacgcaccggcccatattgcgattgaatggttaattaatgaaagaccgagacgctacgtcgttaccgcggttacactgtttacaacaaaagacggactggattcattgcgctatgtgtatgagtacggagcgggtgacgctcacagtatagaggaaatgccgtttgtcagggaagggaaaaatggaaaacgtccggcggaaaaaggagaaatgcaagattactatagcggcatgcgggacagaaattttttagcaagaaccttctccacaattaaagaatatcgaaaattcattgaagaacagtaccatatcattgccgaagaatgggatagcattgttaaaatcaatagctcagaaggcggtgtagaagctttctttgatgattgtaaaagtacgaatcaattattcgaccggctgttaatcccaacagtggaaaactcgatttccggtcatgatccgaaaatgtttgccgatatgtttgaaaagcgacatgaaagcttaaaacaatataaaaaattaaaggaaacgattgaagaaaataaacgcattcaagctgagttggaaaagtatgtggcaacctttgaaaagcttcatatagcaaaacttgcatacgacaagacaaagcagcgagcaaaaggcatttgggaagaaatccagatgcaaaaaagcaatatgaatgaagaacaccatggaatgatgcaaacattagcagagtggcaatcagcttatgatcattaccaagttaaaaaagcttcctaccaaatcgccatagaaaaatcgaaatttacggcgctggaaaaagaatatgaagaagtttatgccaattttagccaaagggaagaggaattggcaaatgttaacagggactattattctttaaaactcgccaaactaaaattggagttaaagaactatcaagacgaattaaccatgattgaaaaagaaatcgaaaagctggaccaaacagaagaattggaggaccttgaaatccagctggaggaggcaaaacggtcattgctcggctactttgttgaaacaatggacgagattaaaaaagaaatttctcaagttcaatacgagttgaacccgattcaggaacaaatcgaagcgattcaaaaacaattggatggagccgggaaactcgaatcggaaaaacaaaaagaaatagctgcgattgaaaatcagattcgtacacgtcaaacggatttagcaaaactggaacaattgctccttgctaatccgaaacaacaaaaggtggaaagtgaatataaactttggcaagaccgttatcaatttttagacgaagaagtcatccgattaaccggagaaataaaacaattggaacatgagcaaaaagaaatcagtaaaagtattgatgaactgaaaacagaacgggaacaagtgcaaaattctttaaacatcattgagaatgacagggaaagaattgattatgaacagcgaatacttattgaaaaattaagtcttctccgccccgggtggtcgtctcttgagtcaatttatgatctggaaaaatcaattttctctcgacttgaggagtcgattgatattttatcaaaagagaaaaaagagttgctatataaagaacggattgcataccgattggtagacgattacggtaaacagcaactgtttttcagcgattcctatattgattctcacataaaatcgtggaaaaaccaatttgactatcttcttaccggtgtcgagtacttacaaacccttgatgaacatgaatacgagaaaatgtgttcctatccactatggtcacttacactcatcacaacgaataaatcgaaaccggccttacaagaaaaattgcagatgtcagctgaacaattgcattttccaatccaagtaatgacgttggaagaagcagctacagttgatatcatgacggatgacgttcatacatgggtgattccgcttcattggcaaaaaggaatgaacgaagaggcttttgaccattggaaaacagaaatcaaggagcgggcaaaagcggcaaccgatactcgggaagcaaaagaacaagaactgaaaaaatgggagacaggcttaagagatttccaacaatttattaccatgtacccgtttgaaaaagtccaactattagatgaatcccgttccgaacatattcgaaaaattgatgaaatgtcaagaaaaatcaagaatgaagaggaaaagggtgggatctgccaagaaaaaggaaaacaatttgctgaaacgatttctgaatacaaagaagaaatgcagggattggaacgaaatttggaaagggcgatggaatattttcaatacgtccgtgaagtagaagaggcgaagaaaaaggaaaaacaactaatgaatgaattggaaaatattcaaagaaagatgacccgttggaaccggcagttgactgattatcaaatgcgggaaaaatcactggtagaacgaaaaagggatctcgagtctagtttaagattctatgaaaatcttgatgaatatcaagctgtgcgttcctatagtccgatttttaccggagaaagtaaactggccattcaagaaaaaatgaacacgattcaattaaaattgcagaaaatcagtaaaagttacggagaatggaaagcaagacgggaaaatgccattcaaaatatcaaccgagtccaattagatatggacgaacttcggaaagagcaatcacaactcaatgaagaacaagtttttccgagtgatggcgaacaattaatggaaaacacacgccggctaatggttcaattagccaaagaagttaaacgtttggacaagatgaaaacggaaaaattggcggcaaaagaagggcaaaaaggaaaatggcaattgacgattgaccagtttcaacggaattatcctgatgtggaaatagtcgagtttactgaagccactctcgatgaagaaaaagaccttttagtacaagaaaaacgggatttggacgaaaagaaacaatatattgatacgcaactgagccgtattcaaaaagaaatacaatcgattaatgaagctgaacgggaaatggaccgttttattgaaaaacatcattttgacgcacctaatattgaagcgactcctttaaatgccgatgagaaaatggcgtttacctatcaccgaaaaccgtctgttcaatcgataatccgtgaactggagtcggcccgagaaaatgttgacggggaaaataaaaatgtcggaaacgggaaacaaacgttcagacagttttgccaaaccatttccgactttaagatgcgaaaaatggcggaaaacggcgtcgattttaaagatacgtatgacgaattactcgaatttcagcgaaacatggtcaaacgaattgaaatagcaataaattatgccaacgaaagtattcgcaaagaagatgccgctcttcaggcatttatcaaccaaattcatacgcatttaacaaccattgtagaagaactgcgggaaattccaagaaaaacaaaggtcaaagtaggggatgactggaaaaccatttattcgttctcgattccggaatgggaagaagaggaaggaaaaaaacgaatcagagattatatcgaatggatcctaactcaattagaatcagaacgctatataaaaccggatggcagtcaagatgatatgaaaataagaaaagatatcgaaatgtggctacaatcgaagcaactcttgcaaaacgttatgaagaatgaagcaatgaaagtaagctgccgaaaagtaacgaatgaaaacaaggtaacgacaagatcgtattcatgggaacaaagtaatgtctggtccggcggggaaaaatggagtaaaaatatgacattatttttagggattttaaattatgtagcggaaaagaaaaaacaaaatcgccccaacacgaaacttcatcgggccgttatattggacaacccgtttggtaaagcttcaagcgatcacgtattaagtccggtgttttttgtcgccgaacaattaggtttccaaatcattacgttgaccgcccatgcagaagggaaatttttacaagattacttcccgattatctacagctgccggttaagggaatcgaacgataataacaaacaggtgatgacgaaggagcaatggttacaccgggcatacttccaagaccatgacccggtcgtcatcgagcgactcggtcaaacagaacagttgagtttgtttgatatgtag

SEQ ID NO: 52452 - DNA, 1023 bp, Bacillus thermoamylovorans; identical to SEQ ID NO: 52360

SEQ ID NO: 52453 - DNA, 1521 bp, Bacillus thermoamylovorans
ttggaaagccttgatctaaaagaaataacgaccggttacatggagcggatgagaaggcttgccctctttgacccgttatacgatttggaacggaaacgggaagttgacttagaaggtaaaaacattgatatgaaaggccttggtcttttagctttactatttttctttgaaaataaactgattcgtgaatcaaaaacaggtgttaagcaattggcggcctttcttaaagaaatgacccatcaagtttatatattgcgtgacgagaaatatgaagagtatgcccggaccatcattcaaacgttcagaccgacacatgggaaaaaacgaagctatgaatattttgattgggaaaaaaaggaaacgggtgtcatcgaatattcaatactaaaagcaaacaattttgatgtgcaaacaaatgcacagtattatacattggatgacgacggactggaactgatttttgccacaaaagagttttacagcgagtttcaattgtcaatcaatcaattaattttacgaaaacagctggaaaagggcgagtttaaaggggccctcagacaaattaatgaaatgcggattgatgtggaaacccttgaggaccgcatggagaaattaaaacatgaaatccagcgcagcatagtatctgaggaaacctttgaacgttacaaacagcttctcgatgatatttacggccggctcgaacgggaagacgaggaatttaaggagttgcgtaattttgtcaaagaaacaagggaacggttatatgcccaagatgtccataagaaagaacgaaatgcgtacaattatattttaaaaattaaccgcgaactggaagaagtgcattatgagcattcccacttacttgaccagacttttcatttaaaaaatacaaccttaatgacagcgcaggaatcgctttattatgcaggcatgcaatcgttcaattttgatcaggatttagtgtcacgagtcgtatcagcaccactgcccatggacgcaatgaaagggttgcttcatccgtttttaaaagtagaggaaaatcggacatggtcaccccttactgttttggcggaacaaaacctggttgaggaacgcgaggaaaaagtggaatatcatttccttgacgtaaacgatgacaataccaatgatccgtatcgtttatggcttacaaaaaaatacggtgaattaatggaactgtttcttcaatcctatgaaaacaatggtgttcgaacattatccggattttttgcctatttggaaaatcaagggatggaggagatctatcaacaaagatacttttacgacttctggctgattttgcaccagcgttcaccggttcatcacggaaacgaggatgaaacaagcggcaaaacggtgcttggtgaggcattgtcccgcttaaacggacgggtcttaatagtaacggaaaaaaatataattattcaaaaagtcgacaggtattccatccaggatatgacatttgaattggaggggacagacgatggactattcagagagtaa

SEQ ID NO: 52454 - DNA, 744 bp, Bacillus thermoamylovorans; identical to SEQ ID NO: 52450

SEQ ID NO: 52455 - DNA, 4422 bp, Bacillus thermoamylovorans; identical to SEQ ID NO: 52451

SEQ ID NO: 52456 - DNA, 1023 bp, Bacillus thermoamylovorans; identical to SEQ ID NO: 52360

SEQ ID NO: 52457 - DNA, 1521 bp, Bacillus thermoamylovorans; identical to SEQ ID NO: 52453

SEQ ID NO: 52458 - DNA, 744 bp, Bacillus thermoamylovorans; identical to SEQ ID NO: 52450

SEQ ID NO: 52459 - DNA, 4422 bp, Bacillus thermoamylovorans; identical to SEQ ID NO: 52451

SEQ ID NO: 52460 - DNA, 1023 bp, Bacillus thermoamylovorans; identical to SEQ ID NO: 52360

SEQ ID NO: 52461 - DNA, 1521 bp, Bacillus thermoamylovorans
ttggaaagccttgatctaaaagaaataacgaccggttacatggagcggatgagaaggcttgccctctttgacccgttatacgatttggaacggaaacgggaagttgacttagaaggtaaaaacattgatatgaaaggccttggtcttttagctttactatttttctttgaaaataaactgattcgtgaatcaaaaacaggtgttaagcaattggcggcctttcttaaagaaatgacccatcaagtttatatattgcgtgacgagaaatatgaagagtatgcccggaccatcattcaaacgttcagaccgacacatgggaaaaaacgaagctatgaatattttgattgggaaaaaaaggaaacgggtgtcatcgaatattcaatactaaaagcaaacaattttgatgtgcaaacaaatgcacagtattatacattggatgacgacggactggaactgatttttgccacaaaagagttttacagcgagtttcaattgtcaatcaatcaattaattttacgaaaacagctggaaaagggcgagtttaaaggggccctcagacaaattaatgaaatgcggattgatgtggaaacccttgaggaccgcatggagaaattaaaacatgaaatccagcgtagcatagtatctgaggaaacctttgaacgttacaaacagcttctcgatgatatttacggccggctcgaacgggaagacgaggaatttaaggagttgcgtaatttcgtcaaagaaacaagggaacggttatatgcccaagatgtccataagaaagaacgaaatgcgtacaattatattttaaaaattaaccgcgaactggaagaagtgcattatgagcattcccacttacttgaccagacttttcatttaaaaaatacaaccttaatgacagcgcaggaatcgctttattatgcaggcatgcaatcgttcaattttgatcaggatttagtgtcacgagtcgtatcagcaccactgcccatggacgcaatgaaagggttgcttcatccgtttttaaaagtagaggaaaatcggacatggtcaccccttactgttttggcggaacaaaacctggttgaggaacgcgaggaaaaagtggaatatcatttccttgacgtaaacgatgacaataccaatgatccgtatcgtttatggcttacaaaaaaatacggtgaattaatggaactgtttcttcaatcctatgaaaacaatggtgttcgaacattatccggattttttgcctatttggaaaatcaagggatggaggagatctatcaccaaagatacttttacgacttctggctgattttgcaccagcgttcaccggttcatcacggaaacgaggatgaaacaagcggcaaaacggtgcttggtgaggcactgtccagcttaaacggacgggtgttaatagtaacggaaagaaatataattattcaaaaagtcgacaggtattccatccaggatatgacatttgaattggaggggacagacgatggactattcagagagtaa

SEQ ID NO: 52462 - DNA, 744 bp, Bacillus thermoamylovorans; identical to SEQ ID NO: 52358

SEQ ID NO: 52463 - DNA, 4422 bp, Bacillus thermoamylovorans
atgccggctatcagtaaaatccgactaacaaatgtagtgtatgaagagggaaagaaacgctataatgatgaactgtttttctttgatgggtacaatggtgcaattctacttgaaaacggcggcgggaaaacggtttttattcaaacggtcctacaggcgatcattccccatactgacctggctgaaagaaaaataaaaaacacattagttcttgaaaacgcaccggcccatattgcgattgaatggttaattaatgaaagaccgagacgctacgtcgttaccgcggttaccctgtttacaacaaaagacggactggattcattgcgctatgtgtatgagtacggagcgggtgacgctcacagtatagaggaaatgccgtttgtcagggaagggaaaaatggaaaacgtccggcggaaaaaggagaaatgcaagattactatagcggcatgcgggacagaaattttttagcaagaaccttctccacaattaaagaatatcgaaaattcattgaagaacagtaccatattattgccgaagaatgggatagcattgttaaaatcaatagctcagaaggcggtgtagaagctttctttgatgattgtaaaagtacgaatcaattattcgaccggctgttaatcccaacagtggaaaactcgattgccggtcatgatccgaaaatgtttgccgatatgtttgaaaagcgacatgaaagcttaaaacaatataaaaaattaaaggaaacgattgaagaaaataaacgcattcaagctgagttggaaaagtatgtggcaacctttgaaaagcttcatatagcaaaacttgcatacgacaagacaaagcagcgagcaaaaggcatttgggaagaaatccagatgcaaaaaagcaatatgaatgaagaacaccatggaatgatgcaaacattagcagagtggcaatcagcttatgatcattaccaagttaaaaaagcttcctaccaaatcgccatagaaaaatcgaaatttacggcgctggaaaaagaatatgaagaagtttatgccaattttagccaaagggaagaggagttggccaatgttaacagggactattattctttaaaactcgccaaactaaaattggagttaaagaactatcaagacgaattaaccatgattgaaaaagaaatcgaaaagctggaccaaacagaagaattggaggaccttgaaatccagctggaggaagcaaaacggtcattgctcggctactttgttgaaacaatggacgagattaaaaaagaaatttctcaagttcaatacgagttgaacccgattcaggaacaaatcgaagtgattcaaaaacaattggatgaagccgggaaactcgaatcggaaaaacaaaaagaaacagctgcgattgaaaatcagattcgtacacgtcaaacggatttagcaaaactggaacaattgctccttgctaatccgaaacaacaaaaggtggaaagtgaatataaactttggcaagaccgttatcaatttttagacgaagaagtcatccgattaaccggagaattaaaacaattggaacatgagcaaaaagaaatcagcaaaagtattgatgaactgaaaacagaacgggaacaagtgcaaaattctttaaaccttattgagaatgacagggaaagaattgattatgaacagcgaatacttattgaaaaattaagtctgctccgccccgggtggtcgtctcttgagtcaatttatgatctggaaaaatcaattttctctcgacttgaggagtcgattgatattttatcaaaagagaaaaaagagttgctatataaagaacggattgcataccgattggtagacgattacggcaaacagcaactgtttttcagcgattcctatattgattctcacataaaatcgtggaaaaaccaatttgactatcttcttaccggtgtcgagtacttacaaacccttgatgaacatgaatacgagaaaaagtgttcctatccactatggtcacttacactcatcacaacgaataaatcgaaaccggccttacaagaaaaattgcagatgtcagctgaacaattgcattttccaatccaagtaatgacgttggaagaagcagctacagttgatatcatgacggatgacgttcatacatgggtgattccgcttcattggcaaaaaggaatgaacgaagaggcttttgaccattggaaaacagaaatcaaggagcgggcaaaagtggcaaccgatactcgggaagcaaaagaacaagaactgaaaaaatgggagacaggcttaagagatttccaacaatttattaccatgtacccgtttgaaaaagtccaactattagatgaatcccgttccgaacatactggtaaaattgatgaaatgtcaagaaaaatcaagaatgaagaggaaaagagtgcgatctgccaagaaaaaggaaaacaaattactgaaacgatttctgaatacaaagaagaaatgcagggattggaacgaaatttggaaagggcgatggaatacttccaatacgtccgtgaaatagaagaggcgaagaaaaaggaaaaacaactacttgatgaattggaaaatattcaaagaaagatgacccgttggaaccggcagttgactgattatcaaatgcaggaaaaatcactggtagaacgaaaaagggatctcgagtctagtttaagattctatgaaaatcttgatgaatatcgagctgtgcgttcctatagtccgatttttaccggagaaagtaaactggccattcaagaaaaaatgaacacgattcaattaaaattgcagaaaatcagtaaaagttacggagaatggaaagcaagacgggagaatgccattcaaaatatcaaccgagtccaattagatatggacgaacttcggaaagagcaatcacaactcaatgaagagcaagtttttccgagtgatggcgaacaattaatggaaaacacacgccggctaatggttcaattagccaaagaagttaaacgtttagacaagatgaaaacagaaaaattggcggcaaaagaagggcaaaaaggaaaatggcaattgacgattgaccagtttcaacggaattatccggatgtggaaatagtcgagtttactgaagccactctcgatgaagaaaaagaccttttagtacaagaaaaacgggatttggacgaaaagaaacaatttattgacacgcaactgagccgtattcaaaaagaaatacaatcgattaatgaagctgaacgggaaatggaccgttttattgaaaaacatcattttgacgcacctaatattgaagcgactcctttaaatgccgatgagaaaatggcgtttacctatcaccgaaaaccgtctgttcaatcgataatccgtgaactggagtcggcccgagaaaatgttgacggggaaaataaaaatgtcggaaacgggaaacaaacgttcagacagttttgccaaaccatttccgactttaagatgcgaaaaatggcggaaaacggcgtcgattttaaagatacgtatgacgaattactcgaatttcagcgaaacatggtcaaacgaattgaaatagcaataaattatgccaacgaaagtattcgcaaagaagatgccgctcttcaggcatttatcaaccaaattcatacgcatttaacaaccattgtagaagaactgcgggaaattccaagaaaaacaaaggtcaaagtaggggatgactggaaaaccatttattcgttctcgattccggaatgggaagaagaggaaggaaaaaaacgaatcagagattatatcgaatggatcctaactcaattagaatcagaacgctatataaaaccggatggcagtcaagatgatatgaaaataagaaaagatatcgaaatgtggctacaatcgaagcaactcttgcaaaacgttatgaagaatgaagcaatgaaagtaagctgccgaaaagtaacgaatgaaaacaaggtaacgacaagatcgtattcatgggaacaaagtaatgtctggtccggcggggaaaaatggagtaaaaatatgacattatttttaggaattttaaattatgtagcggaaaagaaaaaacaaaatcgccccaacacgaaacttcatcgggccgttatattggacaacccgtttggtaaagcttcaagcgatcacgtattaagtccggtgttttttgtcgccgaacaattaggtttccaaatcattacgttgaccgcccatgcagaagggaaatttttacaagattacttcccgattatctacagctgccggttaagggaatcgaacgataataacaaacaggtgatgacgaaggagcaatggttacaccgggcatacttccaagaccatgacccggtcgtcatcgagcgactcggtcaaacagaacagttgagtttgtttgatatgtag

SEQ ID NO: 52464 - DNA, 1023 bp, Bacillus thermoamylovorans
ttggaagaattaaaaagaatcctctctgtttatccgaaacgtatgatagatttaacccgtttagaagaattgacaaaatccttcgttcatacttatgaggagtttgcggacgtcattctgcaattggaaaaggaccagatactggaaatggtaaaatccaaaggacggacggcacggactccatccctcgcctatcagtaccgtattcaaaaaagtgttttggcctcaagccatcgccaagaattgcaaatataccggaataaattgcatcccgccatactacttgatgaatacttccggattgatccggtcgtatggaaacaagaccttccctttattgaaaaaatcgatcattatttaaaagcgtttggtttccccaatgaaccggttccggcacctgagcgtagttttgaactggtacaagatgaaaaatggattgtcgaaaagggaggaaaagaagttttagaacggattggtctttatgaacggttacaaattattccggtttcagaaccgttaatgtttgcggttaatccgggacaaattcataaagagaaccaattccatcttattgttgaaaataaaacgacgtatcaaggattgttgccggccctcgtggataccgaattttcaaccttaatttatggtagcggcaaagtaattattaaaagcattgaacaatttcccgctcaatatccggtcgaagccaatcatgagtttttttattttggcgaccttgaccgagaaggtgtgtctatttggtactcgttaacgaagcgacaatcggtaaaattagcattgccgttttacattgcctgtttagcccaagaaccggtaaaaggaaaaggttaccaattagaaaatcgagaagcattacaagcttttttaacaaatttttctaaactccatcaagacaaaattcaaaaattattacgactgggaacttattatccgcaagaaatactaaaatcgaaacaattgcaagcgatttggagggaatctgattggaaagccttgatctaa

SEQ ID NO: 52465 - DNA, 1596 bp, Bacillus cereus 03BB108
ttgagtacgaacattgaagccatgctagaaggttttaatgagcgaatgaagcatatagcgatgttttcgcccatcctgcgattagaacaaccagtgaagtttaaagaattgcctatccctacggttgctctctatatacttctttatatgctcgaaaacaaactagcatttaataaaaacacgacaaaagaagaattgcaatatgtcattttagatgtggtccgacaatattggaataaaggttttactaaagcagaagcagacgagctcgaagattggttggtttccaaaaatcttcgaaacagagggaaagcacacacatttacgtattatgattttgataaaagagaagacaaaacttattattttcatctaattgaatatggagaaggaacgaacgtttttagtgatgcagaagatagcttagacgatttcacactaacttcaatgggattggagctgctattcaaaactaaagaagtatttggagaacttcgaatcactatttcccaattattcttcaaacgacaatttgaaaagggacttttcacggatgctttaaggagagttcacgaaatgcatactttgatagaagatgaaaaaaagaagataaaaaaattacaaaacactattatcaaagatgctcttggtgtttctcaacgttctgaacttgaagtcatgataaaaagaattgatgaaaccttaaaggcagaaagagaacaatttaatgatttgaaaaacttagtagaagaaaaaattgatgaattctatgaaggtagcttaacagaaaaagaacaagaaggaatccatataatccaagaaattgaagggaaattagttcaagcaattagtgtgcatgaatccttatttactgaaaaacaaaaaacacaaaatattatgagtgaatcacttgaatcttccattattcacgcgttttcagttcatttagattttgaacaagaaatactaagggaactagtagaaacccctgctacagaagaagtattaaatgctatttctaaaccatttctacctttgaggcatcataaatcgtttaatccgctacttgcattagttcctcaaaagagatacaagaaaaaacaactaaaagaagaagaaattgttgaagtagatgaagaaaaaatgaggttgcaagaggaagaagaagctaggaaaaaggaagaaatcgaaaacaaagaatatcgatatataactgccttattgaaacacttggttgagaaggacaagtatctattaagtgatattttccaaatgattgaaactcaagatgaacgtctttatgaggatattctctacaatccagatccactgctaggattaattgcagaactacatcagtccgaatacaatcgttttgaaaaagtgacttcagatgtgtggaagaacctcccggatgataaaaagattaatagaatgttaataagactatcaagtgaatttgtaacattacaagagatagaatcctttagtttattagaaacaggtaggtctcactatatcggaactatgaaatacaaggatatgttaattacaaggggtgacttttatggagtggacagaagaaatcgtaagtaa

SEQ ID NO: 52466 - DNA, 753 bp, Bacillus cereus 03BB108; identical to SEQ ID NO: 51820

SEQ ID NO: 52467 - DNA, 4374 bp, Bacillus cereus 03BB108; identical to SEQ ID NO: 51821

SEQ ID NO: 52468 - DNA, 1077 bp, Bacillus cereus 03BB108; identical to SEQ ID NO: 51822

SEQ ID NO: 52469 - DNA, 1608 bp, Desulfitobacterium hafniense
atgagcgtagaccttgattttttggaaggctttgaaaaaagaatgcggatcgttgccgcagtggattccatcgtcaaccgtactaatcgcagaatggatctggagcggttattcagcgcaggtcagctggataatctgattttttccgtgctggtttttattatggaacggaccttggcggaagatgaggaatgcactctggagagcattactctgttcctgcgccggattctgcccgcttatggggtggaattgcccggcgatggaatccggcaggtggcggagtatatcattaaagatatactgcagaacggcggagaagcccgctattaccccattatgtcctatgggcaggggatgagcgagaccagaatccgtctggtggaggacaaactccaggatggcgataaaggctacattattacctaccagcttaccgaccaagggtatgatctgctcttccggaccaaagaagtggagcaggaaatcagttttaccatcgaagagctgaagctccgggaattgatcaaacgcaaaaattataaaaaggccatctcccaaagcagcagcctgatccagatggtcaggcagaagaagaacgatctccggcagtttatggagaagattcggggcaatatctatgaggtggatatctgggagtacgagaaactgaccgccagtacctatgccctgctggaagaagagtatgggatgatgaaagagattctgggcatgatcaccctttctgaggaacgcttaagagaagaggaacaggccagaggggatctggacgaagagatgagaaaagcccggcgggaaattgccctgatccgccgcaatatccacaccacgattaatgagcagcgggagctgattgtggaccggcaccggctggccgccctctataaggataccttggaggattcctttatgctggcccgcagcaaaaaattcaactttgaacaggaaatcctgcagagactggaacagtgtgatgaacggcatatccccttgctctggcagctgttcaaccctttatttaagcccaacccggagcggaccttaaatatcttcagcttattcgaggctcagagccgtttaaggcaggaggaaccggggggagacgagatcgagattgaggaactaagagaagatcgggagcgcctcaaggtggaagaaatcaatggcttgaataccgcattgattcggttcatcctggaatttgcagcccggcataaggaggggttccgtctcagccaactcctcggcgaacttaaacatcaggcggagctctaccggcggctggtggaaggggatctcctttttcataccttgcttaagctctacgattttggtccgctgcagattcgggaatggaaagaagaagcccatgaagtcgtggccaaccccaccggggaactggatttggatttctgcctgatgggtatcgcctacactgatccggatctgttcggggtggcaagcctgcagctgttcaaaccggacgaggcaatcattaaggaagagattctcctgagtcagggtgaagagcacttcagcaaatcaattcaaatcagtgatttcttgtttgtggtggaggtaacatga

SEQ ID NO: 52470 - DNA, 738 bp, Desulfitobacterium hafniense
atgagcagtttcaacacagcccttaaactattgaaaaagttattggaaaaaggtcaggtggaccgggagacggacagcgaccttttcctggaattccgcaacccggaggtgcggcaggctctggcggagatggaggaggagctggactttcaaattattgaggcttccagcactttgtacctggttccggccgggggcaatagtcttttgggattcaccagcaaggaccttcgggaatgggtgtcctccgatgcccgtttggctgatgcctatctgctgacgtatatcgggatgtttatctttttcctcttttacggcggcaaaaatcaaaaccccaaacaacgggaatttttgcgcctcagtaaattgctggaggaactggatcagcgttttgcggccctgacccttgatggggagcaggccttggccctggaagaaaagtattccctgaattttatcgggattgccggactgtgggagagcaagcaggggtatgaggagaagagccggaagaccaaagccggaacggtgcttaatgtctggcggcttctggaacgggaaggtctgatccggattctggataacgaacgggagatccggcctacccggaagctggatgacctgatgctgaattattacttaaatgacaaccgggtcgcggagatcatcggcctatttcagggaggtgaagagtatgccgctcctcaaccgcatccggattatcaacttctcctataa

SEQ ID NO: 52471 - DNA, 4449 bp, Desulfitobacterium hafniense
atgccgctcctcaaccgcatccggattatcaacttctcctataataatgatacccggctcattatggatgaatgctttgacttccatggcggtgaaagtgctctcctgaatctggccaatggcggcgggaaaagcgttttggtccagctttttctccagcccatcgtacccgaggtgcggattcaggggcgcaaaatggctggtttcttccgcaaacagaagcagcccaccttcatcctcctggagtggaaactggacggaggcggcggttatctgcttaccggcatgggcatcgtcccggcccaggccgccacgggggaagaaatcagcgggaaaatccgctacttcacctttacctgcaaatatcacggcgccaatgcctttgatatccgccatatccccctggccgagaaaaaagaaaatcttctgcacctgctttctttccgggaagcccgggagctgatgcgggacaagcaacaaaaggacccctatctcttcgggtatttccctcaggatgagggggctgattacggccgccatctggcggaattcggaatcattcaggatgaatggcgcaatgtgatcgccaagatcaatgacagtgaaggcggtatcgacgaaatctttcaaaagtataaaacctccggccagcttttggatgaatggatcattaaaaacatcgaaaaatctatgtccaaagaccaggccgagctgcaccggctggaagacatgctggaaaaactggttcaggaagtggcggagaatgaaagctacctgttggaaagggaagtgttggccggttttctcaaggtctatgctgagcaaagcaagggcttagccactttgctggaagggttggagcagcaaagagaactgggagaaaagctgaccgcacttcacggatacctcaggcaccagggggaggggctggtgcagaagcaagaggagaatgaccaggcccaagccttcacccgccgggaagagcaacggatcgagctggaggagcggtcccaggattatctgctgaaaaagaacgcccatatacggtcccaggaacttttgcagggagtgcaggaacgcctgcagtcgacggaggagcgtttggctgaggcccaggccgctgagaaaatccagcaggccgccaggctgtggggggatatccggcataaggaggggaaacgctccggaattgaggaaatcctcaccgcccgccaaaccgactttgatcaggaccggcggattggtgaactggaatatacattgaaaaccctcctggaaaaggaacaggcgaacctggcggaagaggaccggcgtttgcagggggagcagactcaagggaaggcctccttacaggaggctcaacaattccttaaggatgccgaaagccggcaaagggccctggcccaggaaaaaggccgcttgtctgagcggaaaaaacagctggaagatcagaacggggcggccctgaaaaaattaaatcttcagctgcgccgcaatatcctgggagaattgaaccaggccgagacggagaagattaaaagcaggctggatcaagacctggctgatcagcaaaggatcgaaaaacagttgaccacggaatatgccgccaatgttcaagtcatcaccggactggagggggaaagccgcagcctgcaaacccggcagacggaagaaaacaacaccctcctgagtcttcggcgggatatccgggagtatgaggagcgggaagccgaggtcaaaagcatagttacccgctatgatctggactcggaatggttgtttcagcgggagcgcctggatcaggtcttcgggcaaaagattcaggatttagctgaccgggtggagcaggcgggaatcacttggcatgaggctcaggagaatctcctttcccttaaaagcggccgtctccacgtgccggcggaggttgcggccttattggctgaagccggtatccaatatgataccggtgaggcttatttgcgcggtttatctccggaattaagcgctaaaatgctccggagcaatccccttttaccctatgcttttatcctttcccgccaggatttgcagcagatctccgcgacgctggagagcctgaccctgagccggatcatcccttttatcccttacgaagatcttaatctgaccatggtcagcaacggacgactggttcaaggcgaatcaggagtcactctggcctgtctttatgaaggacgggtttttgaacggagtgccatggccaaactggtgggggaactggaggagaaaagcgttcaggcttccagagaaagagagcattatagcgaggaacaccggcgagtggtatccgaccaagcggtctgtgccaagttcacctatccggcggatcaccgctataatctgggacgggcggaacaggaagcagaagtccggttgtccggcttaatcgggcagctcgctcaggccagtcaaaaaatatccggcttgcaggagcggaatgaaacgattaatcgtgaactgagaagaaaccagagtgaacaggctacggcccagacgaaaatcgagctgttccgggaatttttgcttaaagaagcggagtatcaggaatgtggcaaagagctgatcaaggtcggggatgagctgcagaaactggaggcccggaagaatcactgggcggaggagcaggagaggcttcggggaaaactagcggaaatcagtcgggaactttggcagaatgacgacactctgcagaagattctcaagcaatatgagctttatcgccagtccccggtggcccccctggttgcaggaagcctggaagaactgaccgccaggctccaggcactcaagtcccagtatggctcggaactggaacagctggagcagcaaaagcgggagcttaccatggatatccagcagctgaagggggaactcaggaagctgaagctccagctccaggaggaagagtatgcttccgttccataccgtgaagagaaggccgatggactgagggcagaaatcgaggatctggcgagtgcggtcaaggggctccgccctcaggaaataaaagcagcgagggaagaggcagcggcgaaaaccgccctggatatggctttgactgaagttaagcgtctgggctgggaaaaccccctgggtccggaagaaatatccggggatttccccctgcggcgcaggcaagcccaaaagcgcctgcaggaattggggcaagaaagccgcgaactgcaaagagaaaagactctgtatgaacggttgcaggaccaaattgatcagactctggatacccagggcttgaaagccgcccctgatttcaggccgggggaggatctggaagcccagaccaaggaccttcagcagggttaccgacagcaggaccgacagaaccgccaggatgtccgcagtctgcgcaacagctatggccgccttaaggaggattaccgggagaagaatctgaacatcgacactatcttccgggccctggatcatctctgggaggatgcccagggggaagaggatgaaggaggccgggggctgctttcctttgaccgcttttacttccttttcgaaagtgtgagcatccatcaggagaagcttgccgacctgctccaggtttatgagctccaattggccaatctggagcggaataaaaaggatatggtggagcagagtttcctccatggcctgcgcatctgcgaagagattcaatggatctcggatcattcccggattcgtctgcaagggcgcagccggccggtgcaaatgctgaagatcgacctggtgaccgacagcagtgagaacgccagagagcggatgcagcactatattgaggccgggatcgaaaaagtccgtcaggaaattcggcagaataagcggccggaggagatccgcaaaagcgtgatcaagctcatgtccagccgggaactgctgaatacctatctgggcaattcccatattccggtcagcgtctataaaattgacctcaatccccagaacagcgggctgaaactctgggaagacgccgcccaccagaattccggcggggagaagttcgtggtgtttttctccgtcctctccgccttgatgagctatgcccgcaccagggctatggaaaacctcggcggcgtcgcggagaaagaaagcagcagtgttttgattatggataatccctttgggccgatttcttccgagcatctgctgaatcccctctttgagattgcccggaagcatcgtactcagctgatctgtctctccgatcttaagcaaaactccattatgaattgcttcaacctgatctacatgctgaaaatccgcaccacggccctgggcaacaaagaatacctcaagttcgaagaaattatccgggactccgctgatttccaggaggacgagagattggaaaaggcggtattcagaagcgaagtccggcagatatctatgtttggggaagaataa

SEQ ID NO: 52472 - DNA, 1059 bp, Desulfitobacterium hafniense
atgccgaaacagacttctgccgacagattaagccaatgggcgaaaaggagaagcggtattaccgtacttgaactccagaagcttctagaggagccggattatccttcttttcatcagttggtgaccgaactgctggccgagggcaggctcattcccattaaggcctcaggtctgaacggacgggtgccgtccttagccaataaataccggatcattcaaccccgggaggattatggggagtgtctggaaccgatccggagtctggagcctaccctgaatatcgctgcttatctgcaaaagccccactattatgtccggcatcaggagattctggagggcttaagccggtacctttggtatcaggcccacctcttggaacagcccatgtcccgcaaagagcgttccttttccatctggggcaaagagaaactgatcgatgaacaattttcactgctctgggaagtgttccggtttaacaggctgccggaaaacttcctgaattattacgatacccccgagcccttttttgagtatgttcatgggggcgtcctaccaaggactttgctggtgattgagaataaggacacctggtttactctgcggaagctcatgcgggaaaccgggaaaaaccgtctggccggtatttccgtccaggttctgatctatggtgaagggaataaggtcaccaagcccaaagccctggagaattacgctcaggaaatgttcggcagggaagttctgaccgagggagagttcctgtatttcggcgatctggatcatgaaggaatacagctttttttccgtacacagagagaaaaccccaaacttaaactcaggccctttcaggctctttaccggaagatgctggacttggccgcagaaagagaactgcagcccagccccgatgggcgtaacatcactgttcgagttcgggaattcacacgtttgctgggcctggatccggatgaggataaggataaactggcctttttgctccggggagattatattccccaggaaatcctgaattatcaggtgctggcggcactgttggaataa

SEQ ID NO: 52473 - DNA, 1593 bp, Syntrophaceticus schinkii
atgtctgccgtaacagctgaagacaagatggccgccccgggtgtttttactatggcacgggaattcccgtgctttgacggcttgaatgaacgcatcgccgctctcatggaggtctttcccctttacgacctgatgtccaagagtacactgcggggatactgcggctttgaaatgggtgtctgcctgctgctttatattatggaaaaaatgctccactacgatccctgcacttatgaggatgcgaaagatttcatttccggtatccttcccttgtttgccggcacaagcccctcacttgaggagcttgaacaggtcacagagaagctgttaaacgagctttccaactacgggcgcaactttgaatacgaataccacgatcccatagaagggaaaaatcgccaggtgaagtttcgcctgctggtgcaggagcccttcagcttgccggacagggataccattaaactccgcctgtccagagaagggttggatattatctttaagtccagggagatctaccaggacctgcgcttttctgtgatgcagttctatttggatcagcagatccgcaggggtacctttgagggcgcactggagaccgttaaggaacttggtgtcgccgtaacaaacatggagcaggaactggtttccctgcgccaggagatccgccgcaatgtggtggaggctctggataagccgaattacaggcggatgctcaacaggatgacacagcagctgcaccgggagcgagaaacatttgataatctgattaaactggtacgggaaacacttcaaaacctggatcaggcaagtcattcccggggcagcaccaaactggagaatgtcggtttcctggaacaggagctgtaccgggtcgcccagagccatctgaagctctttaaccatcaactggagctgaacaccctcactgaagatgccttgatgtccagcctgcgcagcacactgatggtgcgttttcacctggaaaaggaactgatggctgaggtcctgcgctgcagcccaccaggtgaagttgttgccagaacagcggtactccccctgctgcagccgcgctcgccccgcattctggatctggccaccttcctcaggccgcagaccctcctcagccgggagcgggagcgccccccggaggagttttttgatgagatcgatttagatgaggaaatacgcctgcaggagatggaaaaggagcggcaccagcggaccatagagctgctgcagcggatttttcggctgctgctcacccctctggtaaaaagaagcaggatatcattgagcgagatcgctgctttgctcgatgagaacgactggtcccgggaagaaatggcagccttcgtttataccgccctccttctgcaccaggcgaaaaaaatccaggcgcggctgccctgggaatatacacccggggacactgaccttttggagtttgcccttttccgtttgctgcagcaggataaagaactggcatcactgggcgatgtttcggtagctgccggcgaaggcactgtcgacctgccctatgaaatgaatgtttcgaacttgatattactcaagcatggtgaccaagcatggtga

SEQ ID NO: 52474 - DNA, 738 bp, Syntrophaceticus schinkii
atgaactataagagcagcacagtggaaacagccctcttgctgctgcgggagttgttgacacacccggttgtgaacaaagaaaacaactcaggcctgctcatgcggatccagctggatcccgaagtatgggggctctggcaggaggttatggagccgacttttggtgtcacactgctgaaagccggtgatcaatactacctctccaccgggattgaagaaagcattttcagctataccaatgctgaactgagaaccagcctgggggtgagggacaatactgagctttacacctgctcctttattgtgctcacactgctggcggtcttttttaacagtgatgacacaacaggcccctccatggattatattactttaactgacctggagcgtcaggttacacaaaacttcgaaaccctggctaaaagagaggatatcgaagagctggagaaccgctccagggtcaaccttgctgagccggcgcgattctggctggacctctcggtcaagaagccgggggcggtacatgacaaaagaaccatctctcgctggggttaccttttaaagaccctggactttttggaagagcaccggctggtgcgggtgattcaggagcgccaggtttttccgcagcagcgcctcagcagtatggttgctcactactataatcacagggatcacaagaatatgattctggaattgatcatggaacacgggggtgaagaggatgccgcggattag

SEQ ID NO: 52475 - DNA, 4464 bp, Syntrophaceticus schinkii
atgccgcggattagccgtgtgcgtctgcacaacatccgttacggcaaggagaggagggtgctggacaacctcatttttgacctgcgggggaggtccagcctgcttatcctggaaaatgggggtggcaagacactgatcctgcagctcatctcccaggtggtctgtcccaatgcccccctgggcaaaaggcgcctggccacattggtgcgcagcaacccttttaccggccatgtgctggtggaatggcagcttgatgcggacaccccggcctatatcttgacgggtttctgctttgcggaaaacaccgggagcgccaaccgcgatatggactacttcaactatctcagtgcctgggagtacagccggcctcattcctgggacctggaatcactcccattggtggacgaagacgggcgcacactgaactatcgtgaactccaggagaggctgcgcagttcagggcagttccgcatttttagttctgaccggcggcgggaataccagagggatctgcgaacctataacatcaatcccgaggagtgggagcgcgtcctggagaccaactcagatgagggaggagtgggcaagttctttgaatactgcagcaagacacgctcccttttggagaagcttttcatcccggccatcgacgacatactggggcgcggcagcagcggtactgaagatgacctgacccgcagcttccagcaggcctccgctgagctgatgcaccttccggagtttcagtcccatatgcagtccctcaataagctgggggagcggattggggtgatgcaggaggcgctttccggtgtaaagggtgctgcaggagaggttgaggcagccagaactgcccgccagtctcttttcaatactctggtcaggggtcttcccaggctggcggatgaacagagggagctagcggaaaggctgcagaaaaaccaggatagagtgagggagatccagtacctgcttgcttcagtaaaatgcgaaaccctcaggcgcagcctggatgccttacaaaatgaattgaataaaaaggagagggaaaaggatgcagcccgccgctgcctggaagatactgaagggaattataacaggctgaaggcctggcgcttctgtgaaagctggctggaaaaagatcatctcctcaaacaagaggaagccgcccagcaaaggctgcttcaggggcacgaatcggtggccaaagagatcgactcccttgggcttcagctgtggccgctgctttgtacggtggggcgggaagttgaggcccagacaactgcagaggagaagcagctagatgtcttacagcaggaaatgagaaaggcttcggatgccgaacgtgagttaaacgagaaaatgcagtcaaatttataccggcagacgcggcttgaagtgaagagcgaagggtttgccaaaaggcgcactgaactggcaggttcactgcatgatgtgggtatagaaacagatctgtcatcaccggaaaaggcggaaggcctgctaaatgatgcactcaagggcctggaaaggaaaattgaagagctggcagaagccattcggaaatccaacagccggctcgatgaatgctccacccagatcaatatactttccggacggaagggggagctggacaaggggcggaaagacctattgatggcaagagaaaggtggcaagaggatgtggaccggctgcgggaactgctggctctggcaggtttggagtggcttttctctcccgaggacttcgccgctctgcagggggaactggaggtgtgcaggcagcagagccagcagtctttggtggacttggaattgcagatgaaccgccttcaagagcggcagagcctcctcggcggagaggcgggggccgttcccaacaatgatattctgctcttaaaggatacactgagcagccagggtgtggataccattaccggtgccttgtttttacgaaacctgcctggcagcgaggaacggaaacaactgatcaggcgctacccctggctcccctatgcactgatcgccgaacaggggcagctgcagcgcattataaggcgctctccggaattaagggttgatttgagtgcagcggttcctgtggcagcccgcagcagcatcgaactgtcacctgaggagcaggcaaatgatgccctcctctgctttttccacaaccaggggatggagccctttgttataccggagaggcttgatgacatcctttaccggctggaagagcaactggaacagcttaaagagaagcgaaaggacgaagagggtagaaacgagcagattcggcgtgcatccattgtgctggccaatctgctgaccaactacgaataccagactgctgaagagtgggaacagcggcttaaagatgcagaaaacgctcttcaaggagtgtgtgatgacctggaggccgcaaaggaacaagaacggcgtattaaggagcaactggagattgcgcgtaccgaaaaaagcaaggcagaccagcacctgattgagctccgcaattttaggaaaccccttgaaaaataccgcttggagttccaggaggaagatgcccgaaaagccgaaatggtgaggcttcagcagaccctgacagcgatggaggcagagcttgagctttgtaaaaccaggaaagagaagttggacagggagattaaggacctgcaagagcagaacagggcaactcttgataaattgaacaggctggaaaaagacaataaagatttttacccatccacctgggattacccggaagagcttatacctaagggggtatcctgggaggattacagagaaacagcagagaacctgagggcgagaaaagaatccctgaatcgggaggttgccagccttaaagatgtggataggctgattactggatacaagaaggacctggaagacctccagggatacatcaagggtacagggcttgattttgcagaagtgaaaaactcctaccgcccggtacgcaagcaggagttggacgtctgtggccgcgaggtaaaggcctatcaagatgccttccaaaaggctgacaaagccttccgtagtgctgaggtgcttacaggaaaggaagaaggtgcctgggaaatcgagtgcagcaatgttgtggataggcaccggcatgaacccgcagaactgaagggtattgacctggaaggctacagcaagaagttgaatgaagaaaaagaagaagtcagcggaaggattgtaaaacagggtgaaaagttggacttgctcggtcggctgcagcaggagtaccggattcaggttgaggacttgacagcggtcggccttgagctgacagatgaccccggctgggagacagagagagaattaaaggagctaacatgtgatgccggggcaccgcgccgcgcaataagaagggaaatggaggcagtagataaggccttacaaagattggctgaaagtcatgacgcatggcaccaggtggtggattcctgccggcaggagctggaggtgctcaacaacctggacatcagacatctattcaaacagctcaaagacagaaccatggtggagggctgggaaaaggatgccctttcagtacaagaaagcctctgccatgtggggcgggtgatctccaaatcccaggaggagctggagcggcgcttaaaagacctggatagaataaaggaagaaatcgcggaacgcgcctacagccatgtggataatattctggaacagctgaaaacactgcagaggatgtcccgggtagaacttcggggcagcagcattccgctgatggagatcgatctgcgccctcccaacgaagatgaggggaaggaactggtgcgcagctatcttgcggatgtgatcgcaagtgctgttcagcgcagacaggagggggaaagcgaagacgatctgcagcagtacctggagggggcggtgcgctccgcagctctggtggaacagctggtaccccttgatgggatcaaactcactgtgctcaaaccccgcgcagatgaccagccctatcagagttcagattatgaccgctgggaaaacctgaccttctggtccggggcacagaagtatatcgggcgctttgcggtttttgtagcattgatggcttacttgcgcgaaaagagaaagaaggagcagcgggagcagcgcaccagcgtgatcatcgccgacaaccccttcggagaggcctccagcgggcacatcctggaaatcctcaaagccttgacacagcaggcgggagtacagctcttctgtgttacagcacaccgccagacaggcatcatgaaagacttcccggtgatctacagcctggtgtccaggcccaccctcagcggccagcagcgcatggtcatcgatcccgaaaaaatacccgcaccaggagccatggaagccgcccgcggcatgatcaacgataccgataacccatcctggaagatggatatcgatgggcagttgaagctgttttag

SEQ ID NO: 52476 - DNA, 867 bp, Syntrophaceticus schinkii
atgtgttacaatacaaacaaactattttcaggtgatatccctatgaaaatgcaggattacatctgcaaggttatcgacagcttcccccgcaagatgctcaaatgggacaccgatatccgcgacccggtagccaggaggttcgcctccagatgggaggatgccgggggatatgaggcatttgcagcagcgataaataacctggtggaggagaaggttttaagtccggtgaaaaaatcgggcttaaacgggctttccccaccccttgccctgcgctaccggaaactgcctctccaggagggggattattcagcagcaaaggaagagatattgagcttttactgctcacgcatggatctctcttcatttttgaactcacctcaagattatgacaggcaccgggatatactgatggccatagatcattttctgatagaagccgaaaataaccccccggcagtatgggatacagtcaatgagcggtcttttgccttgacaggtcatgaaaagttcctgtcatcacacaaaggcaatcaactcctgaaacggatcaagatcactttacaggacctgtgctgtgtgccggcgccggaacccttcttcttctgggctaccgccttgcctcttctgcctgaagaaagggcgcactgtcttgttgtggaaaataaagacaccttccactcactaaaatacctcctcggtgcaggaaaactcaaaacaaacccagagatacacctgcttatttatggtgaaggaaaaaagatattaaacagctggtcctttatctatgagtgtctgccgggggcggcgggttaccaattcttctatttcggggacctgggacccggaggggctaggtatttgcgctga

SEQ ID NO: 52477 - DNA, 1509 bp, Paenibacillus sp. IHBB 10380
atgaattggtcggattttggtgaacggaataaacggctcaatcccttgtggaacttgggagcgggtatgaaccttggcgagttgcaaccatataaagagatggtggcattgagcgtcttgctgcaagtctattatctggaactagaatccaatgagagaagatccaaggatgatattatagtcctagcctggacagcgctagagcactttaacatcgcaaatcttgggacgacagaatatgtagagcgtctcgtggacggtctattgtggagcgggaatggcggggattttgaatcgttttattatgacgatgcgtcccgacaaatgttggtgcagaagtataagtacttcacagtggatgaggatgccacgcgaagcagctgggaagagagtggtagaacgatctaccggctctctgaatacgctatggagcttatttttatgagccatgaaattattgaagaattccagatcagcattaaattgctcgagattcaaatgcatattaagcatggacgcgtgacgagggcactccaagatgtgaatgaacttatctcccgagtccgtaaaatgacacagcaacagcaggaataccggaatgctcttcgccgtaacccgaagcatatttttagcgaatacggggtgaagcggcatcaacggctagaggaaatccatcagcagtttgatgaagaacgcaaacattttgataatattcaccgctcactggcccggctggctaatgatgagaaggatgttattgactttaatgagatccgcatgctctctgaacgggtcgagctctctagacgagtgcacgataagttagctgaggtcgtattaaatatttttgaggtcgagaccaatttaagattgaatttccctgaattattctggggagccgtaggctttaacttccgtacaagtgtatgggaggaatgggtgaaagaagaaggcttgccaagtggcgatagcttggaaattttgatcagcgggttgttctcgccgaatcaggacttcgtctacccactcccatgggcttgggaagaacaggatgttggttttgtctcagaattattgatggatgagtcggaagaagataaggatgcccagtccgttcaatatgttcctaagggtattccttggacggaagtgactgatctgtggagacccatcttcaaggctttggcagaacgtgggagcttcaccttctgtgcagatgcctttaccatagaggaactagaaggatgggctcgaacaccgaatgcggtggacttatgggtgcagttttttcatacagagattactgttcaggaacaagttgaagagggtggcaaagggtcagatgaatgccagatgctgatccagaacctgctcgctagtgatcccgaattggcgggcttgcgtggcaagaagctgcggacgaccattatttcgtctgagcagaccgaacgggttcgctgtgctggcctggatatgagtccatataccattacaatagtagagaggtga

SEQ ID NO: 52478 - DNA, 759 bp, Paenibacillus sp. IHBB 10380
atgagttattcgttagaacaattgcagcaagcctcacggctattctttgaactgcttcgcaagaaagtgataccgctcgatgatcctgtggttgcagaatgccttcaggatgcgggagcctatgatgcacttaagtatgtcgccaaagaaggtggttgccgggtgatgaattctggacatcgcatccatttgctagtcaatccgctcggttcggtattcgctactaatttcacacagctgaagaacaaatattcacgtattgagcgcaagacgcatttacatacgatcaatattatcatccttgtctttctggctgagattgatcaggacgagacaaatttcaagtccggacaggacagtatgtcctatattcaaattgctgatcaggtatcgtcactttttcaagcatggttccagatggatgtggatggtcggttcagtgggcagtggcagttggatattcaagcgatgtacaaggtgtggagcagtctgtatatgcagacaaagagccaggaggagagcgatcttctatcgaggggatctaattcacgcatcggactgattcatgaagggatgaagcttctcgaagaagagaagctggtgctcatctcagatacggagaagcggatcttcccaagggaagagttgtacgagagaatgcggtatttatatcatgatgtcgaccgatatcaggaattgaaaggcttgatcggacgaactttagctgagaaagacggtggaaccgatgccacggattga

SEQ ID NO: 52479 - DNA, 4482 bp, Paenibacillus sp. IHBB 10380
atgccacggattgaacgaatacgcattaccgggctcaagtatgagaagatgctcaagaaatacgatgatctgatccttgacctctgcaacgaggaaggtccagccaatacgttgattacgctgatgaacggtggcgggaagggcgtacttttgcaagcgatctttcagctgcttatgcccaagacgccatggggaaaagatagtgagaatcaagttgaggcgttctttcataatcataaaagacagttgaaaccttatacctttcacgtagcgattgagtggcatctcgacaacagtgagcgcaatgaatatatgacgaccggcatagcgatgacggcgcataactcgcttgatcagcaggatatcaaagtagactacttactgtatgcactcatggattatgaggaagggtcagagcttacactttcgactttgccattgttcgacgagacgactgctgagccgactagctttgagacgattcagcaattgatacgcgagcggcgcaatgagattgtaccattcggtagtcatagttctgatatgaagagatattatgatttcttagccgtccgggatatccatattgccgagtggcgcaatatgcgtcggattaatggggaagaggggggaataaagggttatttcaaaaagaatgatgcttttacgaaccataacgtattcgaaaaactaatcattccggaaatcggctcgagcttgaatgaggggctaagggaagacgataataccttacagcggatgtttatcgatgcggcaacggttgcccagcgactaccgatgctggaacagagggaacaggcatatacagagtttctcgggatggctgctcctctctatgagaaggtgaagctgggaatggaggcggagcgaatttacaaggaaacccttctacttgggcgccagatctacacggttattcatgatgagcagagaaatgctgaaggtgatcgtagcaagattgcgaatgaattggttgggcattatcaggaagcgaagcagattcgctttgagacggacaacctaaaatatcttcgtagtaaggaagaatgggattataaacaacaggaattcaagagcttaagcgatgatcaggcgcgagcacgctctcggttagatgattccaaggcgctggagaagaagtatgaaatggatcattatatggctaagcgcatgtccaagactggacaaattgaacaattgcagaaggagattcaggcgattgaaggctctctggagatgaaagaaagtcaggagggtattcaggctgcgaaggaagagcttcgtaagcagtgggatgtggtgttccacctctggcaacagacgttctctagcttcaagactgctcatcaatcactgacggttgaagaagtgggactacgtcaggtgcgagagggatttcttagtgaagcaggcgggttggattatcaaatcaatgaactcacagcatccattcggcggtatacagaggatatgggagcagtcgtatctcagtatggaacggaagccgctaatgcgccagtaacggcacttcaacgaacggaaacaactgtcagaagtattttggataccatcgtcagcttggtggaacagcgtaaggaggctgaactccatagaagacagcatgagaagacagatgccgagctgagtgagaagcgtcgcaattatgagcgagacgcggttgagcttaatagcctgctcgatgtgcagagtcgtaaagagtcgcagatctggtcaaagcttgtcacgtacttgcaaatgtttgaggaacataatcttctggggactacaggcctctttgaagagaagggtgccatttcggaacgctttattcgcaaaatagatgaagtagagcaccagatcaaacggtctagacgtgattattacaatctactgctggatgtggagcttcaaacgcaaagctactggctaccgaatttagatgttctagcggtgaaggatgcgctcgacgcacttaaaattgtatcaacaccagggagttcctacttgaatgaccgtccttttatagagcgggaggaagaactggagcgccatccacttcttccttatggtctgatcttaactagacgtgaagctgacagaatccaacctgagatgttgaaagatacactcttaaaatcagcggtgccgctatttatccgtgaggagatggcagttgttgaccaggagtctttcttactgttaactaaccaaggatcacaaatggtcctgcagcctgaccgctttctggagtggagaaatgggattcaagcaaagctcaaggagcaggaacaggagcttaaggataaggaagcatatttgtcgaatttaaagtcagctcgtcaagaattcgagcggttattccaagcggataactctatgacttttaaagctgagctgagtaacctggcactcctccagaaagaactacagcataacattagcaatctaaatgctgaaatggaggagaatgagagcactattgctcggattagcagggagcatgcggaagaagaactcctgaaggaagatcatgagcaaagagaagtagccctacgtgaatgggtggagcggacaaagcagcaagaattgaattataaggaaaagcaagaattagtgaagcgaaagagtctgttagataaggaaatctcgaataaaaatcagcaactggaagaactcaaagcgcaaatggtgagtatcaatgaacaacgtgagaaatggacgggtgagacaaaatacttacttttcccaagattacagaacttgttccctgagattgcctttcctgcagattaccttgtaactggcaatgagagcgaagtcggaatagatcctgacgcacagaacattctgcttcagcagctcagtatcgttgaaagtctgcagcaatcactcacccagaatgaggtggaaatccgtacaagaacgaaccagatcaaagaagcaagcgagaatctggcggagcttgaagtcagtctgaatcagttggatgtagattggcggaatgcagctgagcccacagatacggctgagtccattatgtctgcaaagattcgtcagaaatcaaatacgacgttgctgcaagaggactaccagcatgttcgtgactccttcacccgttgtcagactgaaatggtcaacctacagaaggagctgcgcaaagctgaaaaagcgatcaaagagaaacatgaacgtgccgtggagttatggaatgatgcgctggatcgtaaggatgacgaaattcaggaacgatcccaaaataacgaacgaatgcttgaccaatgtaaaagagctcaagatcgcattgatgccctccttcagatactatcgaaccagagcaaaattatgaacgcatatattgaggatagggtgaatctgcgtgatgtcccagaagagttgaggctaagtgtaagagaaggctgtgaagcacttgtagcttactggcttcaacggatgaaggtaattcgggctagccgagacgagatttcgagaaaagtgaaggaagagaaaaattcgctaagcagcaggctcgccaagagtggctggaatgctgagctggaaaccaagatccaggatcgcttgaatacgattcactgggaggatttctcgattgcacaacaggtgcttgattccatgctacggagctcacaagatcagattgagagcatacagagcgataaggaagacatggagctctctcgaaaaatgtgggtaggacgtgcctccttgcgagtcgtccagatcgtcgatattatgaagcgcatggaacggcggatgattattcataacgagggcaacttcgccttcccacttgtccggctgaactataagaacatcaacgtaccgaaaacaagcgatgatgtggaaccaatggtgagcgactacttcaatcgttgtatcattgaattactcaaaaagtattcgaagatcgaacaagtgccagcgttggctattagagagttcattaatgatggacgaattgtctatgccgcgctccagaaccggtttccgattcttcaggtgtacaagcctgttacagagaattatttcctctatgctgcaccggaagaataccattattcggactgggaggtcatcaatcgcggtgcgctggatgaggcagtcggtagcggtggacagcgtcaatcggtgcaactactggtagcgatgatgatcatgacccataagcgggtgaaccgtgagaacaaaggctggacggtcttcttatacgataatccttttggagagatggtctcgaataacgtactcgatcctgtgtttgaaatctctaaggcgctcaagttccaatggctaatcgtcacccctccggagctagttaagaatgatgtgagcgtgcgattcggcgtgtactggcaactttactttggtggcaccaaaggggacttgctagaatcgaccctggttaagggaggacggaagattattccggtctcattgttctaa

SEQ ID NO: 52480 - DNA, 1056 bp, Paenibacillus sp. IHBB 10380
atgaaaatcatagagagtcaattcggtgttgtccgccataaaaggcgtaagataaagctagattggctggaaaaagagtttgttcaaaccgtttatacggatcgctctgcctatgaacttgacggagggttcactatccttgcgttcgctatagaggaactgctgacagataactatttgattcctgtgcacgccagtcagaagagctataagcctccttttatacatacagcttactggttaacagaaagtaccccttcgtccggtggttgggatagctcggccatgttaaggatgcaagacctattggatttgcgctattacgataaccatccggaagaacaagtagagaaagtgtggacgagaatagaacaggtctatacttttctgctaaccgtaaaggatcgggaagtcattactagagaagaaagatcgttggagctgtttggtcgggaaaaatggctctctgaacctgaaggagaaggttttcttcggagaatcggactaacgcttactgacttaagagctgtagtggctcgagagccctttgttcactatgtccaacctgccaagacaatagcaataactcttatagtggagaataaatcgtttttccactctgctaaacagttgatgcgacaagggaagacggtatgtggcttatcacccgacatgctgatttatggcgagggttggaagattgacagtagcctactctttctggaggagttggatattgatccgcttcggatcatcttgttctatgtgggggatatggacagagcaggatgggatatatacggcaaactgaagcacagttatcctgatttagatcttagattggcaattcccatttatgagcagatgatggagcataccggaagtacttatacgtatgacacggaacagagctgtaatccgaatcatctgactactgtgctgcaagagttctcggagtatccggaactacgggagttcattgaccaactgctggatgagaaccgtagagtaccgcaggaaatattaaattatgaagtgatggcgaggttgacttaa

SEQ ID NO: 52481 - DNA, 690 bp, Paenibacillus sp. IHBB 10380
atgaaaggagtgatgatgagcttgacggatgaaatgaatgtaaatcctcttaatgtcatgcaggctgtcaaaggaatgttaaccgaagtcgaagagatcgtttttatgaatctcttattctcatcctctgcaacaatacgtgcggggaatttcggattatccaggcgtgaggtggaaaagcaattaaagatcactgatgatcatgagaagttcgattcatttctgaagcgggttaatcaagcagtaagtcggtattttaaagtgatttatgatgagaaaaaggatcaaatcgtcgtcatgatgagagttcctgctaaagctgcacgcagtacattgtctaaagaaagtttagcaatccttttgtttatgttttaccagcaagaagttttacagcatgagtttacactatttgatcagctgttaaatgcccttggacatgagaccacaaaggcaaatcaacgtttgaatctgaatatagaccaactgaaaaaaatcggtgcacttgaagaatatgatacaaattctaatgagaaggcttatgcaattactgcaattggtgcaaacatgttctcggattcatttttgcggcgtactgttgaatttagtcaatccaatcaattaaataaagaagaagtattgaaattcttcaagcgatataatctgtatcaggaagggactgaagaactatga

SEQ ID NO: 52482 - DNA, 3222 bp, Paenibacillus sp. IHBB 10380
atgatcccatggaaaatgtggtttactggcatcagagattatcaacctactatgatggatttgtcaggaaaagaatcgcatatactgataaccggccctaatggagcagggaaatctactgtgacatactgtatgggggtagttctatattcttccaaggtggatattgagggtctgaaatctcgtaatctccttccgaatgatacgtggaaggctcatattcgacttctctttaagaatgagggacgcatgcgcattgatgcccctacttatgttgaatttgcagtttatatcctacaggaaccaggacaaccgactaagaaggaatttgttatacattcgggggatgatccagaacagtgggatgaaacaattaaatatacgtcgggtgatcggcaatacaatttcaccacctacaagaaggatctccagtacaaatataaaattgatccagatttgttctatctgatttggtaccagcaggaggtaaatcagtttgctgttatggatccgcaggagcggtttcgtatttttgccgaaatgcatggtattgatcaggtgcagcgaaattgggaagaaagtatggagcagctgaaggatgtaaatgagagtttaagaacggctgatgtgaatgtagccaataaaaagcaatggctgggtatggcgcgatcagcgctagaacggtatgaagataatcagaaacggcttgtagaaggagggaagctgtacgctggagctttactgaaattagagatttactacaagcaagaacaagtggatttagtagccaaagaagaacaaatgctcgtggatcaggatatcgcgaaggatagactcgggatgttacaggagctaggcgatcgattgaataatgagctaaagcaaatacaagcagaaaaaggacaacttgatacgaaaatcattatattacaggagcaattagctgttgtgaaaaaagaaattgaagaaactacaattgaaattggagaattagatatccagctgaaggagcttaatcaagaaaagtctcaaattacccgtactgaagaagatgttcatcagcagctatcggaaataactaagcagctcaatgaaatgaatatcgagattgaaaaggcggaagctagtcttcaagaatctgaaaatgttatatcgcaattaattgcgtcaagttctcaaatgaatgcgcagattcaacaggataaaggattggatcatatgcacaaggaacggttacggcagtatcgcagcagtcatgatgtacagatggaaattgaccgcttagatcgatcaattccgcaatccaagcaggaacgagaagataaatctagactacttcaagaattatccaatgaaaaacggatgcttgaacaaaatcaattatggtcaactcgtcaaagggaatcactatctttgttcaaagccatgagtgtgcgtgcctatacattaaatgaattagttgaattaaatgagtcagctcgacttatagctgaggaacactttgagacgattaagtatgcgatattctttgatggttcgcacgtaaaagctcctaatgatttgtatcatgttcctttacgaagtataataccggatcgttctgttactgaaattcagacactccaaattcgagtgaagaaaggaattggagatgatgtattcccacatgcggtcaaggctttatggtgggtaaagcaattctttctagcaggtgagatacgaatagagaatgatgtactcatcgactccaaggggattcgaggtccacaagagaagaagagctatatattaagccagaaggctatgctgaaacgtaaagaggaaattcagaagagaattagcgagttgaacatatcgcttgcgaatcttcaagactccatcaaaagtgacacgcagactatgcaagaattacatgccattatccaatccgtgcgtgaatcggaagcctttctcaccaagaaacatgaacgtgagggcaggatcctaaagtatgaatccgagatacagtaccttcaagaacagaaggagcatagtaaggaaataaagacttcgcacacaaagttcattgaggtacgagtcgagctgaagcatatacaaggtatactacagcgtgaatcggatttttatgtgaaattaggtcagcagaaggagcagtttgaaacgttacaacgtaagactcaagagctccacagcttatctatacagcgagatacgttaaagcagcattttgatacagcagaagagctagttgaacaagtagaaggaaatgaacgccgacaacaacgcaaacttttgaataatcaagacgaaattcaacaagcatcgcgtactcttaatcaaattgatattcaaatcaatgatacaaaagaaggtattgatacatctaaaataaatctgcttacggttacagaagaaattgaaaaccttaaaggggtagcgtgttttatttatgatgaggtggacaaagagtttgaacttgaatccaattcctcgaaaaaacaacaatcgcttgcaaagctccgtcaagagcgtgagtctggaaaagttacatttaacagtgctagaaatgagtcaggcattgatcccgcagcacctgaaaattataaagtgattgaagaagaggttcatcgattgcaggatgagtataagcggacaagtttattgtttgaagagaatcaagaacgagctgagaaattgaaagatcagttggagacgacaatcaatatgcgagtccttgaaattcaacagcgatttaagaactacatgagcatttttcaattcgagggacagatcgattggaatcagcaagaggatcgtcgaggtcgagtgcttttccatttattcataaaggctcgcaaggaagggcaccgaggaacattagaggatgtcagtgtgaaggctcgtggaggaagagttggcaaaggtgtttctggcggagaagaatcgctcagttcactactgtttgctctggctttattgcagaatctgcaaacggcacctggatttatagtcatggatgagtttgatagcgcgttagatgagcaaaggaagttaaaggtatttgatctttatgcaggtgaattacaacgtaaattgattatcctgtcgccaaagtcgcatgagcactcttatctggatcgattctcgaaagcgtacattgtgcatcataatcctactgtaccgcgaagtaaagtggcggggttaattttgaaacgtatatga

SEQ ID NO: 52483 - DNA, 1308 bp, Paenibacillus sp. IHBB 10380
gtgcaaaattttgatgatgttgtttcgtttattagccaatcttttttgaaaaaagatgagcagctagagatgccaaggacaataggcgaaacttcacttatagatatagatattgtaaaaagaacagcacgtacgataagaagagtcgggatcattacagttgctcgagagtattcctcaattgttggagccctcccggatcagcagcttttaagttggacagtgggaaaacgtgcctcactagacgataatcaacaaacttttgattggcttcataaaggatggattttgaaagaagttcgttttaaacgcgatgggaaatctgtagaacgaattcagtaccgcatgggctatttattatatgtatatttattaaataagcaaacggatgagcatcgggattttttaaatcaatttacgcaatatcagtcgaatgctgcgcagaaaatggaacaaatcacgtatttacatgacgaacgattacttcagttgaaagatttggcattattcttgtcaggtagtttacaatggagccctaatgatctagaagatcagtatattttcccagcgaattggagtatatctaaacgaatcgacggcttaaactttttattagcatttctcttgatttctagtagcaaagagatatttgattggaaagaaattggcgcgcattactacccgggtattggaggctctaaggcatttgatgcgtataaaatagtgtttcttaacattttggagacgataagtggtcagtcgctggaaacgttagggatgattagtggtggacaaattacttcaatctattttgccggagagcttgaaggaacgtggtcgaattttcgagcaggtcctgtgcatgccttaactaatatttcggtttcacaagaccattattcaactagagcaacaacactctggttagttgagaatcgagccattttgactcggatgtcagcagaacctcatttcttgcaggagacaaattcattgatagtttgtgtagatggtcatcttcgaagtgcgcataaacatttcatcagacaattgttgctgaatagtagtatcgaccaaacgattttttggagcgactatgatgaagctggactgcaaattgcaggagagatgtttcaatcgctcatgggacacgctgtgcggcataaatggatctgtctggatcactcgataataaccaattggtcggagtatcaacagagcatggagagtttactacaagatatgaaatcagaacaagagatcgtgttaggggaggcagatgattggagaagctggatcaaccattaa

SEQ ID NO: 52484 - DNA, 1611 bp, Desulfosporosinus sp. I2
gtggcgacgacaacatttgaatttttggaaggctttgaaaagaggatgcagctggtcgctgcgattgactccattatcaaccgcaccaatcgcaagatggagtttgagcgattgtttgagcctgggcagctggataatattattctttccgtccttgtctttatcatggaaagaaccttaactgaggatgaagagtgtacaatggacagcctcgcccgctttgttgctcagatcctccctgagtattccctagccctgtcccctgaggttgtgcgcaaactgacggaatacatcatcaaggacatcctgcaaaacggaggggaagcgcgctactatcccgtcatgaactacgggaagggtatggaacaactccggattcgtctgatcgatgataagctcatcgacgatcagcggggctatgtgcttaattatcagctgacggatcagggctatgaccttctcttccgaaccaaagaagtggaggaggaaatcagttttacgattgaagaactcaagcttcgggaactgattaagcgcaaaaactacaggaaggccattgggcaaagcgcgaacctggtgcagatgatccggcaaaaaaagaatgatgtccggcagttcgtgcaaaaagttcgggaaaacatttatgaggtaaagatcgaagagtttgaacggcttgtaaccggcacctataccttgcttgaagaggaatacagcatgatgggtgagattcgctccatgattctgctttccgaggagcgccttaaggaagaggaagacctacggggggccttggatgagcagatgattaaagctcgctcagagattggcattatccgtagaaacatcaacctaaccatcagtgagcaaaaggaattgatcatggaacgtctcagcctgtcgagaatttataaggaaaccattgcggattcctttgctctggccagagctcgctattatgactttgagcaggtcatcctcaagcccttggagcaatgcccagaggaaaagctgccctctctctggcagcttcttaatcctttacttcggcctaacccggatcggattctcaacgtgctcagcttgtttgagcgacaagcacgccttaagcaggaagacgaaggcacccccagtatcctcctggaggagctgggagaagatatggaactgcgcaaaatctccaaaatcaatgatcgaaatctggaattgttaggcagtctgttggagtttgctgaccgcaaaagggaatcctttcgcttgagtgaattgatgcaggatcttgagactaaggcagaagtctttaaggaattaacggaggatgatctgattttcaaaaccatgctcaagctctatgatctccaggtgattgatctgagtagatggagggaagagcaagaggaggtagtggccaatgctacaggcgagctggatgtcagctattgtttgtaccgcctggaatatgtccacccggacttatttggaattaagagaatcgagatcagcaaacctgatgaagaggtatatgaacaggaaatcctaacttatatcgggcaagagaagctgagcaggcgtattgccatcagtgatttttggattgaggtgagcttccagtga

SEQ ID NO: 52485 - DNA, 708 bp, Desulfosporosinus sp. I2
gtgagtgagataaaaacagccctgaagatttaccgcaaactcctggagaaggggcaactggatcgagaaagtgagggggatctgttcctggaattccgcaatgtggaggttaggtcgatcttggcggaatttgaggaggagctggagtttaaagtcattgaagtggcgggaagtctctatttgcttccccatagcggcaatggagttttgggctacacaaccaaggatttgcgcgaaagcgttgccacggatgctaagcttgtcgatgcctacttgctgagctatatctccatgttcattttgtacttattttacggcggacggaaccgaaatccgaaacagagggaattcttacgaatcagcacgttgatcgaggaactggacaggcgttttgaactggccttaagtgatggagaagaggggaaagtcctggaggaaaaatacgccctgaattttacccgcatcgctgagctgtgggccagtaagcaggattttgaagagagaggccgcaaaacaaaaaccggtacgattttgaatacctgccggctcctggagcgtgaagccttgctcagaatcgtggatgatgaccgtgagctgcggcccaccaggaagctggatgacctgatgcttaattattacctggatgacagccgggtagaagagattagagagttcttcgaaggagcggtatctaatgcccagaattaa

SEQ ID NO: 52486 - DNA, 4410 bp, Desulfosporosinus sp. I2
atgcccagaattaatcggatccggatcattaacttttcctacaacaatgacctgcggcatattcaggatgaaacctttaatttccacggcggggaaaatgccttgctcagtttagccaatggcggcggtaaaagtgttctggtgcagctgatctttcaacccatcgtgcccgaaacaaaaatccaagggcgtcgcatcaacgcctttttccgtaaaaaacgtttaccggcctatgtcctgatcgaatggaagctggacagtgccggcggttatttgctgacaggcctgggaatggtttcggcagaggtatcagggattgaggatgagaaaaacagagtgaagtattttaccttcacttctcaatatacgggctccaacgccttcgatctggctaatattgaacttgttaagcaaacgggtaatatcctggagattaaacccttcaaggaagccagggagatgatgatggaaaaggagaagaaggacccctatctctttggttgtttttatgatgatgacggggagcgctaccgcaaacgcttggctgagtttggaattgctcaggatgagtggaaaaatattatcgccaaaatcaatgacagtgaaggcggtttagatgagatctttcagaagtataaaaactccagccaattattaaatgaatggatcatcaaaaccatcgagaaggtgatttataaggatcgttccgaggcccatcggttagaagacatgttggaaggattagtgcgggaggtcattgagaacgagcgctttatcttagaaaaacaggttctcgatgaattcctggttggatacggagaacaggtcggtgccttagttgaacttctcaacggtctggaagagcaaaaacgcttggcaggaaaactggcggctctgaatcgtcatttaaacactgaaacagaccagctccaggaagaccaggagggcaatcaacttgaattaggtgatctcaaaaaggaacagcagcggatcgacctggaagaacgctctcatgcttactggttgagacacgaggagcataaccaagcggcccaggaactggctgatgctgaaaaaagcagtctggataacgaggaaaagctggaggcggctaaattctccgccaaaatcatggaggcagccggtcttagccaggagattggttcaaaaaaggctgacctttccgggatccaggaaaggctggaagcttctcgttcacagctgggtacagatcagagaatgcgcgatttggaatactctcttaaacggttggctcaggaaacgttgcaggatctggagctggctttagagggcttaagcggggaaaagacggagtgggacaagaatttgctgcagctcaagacggatgctcgtaatctggatcaggaattaagaggattcataggcgaaaaaggcggtcttcagcagcaggtaaaacagtatgaagcccaggaacgggaggtcagagggaagctcaagcttaatctgaacaggaacctgctgggagagttagcccagcaggacattgagaaagccagactggggctgcaaaagaaccaagtggatttggcgagcaaagaagtgcttttggctgaagaaaaagctgagaatgttcggaaacagcaggatgtggagcgggagagccaggaactgcgggaagccaaagctgaggaagccaattcattaaaccgtctgaatgaagagattgccgcctatgagcagcaggaacaggaagtcctgggcatcctccataaattcggctttgttgctgaactcagatttgaccgggaacgtctgcacaccttgtttaatcaacgactgaaaaacctggatcagagcctggaagaagcagtccggatgcgggacgagtccacggaatccctttcctcccttaaacaggggagactgcatattcccggagaagtcgtctccttactggctgctaaggatattcaatatgatacgggggaaacctatctgcgcaatctgtccccggacatccgccagaagctgctgggggaaaatcctgttttgccttatgccctaatcctggccaaggagagcattgaactcctggctgaggctatgaatcgaatgaccctgcgacgtgttcttcctctgattgcttatgaggatttgggcaagagcataatttctatgacagagagaatggttcaggccggtgaaggcctaactttagtttgtctgtatgaaggcagggtctttaataatgagagcctcgttaaactggaagaagaactgaaacgaaagcaaactgaggccttcgagcagtatgcccattattcagaggagcgcaatgatacgattgccaagcaagccatatgcgggcgttttgtctatccgtcggagcatctctatctgctggaaaaaaagaaaacagccgccgaaaagcagctcaaggggattgccgacaatgtgtctctcctggaacaggaaaaagagaatctattcagagccctggaaaaactggaacaatccctcaaagaaacaagcgagaatcggcaaagggcagaggctgcccttaccctgtttgagtcttggctggaacgggaaaaggactatcagacctgccgaaaaaggctgggagaagttattgaggggatttccaacgccgatagaaaaaaagcggaacagactttgaacatcgagaaccttcaggaagagctcaagagagttgattacgcaatcgatcggaaaaaaagggagactcaagaaatccggaaaaagctcaccctctatcagcaggccccggtggcggaaatcgtcgaggggagtctcgaagaactggaatccaggctgcaaggtctaaaggcggcctatacaggagaaattgagtttctggaaaaacgccaaaaggacctgcagttggactgtgctaaaatggaaaaagaactggccaggttgggtttggcggaagaggattatcggggagtagcctttgatgaggggaaagccgaggagatcagttcggaaatgaatgagcttgaaaaagcaagaaagcttctgcaaagggttacctttcaagccggtcaaaaagccagcgctgcaaaaatagcctgcgacatcgctgccgaagaagtgaaaaagctgggagcggaatttccgcttggccccgaagagattaaaggagatttccagagtcggcgtcataagctatccgccgagtacacccgcttggatcaggagctcaagcaaatagccttaaaaattagcgcctataacaagctgatggatcaaattacccctgttcttaagggcgtgaaggctgaacctgaaaagggcttccagccggaagcggatcttaaggcccaaaccggcagattagcggaaagcttccttactttccaatcagccaatcggaccaaggccgatacccttagaaataattaccgggggcttaaagcggaataccgggagaaaaatgccaatatcagtaatatctttaaggggctggacctgctttgggataagccagatatggactatgatgagtatttctacctttatgaacgcatgggtcaacatcaggaaaaactaggggaactgattaagctgcatgaaagcctgctttccaatttggaacgcaacaaaaaggatatgattcaacagagtttgctccaagggatgcgcttttacgaagaaattgagtggatatcagatcattccaaggtgcgcctgcaaggaaaaaacagaccggtgcagatgcttaaaattgagctttccctggattccagtgaggcagccggggggcggatgaaggaatacatcgaagagtgtattctccaggtgcgtgacgaaacccggcaggaaaagagtgaggcggaccttaaaaaagtaatcgccaaattaatgtatagtcgtgaactcttgaatgtctatttgggacattccaatatccccgttaaagtctttaagatcgatcttaacatgcaaaatagtggcttaaagacctgggaagacgccatgctggaaaactcaggcggcgaaaagtttgtcgtttacttctccgttctttcagctttaatggcctatacccgatctcgtaccctggaggcagccggcgctgatgaagacaaggattccagcgtattagtcatggacaacccctttggtcctatctcctcagaacatctgcttaatccactctttgaaattgccaaaaaacaccgcacccagcttatttgcctttctgatttaaaacaaaactccatcatgaattgttttaatttaatctatatgttaaaagtcaggaccagtgctatcggcagcaacgagtacttgaaattcgaagaacttgtgcgcgatcaaagcgcagtgcaaaatgatgagaaactggaaaaagctatcttccgggtttcggagcataagcagataagcttgtttgaatga

SEQ ID NO: 52487 - DNA, 1083 bp, Desulfosporosinus sp. I2
atggaacaaatcgaaaaactcctgaatcatgtcagcaaaacagttaccgatctggaactccagcagatcctcggggagtcagattatcctcgttttcagggtgaagtggaaagattggtaggattcggagtaattgctccggtaaaggctgcaaaaaagaatggacgactgccgcctctgtataataaatataaaattattaagccccaggaggattatacctcttatcttgagtccattcgccggcttaatcctgagcttagcattgcgggttatttgcagaggccggaggtttataaaaagcatcagcagatcgttgaaggaatcagcaactatctgtggtttgctcagggtttgttagacaaacccatgtcgcgcaaggagcgctccttttccgtgtggggcagggagaagctgttggatgagcagatatccttggttaaagacgtgctgaggtttaatagtctggcggaggatttccttaattattatgacactccggagccattttttgaatatcgacatgatcgcggccagctcacgacagtactggttattgaaaataaggatacctggtttaccttgcggaagctaatgcaggatacgggaaaaaactccttggcaggtacggttctccaggtgcttttgtatggggaagggaataaaatcacgaagccgggagctttagaggaatacaaggctgccatgttgggcggggaaggacaagctacacgctttctttacttcggggatctggactgggaaggtattcggctattttttcgtacccgcgaagccaatccgtctctggaattaaaacccttcgctgccctctatagtcttatgctggaacttgcggcaaagcacgcagaacgtcaagaattacctaaatcacccgatcagcgcggtgtgaccggttcgctctctgaatttttagcagctttggaacttgcccagggggataatcccctgagcacgagcacgagcttagcgggtggctttttaaaggacttattagctgagggcaagtacatccctcaggagattatcaattatcaggtggcggcggatcttctcaagtag

SEQ ID NO: 52488 - DNA, 1449 bp, Peptococcaceae bacterium BRH_c4b
atgactggaataaatgaaaactttgacattttttttgagcgggaccaggtcagggtcagggatgctttaaaagatttaatcatgctgtccggtgtcttaaaagacctgtccggagagatattttgggatgatccccgccgggttctggatgctttaagagtgtttgacctgatattaaaaggcaccttttatgaagaagaggctatccagggggaacaggagctggtttaccggtttgaacgtatctatgaattacagcctaccatagacataccccggctggttcgtttgggtagaagatataattggattaccgactctcataatcctcctctgaagttcaccggcacgggcaaaaggatggtaatgcaacttcttcgcctggttaatgacgctttggtttaccacagtcagccagcggagttgaaggagattcatcaggcggaaagggacctgcaactggcaaagtcatatgaagatattggtgttggtagtcaggataccatcgccagcgtattaaacaatttggataacgcagtcaatgatcttaagtttcagcgtgagaaatatatacaggaccgtcgggcgttggagaaataccagtctgtgctggcacttctggagatgttggaacgggaattgggtgagcgttttgcccggctgaagggcgctatagatcagaaatatgaaagacagcaccgccggagcgcaactttgttttaccgggtgattcaagaattaagctcacttctgggtgaaaacgcttacgtgtcccaattggaagtgggaagaaaggtcctgcgagttaaccgcgacaggtttttgcagtaccttgtggatgcttatagcgactccctgccgggtaccaccttgaaacctgttcagaccatgcaatacatggaagaagggatatatgacgatggcggggactcctttgccggcctctggatgccatttactttacctccacggttgcatgaggatgatgtggaacgcggggttcggcagttagaagactggatttaccggtgggaacctccccgggaaaatagcatgtcagaaaacatagaatatcatcctgcccgtgcggtcaccgccagggaactggcatctttgctgggcgctgccacctctgttgcggccgagttggaaacagacaccaggcctattattgatgcgattgccgggaacccgggcatttcggtagccaagcttttggctcaactgggcggaggatgggccggtgcgctgcgccacctactggtgctgagctacctggttagcgaagaagaagtgaaactatttacctataaaaacggtaaagacaaggcaacagcagatgtgaaaaccgacggatggcggcttaattatccggatggtgaggttcgctttgtcaaaggtacggcggtcttgggtaaacagaaaaaatatgatttgaaggtacgatga

SEQ ID NO: 52489 - DNA, 681 bp, Peptococcaceae bacterium BRH_c4b
atggaaaagtatacagctattgatgaaaaggatatcctgatgttagataaaaggcagcagcaggccctttccgagatattgatatccagcaaaagtatggatggtgttcccaggcagcgggtaatgagagtgctgcgtaccagggatgaagaggtatttaatctttttctgcggaaggcaaacagtatcctgggtgacgccttgaagttagtatatgatgagcaaagcaaccggtgcgtagcccttacccgtgccaatgctgcctggacccaggaagtgctggacgatcatcaactggcgctttttatcttctgtttttaccttggcatgacttcacgtaccggcaggatgacctttgacgagctgcatggttatttccagcgatcctctctttatgctgagcgcaagctgatgcatgccctggaccatctggcgaaatgcggcttactaaggatggaggagtatgagggagaaggggatgagaagaaaaggtcctattatattacccaggtgggccgccaggccctgcccctcccttttttaatgcgaatcgtcagcgagtctcaggggggcgaggtaacgatggagcaggtcagggatttcttcagccttgacaggcggcaggaagacaccgggaatacggatgaagataaaaagcagctaaagctgtttgctgactag

SEQ ID NO: 52490 - DNA, 3282 bp, Peptococcaceae bacterium BRH_c4b
atgtatccaattaggttgcaaattgccgggatacgtgatttttctcctcaagcaatggatctggataaggtcgttgcccacgttttagttggggggaaaaatggctcgggtaaatccactctagtctatgccattgcctttgcccttggcagccccaggatatcggtggatggccttcgctctaagactagccgccggggggaggacgggtggtatgcccgggtctcagtgctttttcacaacccgccaggagaaaatcgcaaagatgccccggagtacgttgagctgcatgcagaggtgcgggttgcacccggtaccgagcgccgccagctgaattattccctttacgggggtgaggtgccggacaagctttccttactgcgcaagtttcaatccagaaatgatgccagggaatactaccggcgggtatttggcattgatgctgagggatatttcatgttctggtaccagggctccatcgccgagttcgccaatataagcgacgctgccaggtttcagcgggtagcggagatgtttggcctggacgaattgcagagggagtgggagcttgccaggataaagatgaatgatgccagggatgattttgaaagagccagaaccctggcgctaaaccgccgtcgccgcttgcaggagctcgaaaagtttaaaaacgcgctggagcagagagatttcctgcggcgggatgccctgctgctttatgatgcctgccacaggggactgctggagctattgcgcggcgagcaaggtgaattattaagccggctggataaataccagaaggagcatcagcagaacctgcgggccagagacgatgcccataaagcattgcgtgacgttactataaaactttctgagaacagtgataaaagaaacataaaacagagtgaatttgcatcagaaaaccagcacattatccaattaaatgagaaaatacgagtttgtagtacggagaaagaagagctttctaaaaaggtgcgggacctggaatctaaaatgtaccatatcaggcgcagcaaggaagatctcttggcggagcagggagctcttcggcgtgagctcgaaatcttagaggagagaatccggcaactaagcggggagattgatgacttgaccggccgcagggatgctatcaacgtggaaatcggtaaagccgggagcgagctggaacgtgtaaaagaaaatatccagcagctggaggccgaccagtctgctttgccttccctggaaatattacgagaacagtatgataagttgaaaaatacaagggatagtgacgccgggcaaaaagctttgctggaggaacgctgccgaagcctggaagctgattatgttcgattggctggccaaaagaccctgcttttggcggaacaagaaaagttgcttaagctgtaccggcaggctggcattaaagcctatgcttttggggagatcttcgaggttcgcggggaaatttcgcgggaggaaatagagcacctattggcaccgctaaaacacaccctttttgtagagcaatcactgggacgggtgccggtggaaaaagcattttacgtggtagacctgtcaagaccgcataccggggaacctcccagggaaaacatattacaggaataccttatccctacggaaggggtttgtccggaagaatttttagaaaaggtgaattgctggcttgcctttatccagctgaatccagaaaataaccctcccggccattgcggcagcgggctggtattgtggcagggaaacttgtgggactgctatggcctgcggggagcagtggaacggggcgctgctatcggcgttaaggcgatagaaatagcccggcgggagttggaggaaaaaataagccaggccggactggatatagaaaatttagacggtcatataaaggaaatggatgagaaaatcaaagatttatctaaaaaaataaaccgtaggcaaaatgctgatgaaagcttacctggcttaagtatacaaaagcaattgcttggtaccaaactggaacaaatgggaaaagaactggctgctgcaacagaaacattggctaaaactgtggaggaaaggaatgccaacaataataacaaggttaataaagagcaactgttgaagcaggtcgagggtgagttaactgtttacgccgaatatgagcgggaagaaaaaaatataatccgcatccgggagttgtccgaagccctggagaaggccgaaggagaactgatagcctgtcgtcagcggagtgatgccctggaaggcgaagttgattctttagagcgtgtggtaagagagttgtcccgggaagaggatgccaggcaaggtgaatacgataagctgcattccctggtggagcggcaggaacaggatctggccggactgaatgagcaagctagcaccctttctatagaaatcgaggaagtagaggtagaacaggctcgtttgatcaaggaatttgcagaagtaattacaaacctcgaaaatacaagccagtggttgccctttgaatttaagccccaggaaaaaaaccgctataactttcagcgcaaaaaggaagaagcccgcgggatgctggatgatgcgcgttcccgggtggttaatgagaatgccctggaggaatacaacgatttttcctacgagtataatctggcggtgaaggaattggaagaatgcgaactccggtacaacaacctgtgcagcttggaagaggagcgccggcaaaattttgacaagtcggtatataaccgttggcttgggactaacaggcggttttctgattacatgagacgtctgggaatggtgggagaggtgcgctccatctcacctgaccctgaaagccgccatgccagctatcagtgggagctgcacgtggctaccagggcggggcaccggccggaaaggatcgtgccggaaagcggccgtactgtaggagagggtatttcaggaggggaaagggcggccacctccctggtcttcgctctggccctgttgagtgatattgagagaaagccgcctttttatgtgctggatgaatttgacagcgctctggatgaggagcgaaagcatgatattttcgacttgtaccgttcagtgttggatcggaaaatgataatagtctctcctaaaattcacggagatcagtacctgaacagatttaataagtttctctgtgtggtggccaaccctggtgccggatccaaccaaacagtcagtgaggtctacgatgttaccagggaggaatacgtagagattaggggcgaagatgaataa

SEQ ID NO: 52491 - DNA, 1443 bp, Peptococcaceae bacterium BRH_c4b
gtggacaaatttccatcctgggtaaaagttttatcaaactggtcgcccagcccaagcaaatctatcaatggtagacggacaaggtggaatgtctaccgggataccaccaggaccaggcgcctggttggctatcttgaatacaactggtcagaaagccctgctgaggaaaacattcctgaaaatatccttggtataatcagcaaggagtgtagaaaagcagagcgtctatcagaagagcgcctattgtctcttttatccaaagaagccatcatcctgggcatggccacggataacatagtgtctgagttgataaattcaggctacctggggcgctggattagattaaattcagatgaaaaaacaatccattccgtcgcatatggccctatgccccctctaattcaacaccttggagaacaacaacaactacttttgaaaaatcatttccagtggattacggaaagagagcagagactacaacggatattattactaatagagaacaaccaacccgccggagatacacttaacaccggcgaactttttcaaaagagtgttgtaaatgctgctctaaggagaatagcggaacacattcaggcaaaattagaggagttaagtgtgattggacaagataaaaagactatcttccatacggattatccctggcccttatctcctaccagaacatcctccaaataccacctgggagtggattttctgctggccctggccgaatgtctgcttgaaatgccggaaggctatgaatggaaggaaattggtgcgcgttttaacccttctatcggcggctcaaaatacttcgatcaggccaggggcgagcttatacaaatggcagagaccgtttgcggagtccccttggacagcctgggcttaacctccctcggcagcctatatcccctgtatatactgggagaccttcggctggccaggggcgatataaaagaagtttatcctgatgataccatctgcgccctcagcaatatccaggtaaacaggacagaggaagcaatcaccagagccgggagaattattctcaccgaaaacagggccctgcttttaaaaatggaagctaccggctggcagcggcggcagtcggaatcgctcattatcggcattgacgggcgcgttcgactggcccacagacgcctgcttaaaatgctggcagccaccgggccggggaaagcgtttttttcctgggtggatactgacccgtccgggattgatattgcccggcaagtccatgaaattttgcctcattgcctttttgtgtcaacccaacttgagacagcaatggtgttaccatatcatgaatggctgtgccgtatacaggaagagcaggatttgcgtgaccgtgaacaggaggaattactgggcggccccgaaaaatgggaccagattttcaacattattcatcttcgcccctaa

SEQ ID NO: 52492 - DNA, 1614 bp, Peptococcaceae bacterium BRH_c23; identical to SEQ ID NO: 52422

SEQ ID NO: 52493 - DNA, 702 bp, Peptococcaceae bacterium BRH_c23; identical to SEQ ID NO: 52423

SEQ ID NO: 52494 - DNA, 1278 bp, Peptococcaceae bacterium BRH_c23; identical to SEQ ID NO: 52424

SEQ ID NO: 52495 - DNA, 1056 bp, Peptococcaceae bacterium BRH_c23; identical to SEQ ID NO: 52425

SEQ ID NO: 52496 - DNA, 1440 bp, Streptomyces albulus ZPM; identical to SEQ ID NO: 52067

SEQ ID NO: 52497 - DNA, 4497 bp, Streptomyces albulus ZPM; identical to SEQ ID NO: 52068

SEQ ID NO: 52498 - DNA, 1086 bp, Streptomyces albulus ZPM; identical to SEQ ID NO: 52069

SEQ ID NO: 52499 - DNA, 1440 bp, Streptomyces albulus ZPM; identical to SEQ ID NO: 52067

SEQ ID NO: 52500 - DNA, 4497 bp, Streptomyces albulus ZPM; identical to SEQ ID NO: 52068

SEQ ID NO: 52501 - DNA, 1086 bp, Streptomyces albulus ZPM; identical to SEQ ID NO: 52069

SEQ ID NO: 52502 - DNA, 1539 bp, Clostridium scatologenes
atgaatgaaaattatataaaaacattaaatactacagttaacgaattatctgtgaggatgaaatctttagtaaaatattatccattctttaagattatgaatggaaagtatagtaaagatgaatatgaaaatattgatgctggtgaagtatgtatggggataatatctttccttttctatgaaggtaaacttaaagcacaacatataacctttgtaaatatacaagattacttgcaaatgtttgtagaaaaagtatatagtattaaacttattggggattctttgtacaagtttactaatgatacgatagatattatacaaaactctgaaggaagagggtttgacattggttttcctatttttatgccagaaagacaaaatgtaaagtatgtaattaataaatcaagtgattcaggtattaaagaatttgaactgactccaagtgcgattgattttttcctagaaactaaagagtttggagaagaaagtaaaataactataagtttactgatactaaaaaaacttatagaacataatgaatatgaaagcgcattaatatcccttacaaatgttaatgcagaagttatcaagcaaatagctagagtctatgagattgaaatggctttaatatatggtgggaatttaggatataaatcttttttagaatacagagaactagcagataaacatcaagctgaagaggaaaaactgttttctgaaactatggaacagattagaactttaagggaagattatgcaacgaaagtttctaaatcacagcttggagaaaaagaaataaatgcttttaggtgcttagatgaaatggataaagagctaaataaaactgttgaattacatcaacagttgttaggaaagttagttatactttctaaaaaagctaacgaaattttaagaaagaaaaaaataaatcttctaagaccatcatttgacttttcaacctatttagataaattagggcaaataggaagtgctaaatccctagaatatatggctatgccattctttcaactaaatatacaaaaaagttttgccttgcctaaaataaatgagatgcttgattttgatgataacagtacaaataatgatgatacaaattttcaagacaaagaaaatgctattcttataaatacagataagtttaacaatgaaattagagaaagggtgctccacaattacaaatacataattaactatttctttatgttattaaaagatagagattcatttataatgggagatgtgataatggacgctgatgaagaaaccaataaaaatatatttaagaaccctgattttatagggcttatactggattttttaaggttaaatgaagaaaatgtgctatcagatgagaaatggaaaaaagagaaaggcaatgactcattagagaaagctttagaggctgtttatatggatagactagaaacttataaaataaaaatagagactattgaggactcttatattgaaatagcccttggattcaaaatgactaacgtaataataagaaaggtttaa

SEQ ID NO: 52503 - DNA, 735 bp, Clostridium scatologenes
atggattctaatacaaaaacggccttagagattttttctaatatgattaggaatgttccagtaaatgaaaaaataaataaagacttatatagatctttgttaacaaattctatagtagcagctgaattagatgaaatagtagaaatgttccaactggaattatatataacagaaacagaaggtgcttttgttatagctaaagcaaataataaggtttttggatataccaatgaagaacttagacaccgattaggagctaaaaacaataaagagctatatttatgttacttcgtgatttactgtgttatagctactttctatattcaaagcaattatagaacatatgtggaatatataacttctaaaagtttattagatagagtagaagataagcttacggctcttgctaccaatactaatatagaaaatgtagatgattcttcatttaaagatatgcatagatattggatgaatgaaatgaatgaatcaaacaatagaaacaaagaaaccgttgatttcaatgaaaaaagaggtaaaacaagactaacgttaataaataaaactttagcttttttagtagaaaacaagtatatggataaagatgagtatacaagtagatacagtataactcccaaatttgaatatattgtggagcgatttttcgatgatgctgaaacaaaaacagtattacaaaggatactagatgaggaaatagaaagcaaaggggaaatataa

SEQ ID NO: 52504 - DNA, 4428 bp, Clostridium scatologenes
atgcctagtttaaatagaggtagagcgatagcaaggttcaatgaagggaagcaatgttttgaagatatgaagataaactccctaggggaaaccatagtgttagatatggttaatggtggtggaaaaagtttcttgattcaatgtcttggtcaaacaattattcctaatagtacatggcaaaaggattgggattttaaagctgtatttgatccagctaataagaatacagttgttcattgcttaacggaatgggaattagatgaaggcatgggatataaatatttattagctggattttgtgcatcaaaacctaataagatcactaatagtgacggagaatctaattatggagattttgataaattttcttacatttgcctatataattcacctaatgaaaatgatatattcaacatccctttggtagaaaaagatgagaataatagccaaaagagaatgtcattacaggaccttaaaaaatatttaaagggtataaaaggtgatggttattatgtcgagcttcctgataaagcaagggattataaaaaaagactggctcaatacaatataaccaatgctgaatgggaacttataagaggggttaatgcagatgaaaagtatgttgctacctacttacgaactttttctactagtgagaaatttatattgaaatttttgattcctaaaatagaagaatgtaatgctaatagagttgatgtggagtatagagacagtgaggaactagctagagatttattaaatataagagagctcatggatgaccttataaagaaaaagggacaagcaagggaatatgataaaatacttagttttgtagaattagttgctaggaagcttacggaaataaaagataagtatgtagaaagagatgctttatatattgaaataaagaaaagtatagctttcttagagcaaaagattgtagaactgaagaaagcttctgatgaggtttcagaaaatatagagagagaagagaagctctttaaacaaaataccataaacttaaaggctatagaaatatatgatatagaacaatctcttgctgataacaatgtgaaatttaataatcaagagaaaagagtgggcgagctaaatattgttttacagaaagaatctaaaaaactcttaataaagaaaaaagaaaatgtatatcattctattctacaagataaggccaagaaagcagaatgtataaagtcaatagaggcattagaatttagtaatactgaattacttgcagaaagaaattctattggtcaaaaggtaaagaattacttggcaaataaaattaatgtttctaatgtggagatagctagtattaatgaaaacataattaaggcggctgatcaggtaaatacgcatacagaaacaacaattaaattaagaagtgaaataagcagcttagaaagagatataaaaagacttacaaagagaaaaatcgacatacaaaaaaatatgtctggaactaattttaaaattatagaaaatacatctaaagataacttaactaagatagatatggaagaaagattagaaaaagccttagttgagaaagaatccttgaaaattttaaaggttcaatatgagaaagatatcaatgaagcaacaacaatgataggtactctaaaagtaaataaggttaaattagagcatgatttaaaagacaaaaatgctatattagatgaagctagaatgctttatgcagatatagaggaatatatagctaagtatgaaaaatcagatattaatgttttagatgaaactattgataagaagttagaggaattatcagaaggtaacaaaatgctttcaataaaaataagtgaaataacgaatcttataacaagtttaaaaagcaattctttaacgctaagtaaagatactgaagaagtgtataataccttaaagccaaagtattcagacgctatattaggtaaagattttttagctaagttaactacagatgagaagaaatattttataagtataaatgagttagttccatatgctatattacttggagaaagagaatatagaaagtttataagtgataaaactgtattatctaactattttggtggggcgattcctataataaatcaagattctttggataatactgtattattaccaaatggaatgacttttacatctaaagatgttgatttctttgttaatgcagatgaaattgcaagaataaagagggaaaaagaaattgaattaagtgagttacaggaagagcaatctggtttagttcataatatagaagaggtcaaaaaaagttctgctattgttaaaagctttatcagtaaatttttaaatgctaagaccatagaagttcttgctgcagaggtaggcaatatagagttagttttaaagaaaaatgagaaagatacagaggaatatacaaaattagaaatatctattactgcgaatatgatagagaataaaaagcagacagaaaatacagaggatttaatagatactttaaaaaatcaaattatagagattgataaatatatagagttacaaaatcaatatattgcagctaatgatgaaattaagtctatgggaaaagaaaaagaatgtaaatcagatgaattaatatcagaacaaagattattaactgagcttaatattggaaagaatattttagatgataagataaggactatggatagaactgtaggcaacttaaaagatgaaattgataagatatcttttgtagattcaaatgatgatgaggttataaaagatgctgaatatacttatttaaaaggtgaattgaaagctactatagatagatttaatggcattaatagcaatttaaaaggattagaagaagaaattcaatcttgcaaggtaagaattgaaggattaaaaaataatattgagcaggatggaatatctttagatgaattagatcatataacattagaatttactaacaactctaacgaagttatagctgaaattcaaatttatgtagataatttaggaatagaactacaaaaagaaaataatatacttttagagtatgaaaaagaaatacgttcattaagtgatagatataaagagaaaattaaacagttaaaagaagaaaaagatacgatatatttagatataaagaaatttattcaaggatatctaaatgatataaatccgaaagaaaagatgaaagaaataaaaagtattattcgtgattctgagaaaaaaatatctcagttcaaaataattaaaaatgatttagaaaaagaactacaatttcaaaaagattgcaaaggtgaatttagtattatcgccaaggatatagatgtagatttagaaatagatgatatatctttagatagggtcagatcttctaaagaaatcgaaaaagctgtatctaacattaaaaactcaataaacagtaaaaagcatttttataaagcagatattgtaaaaggtaatgcattagtaaattatatgcaaggatttaatgaaattttagaagaattggcgaaaattcctaatgatgtagctaatcttgagactaccataactaatttaataggtaaagatattagtgaagataaagaatgtttattaaaattaataaaacaagagcaaatcagattagatgatgatattaaatctcttgaattacaagaagaaaagtttgtaactttatgtatccaacagagtgaaaatatattgagagatattaagaagttggctgacttatctgttatcgaaataaatggcattagacaagaaatgataaaagttaacttgactaaattagaagatgatatagctaaagaaaagatgaagaactatattgagtatttaattaacggttctggggaatacgaagatgataatgagagaagaaatcagttatctaaagggttaacaatagaaaaattatttcagcagataataaagccaattaaagccagctcaatagagttatataagttagaagatataaataatatggaagttaactcttggcttaactgggatagagcttatggttctaaagggcaaactaatggaatgtatatatctgttctaatatgcttgattagttatctaagaaagttatatacatcatctactgataagagtaagaaagttattatactagataatccattctctggaaccacatcagagattatatggttgccaattttaaaactactaaaagaaaacaatgtgcagttatgggcatttggttttgaaattaaaactcagctttcaaattgttttaatgtaagatatttcttaaagaaagaacctggtgtgggttatgagaagataatagtagctaagttcaaatctaatgcagatacaggaagcttaggatatgatgttttaactggaaagaaaatagagtacactcaacaaacatcattttag

SEQ ID NO: 52505 - DNA, 1056 bp, Clostridium scatologenes
atgaaggtagaattagttaagggtgaattatcatctaataaaaagaaaactgtgtacactatagatgacttatatgctacagtgtcacggatatataaaaagcaagttgttgatttacagaatgtatattatatggaattttataatcttattaaggaacttgaaaattcaggtgttataaagaaacatggtgatggtaaaacatatgtaaatccacatctctttaagaaatataaagtgcttagagataaaatcgtttttacagaagaagagaaaataaatatggcaaagctaaataaggttaatctaggctattatggcaaaagagttgatgagtttagagaagattatgatattatagtagctctaaatgatttattaagggatacaactcattatagagaaataactttaaatgaaattagttatattatgtttggatatgagaaggatatgtctgaaggtaaggtctctgtagttatgaagaagttaggtataaaagaggaagacttagggtgtagaatgaaaaatgaacctcttttaaatactatatttaagggattttatgaaaaagatagacgaaatattttgattgctgaaaatttagaaacttattggtctttaaataagatactaagagaaatatccaatgatatagatatgcttatatggggacagggatgtagtgtagaatctaatttccgtggaactattttgtatggggtaaatgagaatgatagtatatattattttggagacatagatttatcaggagtagatatatttcttagattaaagagtaattttaaagacttttctataatgccaagtacaagtttatacaagaatcttctaaatataggaatgaaaatggggattaaaaaatctagatctcaaaaacaaattgatatagaggaagatagactcaatatttttttaaatgcttttagcaatgaagttagagataaattaaaggctattattaaaaatcgagaatatatacctcaagaagcactgaattataatgaactaagaaaggcatatggaaatgaatga

SEQ ID NO: 52506 - DNA, 1575 bp, Methanosarcina mazei WWM610
ttggaatacgctaaacatttccaggacattaacgaacggatgaggcatttaaaatgttattatccatttttccggatctatgcgtattcttatcggaataatctggaatatgatttaccctatatcgcacttagtgttttgaccttattaatcgaggagggaaaactacgtggacgttccctgaaggtagatgaaattgaggtacatataaagaatatactcaatgaaatgtatatggattatgagactaacagcaaacaggtaacacgtacattattgactattctagaaacggacagagacggagaatcgtatcattttgaatatatggaccctatccgtagaaagaaagatggtcattatgtgcatctgatagaatatgatgtaagtaacaaggcttaccaaatcagtgatgcaggacttgatttcatgataagcatcaaggaactgccagaggaatcaaaaatttctgtgagcttaatcctttttaaaaagcagattgaaaatggttctttcgtaactgcattgaatacggtaagagaactcaatcttgaggttcttcgcaaaaaagaaaaaaaacagaatttgttagagaaaatgctgtatggaggagccgatgtagttgaggattattccattttctcagagggagtttttagccaacttcaacaagaaaaaattttatttgaagaagtcagaaccactcttttagaattaacaaaaaatcacgaagaaatcatcaatatttccaacaaaagtgcgaatgaaaaggatttcttgatccttaagcaaatttctactgagctcgaccgtggttatcagcttcactccggattactgaaggagtatacagacctgccgggagagtatgagaaaatttgtcggatcagggtaaactcgttattcgatagaaaatggcattttaaggaaatcctcgaaaacaatattaggcaaaattatccaaatgatgttcatgttattggaatgcaccctatgttcctacctaaaaccactaggtcttttagtttatacaaaatatttgaatcgcagattgtaagccgtaaaaaatctgaagtttccgaaacaaggcagaatgatgaatggagtgaaaaaaagcttattgatggaacagttgatgaacggcaaagaaacaattttagagtttatgctcatgcgttactcgggtgtgtagaggatcatggcggggatttaacccttgaagtatatcttaagacagttgaagatacacttggacctgaagcactgcaaaatatggatctgattcccttcctgttttcgcttaatgttgatattgatgatgtaaacgcgcaagcctctgataattctcaaaaactgaaaaacaaggaactaaacgtcactcggtttgaatttaataaactaaaattatcgtgccactccaatcgtgaactgatcctagaggcgttactatccgcacatgaagcactcggtctttcaagttccacttttatcgttacatcctttccggacgagataataaatattaaaaaagggttcagtgcttatatatcaaacatgaaatttattatgaagtga

SEQ ID NO: 52507 - DNA, 756 bp, Methanosarcina mazei WWM610
gtgaaatttgaaaaagagaatctaggaatcgcttttgatatgctttatcagatgttgtcaactggctcaattgaaagatttgtgtatccaaaacacttcatgcgttatgaacaagaaagcgaaataagggaagcgcttgatttttgtgctgaaaaactcggactatacgtttgcggacgcggagattcaatatttttgagtgccggagttggaaaccgtgtttttggttatactaatgaagatgttaaaaatgaactcgggagaggattcaaaaaccccgaaatgtacacagtctttttcataatgaatgtaatagtaagcgaattttacaaagaatcctttcatgacacacttcgcataaaccttcctaaaaattaccttataggaattatagaagcaaaaattcgggcattatctgattttgaagatctggataaaatcagtgaagagtataaatttaatttcagggaaattaaagacttatgggatagtttgccaaacgtagaattcagagatgattcagatattgagatcaaacaaaaaggtaccagttcaaagactgcgatcataaatgaaactgttatttttatgaaaaaacacagactggtagatgagcacaataatgcagtttatcctacggaaagattcaaagcaatcgtgtctgaagcgtataacaggtcagacgttcaaacagacataatagagttcattgatgatttgacttgtttggaggaagaaaagaatgccgaaacttaa

SEQ ID NO: 52508 - DNA, 4398 bp, Methanosarcina mazei WWM610
atgccgaaacttaaaaacctccgaattattaatgcccagttcaatgaaggcaagggcatataccaggattttctcatgccttttgacggtcttagcgcaacgtatgaacttgttaacggtggtggcaaatccgtccttgtaatgctattattgcagtgcatcataccgaaatcacatcttgattcaaaaaaaccttttaaggctatgtttgaaggaggggatccaaataggacaacgcatgttctggctgaatgggaacttgatgaagggttatatgaacacaagtacttgcttacaggattttgtgcgaaaaagaaagatgaccctgatgatcttctcgagagtgggggtgtgaaccatttcagctacatccatctctacgataagtcaaatgacttggatatctttagaatccccttatgtagatgggaaaataacgagtttgtggttatggatttttccaaaacactttccatgttaaaagaaaaaagtggagatttcaatatatggataactgaaactattagagagtacaaggaacgaatcaaggaatataatttactcgaggcagagtggcgattggttcagagcatcaataaagatgaaaactacctgaagacctactttggaggtaattatggcacctcccgaactcttgttgaaaaactcttaataaacactacagatgaatgtttaagagataaacgtcggttcagtggagacaattctgaggaaaaaagtagcgagtcacttgcgagtgcactttatcagtcccaggaagatttaaagaggcttaaagaggaagtcgagcacgtcaaggagtatacaacacttaattcagaagtcaataagataattgatgaaaacaataaagtaatcgaatcccatcagaaatttgatgaggctaaacttattgcctcttctcagtataaggctcatgatttgaaagtaactgagacgctttctaatcttgaaaaagctgaatttgaccttaacgaaacaaagagattgcacgagaaagtcgaacatgatatcgaaagattcgaattaatgcggcttaatataaaagtgaataaaagcaaaactgttttagaagagctgagggtcgaaaaagaaggggttgaaaaatcacttcaagacctaaaacataaatcgaattttgcaactgccacaaacaagtatcttgagattcaaaacctcaacagtgagatccgtgaatcccaaaacactctggaaaatataagaaagcagaataatgaattgtttggtgagcgagacactattggaaaaagtttgttcttacgtatttcggaagacttggatatggtttctgaacagtatgaagctgaaatgaaagctaaaaatgaaattcaggagaaaataagtgactgtcaacatatcatcggacagcttcataacgaattgaattttttgggtaaagaaatatcccgatatgatgacgaacttaaaaacctgaaaaaacgcgaatctgtacttaataaccaatatgctcaatattcaaggatcacttgtggcctgattatagaagacgaagtcgaagcaacaggagaacttatagaggaacttgagggcaaactcaaacagttagcagatgaaatagaaacgttgaaatctagtcttttaactagtgaaattgaaattaaatatattcaaagtcaaattaaaaacactgaagaaaacatcgagaaggtaagagccaacatcctcaagtttgaatcggatagaagagcagtgctagatattgttgaagcccgtgaagggactgacatcgaaccctgtctccttacagtagataaagagattaatgacactcaggaactgttgtcaacagccagaaaaacccacaaggaacttaaacaagaattgaagatggtacaggaatacggttttgccttaagcgaagattttgaagatgcgctcaccttattaagagaccgctttaaatttgctcggagcggagctgagtacctcaaggatctagatactgatggtcaaagaaagctattgaataatgtcccgtggcttcctaaagcaataattcttgctaatgatgatttcgacgcccttgttaaaaatccgcgaaatcatttatcacccaaaataatggattcctcagtaattcttacaggcatttcaagtatccaggaaaataaaaaagtctctctcgaaaatgtgtttataccttcaagagatgctgagtattacgttaatgttctcaatagagaaaacacgattaatcgcatagaggaaaagatcaaagatgtcgagcaacaaatcgttcgctgtgataattcacttaaagttgctaagaacgacagagaagctctttccttttatctctatacttatcctgtaacttatgaatctgaactgcatgagaggttgtcagagtacgaatctctgaaaaaagaggaaggaaacaatttggtcagtatccgaaaaaaaaatgaagacgatagtgtagctcttgagcaggctaaatcaagtctattgactactcaagaaaagcaggaaaagctaaaagagaaacgtgatctgctcatcgatctaaataagataatggatgaaattgtagaaaaaacaagagctctggaacagagcaaattgaccctgaataatgtagaaactcagcatagggagaaaaagaacctaaaatacaagctggacattgactctaaggaaaaagacagttctgtgcggtctctttacttacaaaagagcatgctcgataaagaggtaaagtcatttgttcagtatcgaaatgtgaatgtagataaattgccggaaaaggatacagacacactccgctcaaagtggatctcagttaatagtgtactcaaccaggttagcgggaacattgaacaaattgatcataggatagaaaagaacaaatctctaatagaagtgtttttaaaagatatcaaaaacttagaagtgtcaattgaaagcatcaaagccaatagtagaagtcagccgtatcccgacgatcatctggagtttctaaagaaagaaatagaaaatgtacaggctaatttggaggatatgaattccagacttcacaaagcgagtgataacctacttcttctcacgagagagtttgaagagaagtgtcatagatttaatgccaaatctggaaaggtttacttagcggactcctttctcattgattcaactctggtagatgaagaactaaccaaaaatcaaaaagagagctatcgtctagttgaaaagatagtagggctagaaaatctatgcaagaaaacggaaaaggaactagaatctcttaaaaatagcctggatcattataagatcttgagtgatgtttataaaattgaaacacaggctgttgagatagctgtagaacttatcagtcacaaggaaatagagaatcttttgaaaaatactaaggaaaacgttgaaaacagaaaaagcaaattcaacgttgctaaagaacagttcctgaataaaatcgttgatttgccagttgcttcttattttaaagatgttgtgagacagaaactcctagttgcaaataccctaagagaggcagaaagcaatgcaaatgctctgcaagactattcctgtaccataacttcaagaatggaaatgcatcagaaacaggcggactctcttaaaagtgtcgaagagaatatagttgctcaggcattaggtattgcaatgttgtatagggattacttgcacaaatttgtcaagttgtcaaaaatagatgtggatgggaccctggaagagatggttcgaataaacttcaacgattgtgaatactctgaagaacgtgctgaatctgaaatgaggtactacatccaagaactcatccaggaaattgaagtcggtaatattggcaaaaaagagttaataaataatcttacccctgcgtatttaataaataaagttctggacatgaaattgcttaagctggacatacgtaaaattgacagaaactcgcttaaattccagagatgggaaaggatacaggcgtccggaggtcaggaaaatgccatgtatatcatatttttggtagtgctcatgtcatatatcagagatattgtggttgacagaagagataaaaatacgtcaaaagtcctagtgatagacaatccatttgggacaaccagttcatattatctctgggaaaaaatatgggcaattcttgagagaaacaatgttcagttaatctgtcctggacacaaaattggtacaaatgtaatggaattttttccaataaatcatcttcttacagaggaattatctacaaacgatcgaactcgtataggcatccaagtaagggctagaagcgagattttggatcgtatagagcgccaaaagcgcggaggacaactgtcaatatcaatgtactga

SEQ ID NO: 52509 - DNA, 1080 bp, Methanosarcina mazei WWM610
atggaggaacaagttttagaaatacttgagcaatatgcaaaaaaaagagttgagataaaatacatagttggagaactgaaaaacggcggtataaacttaatttcagatccatggctaaacaggccgtttattgatgtaattaaaaaactgatcgatgagaatgtgctggtccctttgaaaagcgcaaaaaagctgcaacagtatgagggattacctagcaagtatgagattaatagacattacttcagacagtgtgatgaagagataccagcagaagaactgagaggactttcatgcaaactcaatatgagctactatttaaagcacattgaggaatatcgtgcgcatagggagtttatacgcaggattaatgatttaatgatggataatgattgtgaagtccttactgctaatgaaagatcatatttgatattcggggatgaaaaagcaattacttccccaaaaaatgcatctattgacggagaaattattttaaaccgactgaacctgacaatcaaggacataaaggctgagaaaaaaccagaaccatttttctatattaaagccaaagagtatgaaagtttaagtgatatattagcccggaaaattcttattgtggagaataaggataccttctggacgttcatggatgcaactttaagcagagaacttacagatattcatttacttatatacggggaaggaaacgccgttgtaagtaagtttgagtttatacagatggtgggcggtaagacaactgatcattattattattttggggatatggatcaggaaggaatacttatttttaatcggttaaggagtaccttttcagagtataatattcgtccagcagtttcattatatgaatatatgttgaataaatctgggcaggaaaacgccaaacctctgcggaaatgccgtaaaataaacgaagagtcgctgtctccattcatcgatttcttcagccacgagactagaaaagtaattgaagagattatatctgctcaaaaatacattcctcaagaagttgtcaataaaacagatatgaggaggctgcgtatgattggaatacgctaa

SEQ ID NO: 52510 - DNA, 1575 bp, Methanosarcina mazei S-6; identical to SEQ ID NO: 52506

SEQ ID NO: 52511 - DNA, 561 bp, Methanosarcina mazei S-6
ttgagtgccggagttggaaaccgtgtttttggttatactaatgaagatgttaaaaatgaactcgggagaggattcaaaaaccccgaaatgtacacagtctttttcataatgaatgtaatagtaagcgaattttacaaagaatcctttcatgacacacttcgcataaaccttcctaaaaattaccttataggaattatagaagcaaaaattcgggcattatctgattttgaagatctggataaaatcagtgaagagtataaatttaatttcagggaaattaaagacttatgggatagtttgccaaacgtagaattcagagatgattcagatattgagatcaaacaaaaaggtaccagttcaaagactgcgatcataaatgaaactgttatttttatgaaaaaacacagactggtagatgagcacaataatgcagtttatcctacggaaagattcaaagcaatcgtgtctgaagcgtataacaggtcagacgttcaaacagacataatagagttcattgatgatttgacttgtttggaggaagaaaagaatgccgaaacttaa

SEQ ID NO: 52512 - DNA, 3576 bp, Methanosarcina mazei S-6
atgccgaaacttaaaaacctccgaattattaatgcccagttcaatgaaggcaagggcatataccaggattttctcatgccttttgacggtcttagcgcaacgtatgaacttgttaacggtggtggcaaatccgtccttgtaatgctattattgcagtgcatcataccgaaatcacatcttgattcaaaaaaaccttttaaggctatgtttgaaggaggggatccaaataggacaacgcatgttctggctgaatgggaacttgatgaagggttatatgaacacaagtacttgcttacaggattttgtgcgaaaaagaaagatgaccctgatgatcttctcgagagtgggggtgtgaaccatttcagctacatccatctctacgataagtcaaatgacttggatatctttagaatccccttatgtagatgggaaaataacgagtttgtggttatggatttttccaaaacactttccatgttaaaagaaaaaagtggagatttcaatatatggataactgaaactattagagagtacaaggaacgaatcaaggaatataatttactcgaggcagagtggcgattggttcagagcatcaataaagatgaaaactacctgaagacctactttggaggtaattatggcacctcccgaactcttgttgaaaaactcttaataaacactacagatgaatgtttaagagataaacgtcggttcagtggagacaattctgaggaaaaaagtagcgagtcacttgcgagtgcactttatcagtcccaggaagatttaaagaggcttaaagaggaagtcgagcacgtcaaggagtatacaacacttaattcagaagtcaataagataattgatgaaaacaataaagtaatcgaatcccatcagaaatttgatgaggctaaacttattgcctcttctcagtataaggctcatgatttgaaagtaactgagacgctttctaatcttgaaaaagctgaatttgaccttaacgaaacaaagagattgcacgagaaagtcgaacatgatatcgaaagattcgaattaatgcggcttaatataaaagtgaataaaagcaaaactgttttagaagagctgagggtcgaaaaagaaggggttgaaaaatcacttcaagacctaaaacataaatcgaattttgcaactgccacaaacaagtatcttgagattcaaaacctcaacagtgagatccgtgaatcccaaaacactctggaaaatataagaaagcagaataatgaattgtttggtgagcgagacactattggaaaaagtttgttcttacgtatttcggaagacttggatatggtttctgaacagtatgaagctgaaatgaaagctaaaaatgaaattcaggagaaaataagtgactgtcaacatatcatcggacagcttcataacgaattgaattttttgggtaaagaaatatcccgatatgatgacgaacttaaaaacctgaaaaaacgcgaatctgtacttaataaccaatatgctcaatattcaaggatcacttgtggcctgattatagaagacgaagtcgaagcaacaggagaacttatagaggaacttgagggcaaactcaaacagttagcagatgaaatagaaacgttgaaatctagtcttttaactagtgaaattgaaattaaatatattcaaagtcaaattaaaaacactgaagaaaacatcgagaaggtaagagccaacatcctcaagtttgaatcggatagaagagcagtgctagatattgttgaagcccgtgaagggactgacatcgaaccctgtctccttacagtagataaagagattaatgacactcaggaactgttgtcaacagccagaaaaacccacaaggaacttaaacaagaattgaagatggtacaggaatacggttttgccttaagcgaagattttgaagatgcgctcaccttattaagagaccgctttaaatttgctcggagcggagctgagtacctcaaggatctagatactgatggtcaaagaaagctattgaataatgtcccgtggcttcctaaagcaataattcttgctaatgatgatttcgacgcccttgttaaaaatccgcgaaatcatttatcacccaaaataatggattcctcagtaattcttacaggcatttcaagtatccaggaaaataaaaaagtctctctcgaaaatgtgtttataccttcaagagatgctgagtattacgttaatgttctcaatagagaaaacacgattaatcgcatagaggaaaagatcaaagatgtcgagcaacaaatcgttcgctgtgataattcacttaaagttgctaagaacgacagagaagctctttccttttatctctatacttatcctgtaacttatgaatctgaactgcatgagaggttgtcagagtacgaatctctgaaaaaagaggaaggaaacaatttggtcagtatccgaaaaaaaaatgaagacgatagtgtagctcttgagcaggctaaatcaagtctattgactactcaagaaaagcaggaaaagctaaaagagaaacgtgatctgctcatcgatctaaataagataatggatgaaattgtagaaaaaacaagagctctggaacagagcaaattgaccctgaataatgtagaaactcagcatagggagaaaaagaacctaaaatacaagctggacattgactctaaggaaaaagacagttctgtgcggtctctttacttacaaaagagcatgctcgataaagaggtaaagtcatttgttcagtatcgaaatgtgaatgtagataaattgccggaaaaggatacagacacactccgctcaaagtggatctcagttaatagtgtactcaaccaggttagcgggaacattgaacaaattgatcataggatagaaaagaacaaatctctaatagaagtgtttttaaaagatatcaaaaacttagaagtgtcaattgaaagcatcaaagccaatagtagaagtcagccgtatcccgacgatcatctggagtttctaaagaaagaaatagaaaatgtacaggctaatttggaggatatgaattccagacttcacaaagcgagtgataacctacttcttctcacgagagagtttgaagagaagtgtcatagatttaatgccaaatctggaaaggtttacttagcggactcctttctcattgattcaactctggtagatgaagaactaaccaaaaatcaaaaagagagctatcgtctagttgaaaagatagtagggctagaaaatctatgcaagaaaacggaaaaggaactagaatctcttaaaaatagcctggatcattataagatcttgagtgatgtttataaaattgaaacacaggctgttgagatagctgtagaacttatcagtcacaaggaaatagagaatcttttgaaaaatactaaggaaaacgttgaaaacagaaaaagcaaattcaacgttgctaaagaacagttcctgaataaaatcgttgatttgccagttgcttcttattttaaagatgttgtgagacagaaactcctagtgtcgcgtcaatcctcaatagtcggataa

SEQ ID NO: 52513 - DNA, 1080 bp, Methanosarcina mazei S-6; identical to SEQ ID NO: 52509

SEQ ID NO: 52514 - DNA, 1425 bp, Bacilli bacterium VT-13-104
ttggaagaattggataaagccttaatttccatttttgatacagatggagataagccagagcttcttcagtccatgcgtgatattgcggcattatctggcgtgttgagtgaactaagtgataaggaatattttcaatcgccgattcacgtcctacgttttttgcgagtgttaaatattattaatcaagaggcgcttgggattacggatccaatcgagaatgaggaaacacttttttatcgttaccgtcatacgttcggttatgacgaagagatgacaatcggcttcataaaacacttgacgtttgtgttgggaaaatacaactggattgcaaaaacggggaagcgaatcaagatgcgtgatgttggtaagcgaatgatggatgtcttgattcggcttgctaatgattcccttgcgtattatttgaatgatgatgttcaacgatcgcttttccaagcaaaaagagatgcggagctaagtgaggcttatgatgataagggcatttctggtgggaacaaactaatgagtatgattaaaaatgtggaggaagcggtctcgctattaaccgaaagagagttagagtatttgtccgatcgcaacgcattgaaccaggtagaggttatccatcaattgatgaaagaattggaagtaaaaatggttgaaaggcttgctaaatttgaaacgctagaccaggaacttgtttttgctactgtgaagcaaaggggaacaacagcgataagtgaaggaacaaagataagtcttgggacgataaacaagattcttaagtttgcccatctgcaagagacagattttatcaagacaatccatcctgaactcttccggaattttattgtgaagtcatttgatccaccaataggttcggatatacctaatgctcatcaaatccttagttttatggaacagggacaatatgaggatgaggaattggatggtatgtgggtaccggtcaaatttgctagtcccttgccgccggtggcaattgatgaggggatcgagtatgtggagaactatgaaccaatcacggaggaaatcgaagaaacggtggaagaggattttccagaattagaagaagtgatggaggatcaactagaagagcttatgggagactcaagatggcaaatgacgaaacaaatgattcataccgagcagattgaaaaatacctcgataacgtagacgaagcaggactagatgaattagtagttcaggctggatctgataaatggagtgacgtcttaaatggtctaattggtgtgtctgcactcattgctaataaaaaggcagatatcgatgagaaagcaaatcgaaaattagatgacaataagacggagagagattggaggtggatagaggatgaacaaggaacctatggaattagaaaacgaggaagaagagattcaaaatattaa

SEQ ID NO: 52515 - DNA, 711 bp, Bacilli bacterium VT-13-104
atgaacaaggaacctatggaattagaaaacgaggaagaagagattcaaaatattaatcccttgtcagccttgcagtcgatacaggggtttttgacaaaggaagaagagcttgtctttatgcaaatcttgttttcttcttctgctaccatccgaacggggaactttggtctatcacgtaaggaagtggagaaattacttggtattacgaatgatgaggaagcttttgcttcatttattaaacgggtgaatcaagggcttagccgttattttaaggtgatttatgatgagcgtagaaaccaagttgtagcgctaatgcgagtacccgcaaaacaagcgagaaatgtcttgaacaaggagagccttgcgattctcatgtttattttttatcaccaagaggtgttgcaaaatgaatacacgcttttctcacaattgattcatagttttggtcatgaatctctgcaggtgacaaggaaaattcaagcaaacttagatcctttgaaaaaaattggtgcaattgaagtttatgatacgaattctgatgaagaggcgtatcaacttacggctattggtgtacatatgttctccgattcgtatttgcggcggtatgcggaatttagtcagtcgaatcagcttcatatggaagacgtgttacggttctttaaacgatacaacatgaacggaggtgtgggtgatgattccatggagacttag

SEQ ID NO: 52516 - DNA, 1311 bp, Bacilli bacterium VT-13-104
ttgattccaagtgaatggaaagagtatttagaagagcacattttattaaaaaatgaagaacttcatttaatagatataaatgaaaacaacggaaacgtggatatccctgttatcaggagaactgctagaacaagaagaacagttgctaggttaaccatcggaatcgttactgatcatacggtctcaccacctgaaaaactagtaaaagcttttagtagttcaaaggtcaagaagcatttgactctatcagatgaaacgtatgattggattcgtaatggttggttgatcagggaatatcgctttgaaaaagatgagcggaccttgaagagtgagcaatatcgaatgggttatggtctttttcaatatcaacagttcattcaaaaacaaaaggaagaagaaaaaaagcagcttatccatgaatggaaaacacgctgggaagaaacgaggggcactggtaaagtggaggatgggctccgcttagaattactagacttattagaaaatagattacaactgattgccaatgagggacaacggtttttagaaggccaagttgataaaatggaaacagtaaatccttcttggaggtttagaaagcaagtcctattcttacatttcttagtagctttgtaccagattgctgctattgaatatcattatgactggaagcaaattggcgctcgttattatcggaaaataggagggtcaaaggaatttgactcctataaaaaagatttcattgaagaggcagaacgatttctcgaacgtccgttacatttgttaggtcttgctagtttgggtacgattacgccgatatttttttccggaccaatgagtgggaaaaaagtaacgtacagctatgggagtgttcacgctacaaccgatttagcggtttttaccgacaactttcaaacgagtgcggaagtgttgtggttggtggagaatagaggcgtgttaacgcggatggcctatgaagaagaatttttactagattccaagagctttgtgttaggaattgatgggcagttgcgatcagcacaccgacaattgattggaaatctcgttccctttgtgaaacaagtaattatctggacggatgtcgatgaagcgggtttaacgattgctaaggaaattttccagctgactgaaaatgagcaagtccttacaaagtgggtggttccaccgttagagatcgtaacagatatagaggagtttgaaatacggtataaacagtcgattcaagctgggaaggaagaacaggaacaagagattggaggagtgaggtattggaagaattggataaagccttaa

SEQ ID NO: 52517 - DNA, 1575 bp, Methanosarcina mazei; identical to SEQ ID NO: 52506

SEQ ID NO: 52518 - DNA, 756 bp, Methanosarcina mazei; identical to SEQ ID NO: 52507

SEQ ID NO: 52519 - DNA, 4398 bp, Methanosarcina mazei; identical to SEQ ID NO: 52508

SEQ ID NO: 52520 - DNA, 1080 bp, Methanosarcina mazei; identical to SEQ ID NO: 52509

SEQ ID NO: 52521 - DNA, 1575 bp, Methanosarcina mazei; identical to SEQ ID NO: 52506

SEQ ID NO: 52522 - DNA, 756 bp, Methanosarcina mazei; identical to SEQ ID NO: 52507

SEQ ID NO: 52523 - DNA, 4398 bp, Methanosarcina mazei
atgccgaaacttaaaaacctccgaattattaatgctcagttcaatgaaggcaagggcatataccaggattttctcatgccttttgacggtcttagcgcaacgtatgaacttgttaacggtggtggcaaatccgtccttgtaatgctattattgcagtgcatcataccgaaatcacatcttgattcaaaaaaaccttttaaggctatgtttgaaggaggggatccaaataggacaacgcatgttctggctgaatgggaacttgatgaagggttatatgaacacaagtacttgcttacaggattttgtgcgaaaaagaaagatgaccctgatgatcttctcgagagtgggggtgtgaaccatttcagctacatccatctctacgataagtcaaatgacttggatatctttagaatccccttatgtagatgggaaaataacgagtttgtggttatggatttttccaaaacactttccatgttaaaagaaaaaagtggagatttcaatatatggataactgaaactattagagagtacaaggaacgaatcaaggaatataatttactcgaggcagagtggcgattggttcagagcatcaataaagatgaaaactacctgaagacctactttggaggtaattatggcacctcccgaactcttgttgaaaaactcttaataaacactacagatgaatgtttaagagataaacgtcggttcagtggagacaattctgaggaaaaaagtagcgagtcacttgcgagtgcactttatcagtcccaggaagatttaaagaggcttaaagaggaagtcgagcacgtcaaggagtatacaacacttaattcagaagtcaataagataattgatgaaaacaataaagtaatcgaatcccatcagaaatttgatgaggctaaacttattgcctcttctcagtataaggctcatgatttgaaagtaactgagacgctttctaatcttgaaaaagctgaatttgaccttaacgaaacaaagagattgcacgagaaagtcgaacatgatatcgaaagattcgaattaatgcggcttaatataaaagtgaataaaagcaaaactgttttagaagagctgagggtcgaaaaagaaggggttgaaaaatcacttcaagacctaaaacataaatcgaattttgcaactgccacaaacaagtatcttgagattcaaaacctcaacagtgagatccgtgaatcccaaaacactctggaaaatataagaaagcagaataatgaattgtttggtgagcgagacactattggaaaaagtttgttcttacgtatttcggaagacttggatatggtttctgaacagtatgaagctgaaatgaaagctaaaaatgaaattcaggagaaaataagtgactgtcaacatatcatcggacagcttcataacgaattgaattttttgggtaaagaaatatcccgatatgatgacgaacttaaaaacctgaaaaaacgcgaatctgtacttaataaccaatatgctcaatattcaaggatcacttgtggcctgattatagaagacgaagtcgaagcaacaggagaacttatagaggaacttgagggcaaactcaaacagttagcagatgaaatagaaacgttgaaatctagtcttttaactagtgaaattgaaattaaatatattcaaagtcaaattaaaaacactgaagaaaacatcgagaaggtaagagccaacatcctcaagtttgaatcggatagaagagcagtgctagatattgttgaagcccgtgaagggactgacatcgaaccctgtctccttacagtagataaagagattaatgacactcaggaactgttgtcaacagccagaaaaacccacaaggaacttaaacaagaattgaagatggtacaggaatacggttttgccttaagcgaagattttgaagatgcgctcaccttattaagagaccgctttaaatttgctcggagcggagctgagtacctcaaggatctagatactgatggtcaaagaaagctattgaataatgtcccgtggcttcctaaagcaataattcttgctaatgatgatttcgacgcccttgttaaaaatccgcgaaatcatttatcacccaaaataatggattcctcagtaattcttacaggcatttcaagtatccaggaaaataaaaaagtctctctcgaaaatgtgtttataccttcaagagatgctgagtattacgttaatgttctcaatagagaaaacacgattaatcgcatagaggaaaagatcaaagatgtcgagcaacaaatcgttcgctgtgataattcacttaaagttgctaagaacgacagagaagctctttccttttatctctatacttatcctgtaacttatgaatctgaactgcatgagaggttgtcagagtacgaatctctgaaaaaagaggaaggaaacaatttggtcagtatccgaaaaaaaaatgaagacgatagtgtagctcttgagcaggctaaatcaagtctattgactactcaagaaaagcaggaaaagctaaaagagaaacgtgatctgctcatcgatctaaataagataatggatgaaattgtagaaaaaacaagagctctggaacagagcaaattgaccctgaataatgtagaaactcagcatagggagaaaaagaacctaaaatacaagctggacattgactctaaggaaaaagacagttctgtgcggtctctttacttacaaaagagcatgctcgataaagaggtaaagtcatttgttcagtatcgaaatgtgaatgtagataaattgccggaaaaggatacagacacactccgctcaaagtggatctcagttaatagtgtactcaaccaggttagcgggaacattgaacaaattgatcataggatagaaaagaacaaatctctaatagaagtgtttttaaaagatatcaaaaacttagaagtgtcaattgaaagcatcaaagccaatagtagaagtcagccgtatcccgacgatcatctggagtttctaaagaaagaaatagaaaatgtacaggctaatttggaggatatgaattccagacttcacaaagcgagtgataacctacttcttctcacgagagagtttgaagagaagtgtcatagatttaatgccaaatctggaaaggtttacttagcggactcctttctcattgattcaactctggtagatgaagaactaaccaaaaatcaaaaagagagctatcgtctagttgaaaagatagtagggctagaaaatctatgcaagaaaacggaaaaggaactagaatctcttaaaaatagcctggatcattataagatcttgagtgatgtttataaaattgaaacacaggctgttgagatagctgtagaacttatcagtcacaaggaaatagagaatcttttgaaaaatactaaggaaaacgttgaaaacagaaaaagcaaattcaacgttgctaaagaacagttcctgaataaaatcgttgatttgccagttgcttcttattttaaagatgttgtgagacagaaactcctagttgcaaataccctaagagaggcagaaagcaatgcaaatgctctgcaagactattcctgtaccataacttcaagaatggaaatgcatcagaaacaggcggactctcttaaaagtgtcgaagagaatatagttgctcaggcattaggtattgcaatgttgtatagggattacttgcacaaatttgtcaagttgtcaaaaatagatgtggatgggaccctggaagagatggttcgaataaacttcaacgattgtgaatactctgaagaacgtgctgaatctgaaatgaggtactacatccaagaactcatccaggaaattgaagtcggtaatattggcaaaaaagagttaataaataatcttacccctgcgtatttaataaataaagttctggacatgaaattgcttaagctggacatacgtaaaattgacagaaactcgcttaaattccagagatgggaaaggatacaggcgtccggaggtcaggaaaatgccatgtatatcatatttttggtagtgctcatgtcatatatcagagatattgtggttgacagaagagataaaaatacgtcaaaagtcctagtgatagacaatccatttgggacaaccagttcatattatctctgggaaaaaatatgggcaattcttgagagaaacaatgttcagttaatctgtcctggacacaaaattggtacaaatgtaatggaattttttccaataaatcatcttcttacagaggaattatctacaaacgatcgaactcgtataggcatccaagtaagggctagaagcgagattttggatcgtatagagcgccaaaagcgcggaggacaactgtcaatatcaatgtactga

SEQ ID NO: 52524 - DNA, 1080 bp, Methanosarcina mazei; identical to SEQ ID NO: 52509

SEQ ID NO: 52525 - DNA, 1521 bp, Methanosarcina mazei
atgttattatccattttccggatctatgcgtattcttatcggaataatctggaatatgatttaccctatatcgcacttagtgttttgaccttattaatcgaggagggaaaactacgtggacgttccctgaaggtagatgaaattgaggtacatataaagaatatactcaatgaaatgtatatggattatgagactaacagcaaacaggtaacacgtacattattgactattctagaaacggacagagacggagaatcgtatcattttgaatatatggaccctatccgtagaaagaaagatggtcattatgtgcatctgatagaatatgatgtaagtaacaaggcttaccaaatcagtgatgcaggacttgatttcatgataagcatcaaggaactgccagaggaatcaaaaatttctgtgagcttaatcctttttaaaaagcagattgaaaatggttctttcgtaactgcattgaatacggtaagagaactcaatcttgaggttcttcgcaaaaaagaaaaaaaacagaatttgttagagaaaatgctgtatggaggagccgatgtagttgaggattattccattttctcagagggagtttttagccaacttcaacaagaaaaaattttatttgaagaagtcagaaccactcttttagaattaacaaaaaatcacgaagaaatcatcaatatttccaacaaaagtgcgaatgaaaaggatttcttgatccttaagcaaatttctactgagctcgaccgtggttatcagcttcactccggattactgaaggagtatacagacctgccgggagagtatgagaaaatttgtcggatcagggtaaactcgttattcgatagaaaatggcattttaaggaaatcctcgaaaacaatattaggcaaaattatccaaatgatgttcatgttattggaatgcaccctatgttcctacctaaaaccactaggtcttttagtttatacaaaatatttgaatcgcagattgtaagccgtaaaaaatctgaagtttccgaaacaaggcagaatgatgaatggagtgaaaaaaagcttattgatggaacagttgatgaacggcaaagaaacaattttagagtttatgctcatgcgttactcgggtgtgtagaggatcatggcggggatttaacccttgaagtatatcttaagacagttgaagatacacttggacctgaagcactgcaaaatatggatctgattcccttcctgttttcgcttaatgttgatattgatgatgtaaacgcgcaagcctctgataattctcaaaaactgaaaaacaaggaactaaacgtcactcggtttgaatttaataaactaaaattatcgtgccactccaatcgtgaactgatcctagaggcgttactatccgcacatgaagcactcggtctttcaagttccacttttatcgttacatcctttccggacgagataataaatattaaaaaagggttcagtgcttatatatcaaacatgaaatttattatgaagtga

SEQ ID NO: 52526 - DNA, 756 bp, Methanosarcina mazei; identical to SEQ ID NO: 52507

SEQ ID NO: 52527 - DNA, 4398 bp, Methanosarcina mazei; identical to SEQ ID NO: 52508

SEQ ID NO: 52528 - DNA, 1080 bp, Methanosarcina mazei; identical to SEQ ID NO: 52509

SEQ ID NO: 52529 - DNA, 1575 bp, Methanosarcina mazei; identical to SEQ ID NO: 52506

SEQ ID NO: 52530 - DNA, 756 bp, Methanosarcina mazei; identical to SEQ ID NO: 52507

SEQ ID NO: 52531 - DNA, 4398 bp, Methanosarcina mazei; identical to SEQ ID NO: 52508

SEQ ID NO: 52532 - DNA, 1080 bp, Methanosarcina mazei; identical to SEQ ID NO: 52509

SEQ ID NO: 52533 - DNA, 1575 bp, Methanosarcina mazei; identical to SEQ ID NO: 52506

SEQ ID NO: 52534 - DNA, 756 bp, Methanosarcina mazei; identical to SEQ ID NO: 52507

SEQ ID NO: 52535 - DNA, 4398 bp, Methanosarcina mazei; identical to SEQ ID NO: 52508

SEQ ID NO: 52536 - DNA, 1080 bp, Methanosarcina mazei; identical to SEQ ID NO: 52509

SEQ ID NO: 52537 - DNA, 1521 bp, Methanosarcina mazei; identical to SEQ ID NO: 52525

SEQ ID NO: 52538 - DNA, 756 bp, Methanosarcina mazei; identical to SEQ ID NO: 52507

SEQ ID NO: 52539 - DNA, 4398 bp, Methanosarcina mazei; identical to SEQ ID NO: 52508

SEQ ID NO: 52540 - DNA, 1080 bp, Methanosarcina mazei; identical to SEQ ID NO: 52509

SEQ ID NO: 52541 - DNA, 1575 bp, Methanosarcina mazei
ttggaatacgctaaacatttccaggacattaacgaacggatgaggcatttaaaatgttattatccatttttccggatctatgcgtattcttatcggaataatctggaatatgatttaccctatatcgcacttagtgttttgaccttattaatcgaggagggaaaactacgtggacgttccctgaaggtagatgaaattgaggtacatataaagaatatactcaatgaaatgtatatggattatgagactaacagcaaacaggtaacacgtacattattgactattctagaaacggacagagacggagaatcgtatcattttgaatatatggaccctatccgtagaaagaaagatggtcattatgtgcatctgatagaatatgatgtaagtaacaaggcttaccaaatcagtgatgcaggacttgatttcatgataagcatcaaggaactgccagaggaatcaaaaatttctgtgagcttaatcctttttaaaaagcagattgaaaatggttctttcgtaactgcattgaatacggtaagagaactcaatcttgaggttcttcgcaaaaaagaaaaaaaacagaatttgttagagaaaatgctgtatggaggagccgatgtagttgaggattattccattttctcagagggagtttttagccaacttcaacaagaaaaaattttatttgaagaagtcagaaccactcttttagaattaacaaaaaatcacgaagaaatcatcaatatttccaacaaaagtgcgaatgaaaaggatttcttgatccttaagcaaatttctactgagctcgaccgtggttatcagcttcactccggattactgaaggagtatacagacctgccgggagagtatgagaaaatttgtcggatcagggtaaacttgttattcgatagaaaatggcattttaaggaaatcctcgaaaacaatattaggcaaaattatccaaatgatgttcatgttattggaatgcaccctatgttcctacctaaaaccactaggtcttttagtttatacaaaatatttgaatcgcagattgtaagccgtaaaaaatctgaagtttccgaaacaaggcagaatgatgaatggagtgaaaaaaagcttattgatggaacagttgatgaacggcaaagaaacaattttagagtttatgctcatgcgttactcgggtgtgtagaggatcatggcggggatttaacccttgaagtatatcttaagacagttgaagatacacttggacctgaagcactgcaaaatatggatctgattcccttcctgttttcgcttaatgttgatattgatgatgtaaacgcgcaagcctctgataattctcaaaaactgaaaaacaaggaactaaacgtcactcggtttgaatttaataaactaaaattatcgtgccactccaatcgtgaactgatcctagaggcgttactatccgcacatgaagcactcggtctttcaagttccacttttatcgttacatcctttccggacgagataataaatattaaaaaagggttcagtgcttatatatcaaacatgaaatttattatgaagtga

SEQ ID NO: 52542 - DNA, 756 bp, Methanosarcina mazei; identical to SEQ ID NO: 52507

SEQ ID NO: 52543 - DNA, 4398 bp, Methanosarcina mazei; identical to SEQ ID NO: 52508

SEQ ID NO: 52544 - DNA, 1080 bp, Methanosarcina mazei
atggaggaacaagttttagaaatacttgagcaatatgcaaaaaaaagagttgagataaaatacatagttggagaactgaaaaacggcggtataaacttaatttcagatccatggctaaacaggccgtttattgatgtaattaaaaaactgatcgatgagaatgtgctggtccctttgaaaagcgcaaaaaagctgcaacagtatgagggattacctagcaagtatgagattaatagacattacttcagacagtgtgatgaagagataccagcagaagaactgagaggactttcatgcaaactcaatatgagctactatttaaagcacattgaggaatatcgtgcgcatagggagtttatacgcaggattaatgatttaatgatggataatgattgtgaagtccttactgctaatgaaagatcatatttgatattcggggatgaaaaagcaattacttccccaaaaaatgcatctattgacggagaaattattttaaaccgactgaacctgacaatcaaggacataaaggctgagaaaaaaccagaaccgtttttctatattaaagccaaagagtatgaaagtttaagtgatatattagcccggaaaattcttattgtggagaataaggataccttctggacgttcatggatgcaactttaagcagagaacttacagatattcatttacttatatacggggaaggaaacgccgttgtaagtaagtttgagtttatacagatggtgggcggtaagacaactgatcattattattattttggggatatggatcaggaaggaatacttatttttaatcggttaaggagtaccttttcagagtataatattcgtccagcagtttcattatatgaatatatgttgaataaatctgggcaggaaaacgccaaacctctgcggaaatgccgtaaaataaacgaagagtcgctgtctccattcatcgatttcttcagccacgagactagaaaagtaattgaagagattatatctgctcaaaaatacattcctcaagaagttgtcaataaaacagatatgaggaggctgcgtatgattggaatacgctaa

SEQ ID NO: 52545 - DNA, 1575 bp, Methanosarcina mazei; identical to SEQ ID NO: 52506

SEQ ID NO: 52546 - DNA, 756 bp, Methanosarcina mazei; identical to SEQ ID NO: 52507

SEQ ID NO: 52547 - DNA, 4398 bp, Methanosarcina mazei; identical to SEQ ID NO: 52508

SEQ ID NO: 52548 - DNA, 1080 bp, Methanosarcina mazei; identical to SEQ ID NO: 52509

SEQ ID NO: 52549 - DNA, 1587 bp, Methanosarcina sp. 2.H.A.1B.4
ttggattacaataaacgatttgttgactgtgctcagcgaatgaataatatgaagtgttatttcccgtttttttacatatatctgaaccctttcaaagataaaacctatgactttgacatacctttcttggctctggacactctcagctttttatttgaagaaggaaaactgaaaaataggaccttacctctatccgaaattgaagctcattatacaggcatattaaaagccatgtatcctgaccaaagtttcagtcctcaggaaatccatgatattgctatggcaatcactcgaattctggaatctccaaccacagctggtaagaggttcaatttcagttattcaaattacgctgttccgaaggaagaatcattctacctgagcttaattacatatgatctcaagacatcagcatatgaaatatcggatacaggtcttgacctgatgattaataccaaagagttgtttgaggaagctaaaatcgagatcagcctaattttggttcaataccagctcaaaaacgggtacttcgacaacgcattacaaacagtccgtggactcagcgcagctgtttacaggttaaaggacgaaaaaaagtccgtgcttgaacagcttatgtatacaggtattgatgcatttggaacatataaagagtttcgggaccgtgtgcaggcacaactggacacggaaaatacactgtttttagacgtgaacggacacatcgcacgaatgatccatgaactcgaagaccgtctagaaagcgatgatatctccgagaagtatgctgacagagcccagtaccagattttgttggacattaaaaccgagtttgaatcgtgctttaatctatacacgggcttggtgtctgagtataatggtttgttcagagaatttgagaatataagcaagatccgcctgcaacgactcggatcaaaacggttcatgttcgaagatactatgaaagaacatgtatgtgccaaccttcctaatgaagtgcatgtgaaaaaagttcaccccctgctattatcacacatccagaaaaggttcaaccccttgataatatatgaacctcagcagatactccgaaaaaaggtcgagccgataacaaaaattgaaagaaaaatatggaccgatgagctgagtctcgatgaccagatagatgaaaaccagatgacatattttgtagaatactctaaactgttgcttgatctgctcacgacgtcacagaatatagatttaaagacatttttgagtgaggttatgtgcagaaaagggttaaccgcgttgcaaaatcccagcctgatccagttcttggtcgaactcaatattgctgcagaaaatactactaataacgattccgaactgcttaccaacgatccgttcgtgactctgtttgactgtgatgagatatgtaaagccgagaacagaaccctcaggatgatcgaacgttcaatctctgaagcgcagtccttcatggagataccgattaacaaattaaaaatcgtatccatcccaaaagacactatcaccatagatgaaaatgacaagtcaagcatcaaaaacatgacgttttcagtggagtggtaa

SEQ ID NO: 52550 - DNA, 759 bp, Methanosarcina sp. 2.H.A.1B.4
atgacatttgaaaagaaatcgatggaaattgccttcgaaatgctgactgaaattctcaggaaaaacggagtctattcacttgacctctcaaaaaagtcctggtgtctgaaccctgaacaggaatctgagattatggaagcgtttgagtttatcatcaaacaaatgggcctgatcatgtgtgtaaggaataaagtcatttatctgagtcctggtgtggacaaccctgtgtacgggatgacactggaagagatcaaggtccagttaagccagagttttacaaacctgcatgtgtataccgctttcttcattatacacgtaattattactgagttctataaagaatccatgcccgagacccagcgtgcattcatccttaagtctgatttgataaatgcaatcaacactaaagttgatgcattgtcgacacacaccgagctcgataagctcagtgaagagcataattacaacttttccgaaatacgagacctgtggaaagaattgcctgtcatcatgcataggaaaggtagggatgacccaattgagacagggaaaagttctaggtatgcacttgtgaatacaacactcaaattccttgaggcacaggaccttgtccatgtacaggaagatatgatcaggttgactgaacgattcaaagcaatcatcgataatgcgtatcgcaatgaacaggtccagtatggaattgcacaggtgattgaatctttaacatcgacggaggttgatgaatatgccaacaattaa

SEQ ID NO: 52551 - DNA, 4437 bp, Methanosarcina sp. 2.H.A.1B.4
atgccaacaattaattccgtgcggataatcaatgcagttttcaataacggacgcggtacatatgacaatttcacacttgaccctgaagggaatggttttgtgtatgaacttgcaaacggtggtggcaaaactgttttgttgttgctgatgctgcagtgtgtgtacccgaactccaaacttgaaaacaacaaaccattcaaactaatgttcgagggcggagacaaaaacaggactacacatgccatgatcgagtggaagttggataaaggaatacacaactatagttatgctgtcacaggaatatgtgcaaagaaaaagattgcatatgatggtagcgaaaaagatgaacttgactatttcaactacgtcatattttataaccactcaaacgagtatgatatccgcaagatccagttatgtaaaacctacgaagacggctccctggaaagtgtagtgtcgtactcggacactcaatccctgctcaaaaaccttgaaaagaacaagcctcagcactgtgaagtccatgtcttcaacaggaaagaagaatacatggagtttttaaagcggttgggcataatcaaaactgaacttgaaatcatacgcaagatcaatgaaaacgagaacaaactggatacgtacttcaaacgatatgacacgtccaggaaactatttcaagacctgctcatacccacaacatcagaatgtctgaaggacaagtctcgtgtccagggcttgcagagctctgaggacagtactgacaacatcgcagagtccgtgtttaagttcagagacaaaatcttggctctaaaggagctgcagagcaatctgggagactacaggacattacgggacgaagcggcaaaacttgaacactccgtcaacgctgtcattggggtatttcaggcccgcgatgccacagtacacgaagcagctgtccagtataggtcatatgaaagtgccgtgcaggaactcacccatcagatagctgacctgaatgcccagatcagtgaagttgaaaaagaacataaagaatgcgagattggcaagcaattcaacacgttaagggttttagaatccgaacataacctcatgagaattgaactggatgatctgattagaaccaggacagacatcgccgatcgtcataacaaagcagaatatgactggaactttgcccgtgccacggggaaatacgtacaaatcaaggaaagacgcggaaaagtaacagaacgtgaagaacaacgagcaagcctggaaaaaagcaatgaagaactgtacagcacacttaatcggatggggtctgttctgttctctcggtattccgctattcttcttaatctacaggagaattacaatacgaaaaagaaagaacaacgttccatgggagtagaaaaagaccgtatcgtgaaatcacacggcaaatgtgaggaagctcttagaatctctcaagaagatctggacaagaaagaggcaaaactcaaaaaacttgggcagcaggaatcggacactcgcaaacaattaagtgccaacccacaacagccccctgcattgtttgatgtcgaggaggagcgtaaaagaactagggaagacatcatcagtcggaaacaggatcttgaaaacacgaaaagtgaaagcaaacgcttgattgaagaaaaacacaaattggaactgaaacaaatcaaagtcatcaaccagaaagaatccgcagaaggcaaaattaaagagttttcacagaaaatgaatgagtatgactctaaactgaaagaagtacaggagatcttcgcaacatacgatacaacagacattgttgattgtatactcaagttagaggacgagtcgactcgttataccaaggaaaaggttttggcaaaaaacaagctggatcgtttaaagaaacggcttgaatttatagacaagtatgggtacgatattattgatgattccattgaagaagtaaaagccaagctcggtgacactttcaaaaacgccatttacggaatggatcatctgaaacagttggatgaagctgatcgtgtagctgcactgcagaggattccctggcttccaaaagccatgttcgtaagcagtaacgatctcaaatcaatcaccaacaacccatttaagcttgcagtctctgttcaggactcctcggttgtcattgccagcattgataagttcaattccagtgaagtctgttcaacaggagacatatttgttcctcatcgggataccaaccactacatcaacctgctctctactgaaaaagcaaaagcaatcatcgaaaaggatgtggattcggccactagagacatcgaatctgctaaaagatccatcgaaaaaataagaaaaatggagtacaccgttacttcgttcaaaacagagtatgttgacggatatccaaacgggtacgagtcatatttaaaggatcaactggatggtttcaatgctgaactgaccaaactgaatgaggctctttcttctcttgtagatcagattcgtgacacaggaaacaggttcgatcacagcacgtctgtagaatcggccctggagaaaacgatatcggatttgaccaagaaagagaagctgcttgatatcctttatcgcatcgtgaccgaaagttccgaagtcgagacccagttcggtgagttgaagttgcttattcctaagtacaaaaaggaactggaatcgattgacctccataaaactatgcaggaacatgaacttcaacaaatggccgaatgcataaagcagcttgaaaaggaactgaatgttgcaaacgaccacgttgaaaagttcaagaattatgcagacaggccagtagacgagatgggtgccatcggaacagaagaactgcacagccagttcaatggtgttgaagaagcatcccgtgaagaaagagccagcgttatcagactgaatgatgaaattgccgatcacaaggccagaataaatgagctgaccaaagacatcatcgaagttttcagaattccaatggataccctcgaacaacatgatccacagactgcttattcaggcgaatacattgcttctctggaaaaacacaggaatgatcttgtgtcccagcatgctcaacaggatgaaaaatgcaggagtgctgaagtaaagcatagagttcagaagaaagaatttgacgctggaattaaagagtaccataatgtatcgggccgtgaatatatccatgaccccgatcttacggattcagaagagttcaaaagagagttaactcgcttgaatactcgggaattggatttgaataggtcatggtccagtctcaaacgcaaagttcaggatactgataaagtaagggaaactgcccaaaaggaatttggcatgtttagcgtgcttgagggcgaatatgggttgagcaagattacagtgaatatcacaaccgaactcaaacccgttactgaaattagcaagcaaataggagaacggaacgagtccctgaaaacagtaaagaactctttcacccatgctcgccagcagcttcgtgagactgcgctggaattgaaggtaggagcctactatagtgactcgtttgacgttaagttcagggacccagagtctgcccaggaagcaaaccagactgtcataaatgttacagagtatgtaaaggaactggatggaaagatccagcatgttgaatatgaattggagggtctagaaaaggacgaaaacaacataataaaccttatcatgcagtgtaacaggatataccttggttatctgagagagtttgcgaacgcttctaagataaaaactcatgaaggtactgtccgtcctatgatcagcacaaacctggatgcatgcatatacgatgaggaattggctgttcgtaatgtacgggagtatgttggtaagatactgggtaacaaggacataatactcgatgatgtccgtaagatgacaacacccacgaagctgattgaatgtgcagttgatatgaatgcaatcagggtacatgtcctcaaggttgacatccagaaacataccccccagctgtgggataacatcaatgcgtcgggcggacagatcaatgcaatgtacatgatgttcttagcagtgttattctcctacatccgcaagattgtcatcgaccagtcagctctggccacatcaaagatcctgattgttgataacccgttcggaacgacaggttctgcctacctgtgggacgatatatgggcaattctggagaagaacaatattcagttgatatgtcccactcacatgatcaaccccaagatcaggtctttcttcccgaaaagctacttgttgacgaacaagttctctgtggacaacgctgtgaaggtctgcataaaagaagctacctgcaatgaagcgagtgtgaaacgcacgaaagaattcatgtatggccagctgacctttgatgaaaagtttgaagctgagccttaa

SEQ ID NO: 52552 - DNA, 918 bp, Methanosarcina sp. 2.H.A.1B.4
ttgatcagggcaaaaaacccccaggttatctctttttatcaacttgatgaaaaatatctcatcaactcgaccgcttttgctcccatatccctgttatctgacaaacagttatacctagaattgactacaggactatttcacagactaggtaacaattattacctgcagcatttgcaggaatataaagaacatcgcccttacatcctcaggataagcgacctcgtgtccagcagacctgcagaaactctcactgcaaatgaaagagcattcgaattatttggtgacgaaaaagcgttgacatccccagaacatgctgcttttgacgggaatgcagtcctgaaaaaccttgagctaactcttgaggatataggagccgaaatcgtctatgaaccgttcgtatatacaagatccaaaatgtttgatacgcgagatattacaccagttcgcacgatcctgattgtagaaaataaggacacatactggacactgaaaaatgcagttttacattccgatcttgattatatcgatatggtcatatacggagaaggaaaagccattctcagtacgttcagatatatagaagaagtcggtggacgggttaatgaccgctatttctattttggtgacctggaccgcgaaggaattgaaattttcaacctatttaggaaaaaatattctgaatatgaaatcgtaccagcagtgaaatattacgaatacatgatcaacaaggtcggagtagagaatgcaaaagctattcggacccaccaaaaagtaaaggattacagctctttcataggctatttttcagacaccacagggcacaacatcaaaacaatcgtcgaaaataacctgtacatcccgcaggaagcaataaataagacagatataaaggagctgagggtcattggattacaataa

SEQ ID NO: 52553 - DNA, 1575 bp, Methanosarcina mazei; identical to SEQ ID NO: 52506

SEQ ID NO: 52554 - DNA, 756 bp, Methanosarcina mazei; identical to SEQ ID NO: 52507

SEQ ID NO: 52555 - DNA, 4398 bp, Methanosarcina mazei; identical to SEQ ID NO: 52508

SEQ ID NO: 52556 - DNA, 1080 bp, Methanosarcina mazei; identical to SEQ ID NO: 52509

SEQ ID NO: 52557 - DNA, 1575 bp, Methanosarcina mazei; identical to SEQ ID NO: 52506

SEQ ID NO: 52558 - DNA, 756 bp, Methanosarcina mazei; identical to SEQ ID NO: 52507

SEQ ID NO: 52559 - DNA, 4398 bp, Methanosarcina mazei; identical to SEQ ID NO: 52508

SEQ ID NO: 52560 - DNA, 1080 bp, Methanosarcina mazei; identical to SEQ ID NO: 52509

SEQ ID NO: 52561 - DNA, 1575 bp, Methanosarcina mazei; identical to SEQ ID NO: 52506

SEQ ID NO: 52562 - DNA, 756 bp, Methanosarcina mazei; identical to SEQ ID NO: 52507

SEQ ID NO: 52563 - DNA, 4398 bp, Methanosarcina mazei; identical to SEQ ID NO: 52508

SEQ ID NO: 52564 - DNA, 1080 bp, Methanosarcina mazei; identical to SEQ ID NO: 52509

SEQ ID NO: 52565 - DNA, 1521 bp, Methanosarcina mazei; identical to SEQ ID NO: 52525

SEQ ID NO: 52566 - DNA, 756 bp, Methanosarcina mazei; identical to SEQ ID NO: 52507

SEQ ID NO: 52567 - DNA, 4398 bp, Methanosarcina mazei; identical to SEQ ID NO: 52508

SEQ ID NO: 52568 - DNA, 1080 bp, Methanosarcina mazei; identical to SEQ ID NO: 52509

SEQ ID NO: 52569 - DNA, 1575 bp, Methanosarcina mazei; identical to SEQ ID NO: 52506

SEQ ID NO: 52570 - DNA, 756 bp, Methanosarcina mazei; identical to SEQ ID NO: 52507

SEQ ID NO: 52571 - DNA, 4398 bp, Methanosarcina mazei; identical to SEQ ID NO: 52508

SEQ ID NO: 52572 - DNA, 1080 bp, Methanosarcina mazei; identical to SEQ ID NO: 52509

SEQ ID NO: 52573 - DNA, 1575 bp, Methanosarcina mazei; identical to SEQ ID NO: 52506

SEQ ID NO: 52574 - DNA, 756 bp, Methanosarcina mazei; identical to SEQ ID NO: 52507

SEQ ID NO: 52575 - DNA, 4398 bp, Methanosarcina mazei; identical to SEQ ID NO: 52508

SEQ ID NO: 52576 - DNA, 1080 bp, Methanosarcina mazei; identical to SEQ ID NO: 52509

SEQ ID NO: 52577 - DNA, 1575 bp, Methanosarcina mazei; identical to SEQ ID NO: 52541

SEQ ID NO: 52578 - DNA, 756 bp, Methanosarcina mazei; identical to SEQ ID NO: 52507

SEQ ID NO: 52579 - DNA, 4398 bp, Methanosarcina mazei; identical to SEQ ID NO: 52508

SEQ ID NO: 52580 - DNA, 1080 bp, Methanosarcina mazei; identical to SEQ ID NO: 52544

SEQ ID NO: 52581 - DNA, 1575 bp, Methanosarcina mazei; identical to SEQ ID NO: 52541

SEQ ID NO: 52582 - DNA, 756 bp, Methanosarcina mazei; identical to SEQ ID NO: 52507

SEQ ID NO: 52583 - DNA, 4398 bp, Methanosarcina mazei; identical to SEQ ID NO: 52508

SEQ ID NO: 52584 - DNA, 1080 bp, Methanosarcina mazei; identical to SEQ ID NO: 52544

SEQ ID NO: 52585 - DNA, 1575 bp, Methanosarcina mazei; identical to SEQ ID NO: 52506

SEQ ID NO: 52586 - DNA, 645 bp, Methanosarcina mazei
gtgaaatttgaaaaagagaatctaggaatcgcttttgatatgctttatcagatgttgtcaactggctcaattgaaagatttgtgtatccaaaacacttcatgcgttatgaacaagaaagcgaaataagggaagcgcttgatttttgtgctgaaaaactcggactatacgtttgcggacgcggagattcaatatttttgagtgccggagttggaaaccgtgtttttggttatactaatgaagatgttaaaaatgaactcgggagaggattcaaaaaccccgaaatgtacacagtctttttcataatgaatgtaatagtaagcgaattttacaaagaatcctttcatgacacacttcgcataaaccttcctaaaaattaccttataggaattatagaagcaaaaattcgggcattatctgattttgaagatctggataaaatcagtgaagagtataaatttaatttcagggaaattaaagacttatgggatagtttgccaaacgtagaattcagagatgattcagatattgagatcaaacaaaaaggtaccagttcaaagactgcgatcataaatcaaattgcgggcggccaccccaccctaaaggatggggtatgcttcgggccgcccgcccggttgttctggtag

SEQ ID NO: 52587 - DNA, 1080 bp, Methanosarcina mazei; identical to SEQ ID NO: 52544

SEQ ID NO: 52588 - DNA, 1575 bp, Methanosarcina mazei; identical to SEQ ID NO: 52506

SEQ ID NO: 52589 - DNA, 756 bp, Methanosarcina mazei; identical to SEQ ID NO: 52507

SEQ ID NO: 52590 - DNA, 4398 bp, Methanosarcina mazei; identical to SEQ ID NO: 52508

SEQ ID NO: 52591 - DNA, 1080 bp, Methanosarcina mazei; identical to SEQ ID NO: 52509

SEQ ID NO: 52592 - DNA, 1575 bp, Methanosarcina mazei; identical to SEQ ID NO: 52506

SEQ ID NO: 52593 - DNA, 756 bp, Methanosarcina mazei; identical to SEQ ID NO: 52507

SEQ ID NO: 52594 - DNA, 4398 bp, Methanosarcina mazei; identical to SEQ ID NO: 52508

SEQ ID NO: 52595 - DNA, 1080 bp, Methanosarcina mazei; identical to SEQ ID NO: 52509

SEQ ID NO: 52596 - DNA, 1509 bp, Paenibacillus riograndensis SBR5
atgaactggagtgattttggagaacggaataaacggctgaaccccttatggactctgggggcaggcatgaatctcggtgaactgcagccctataaggagatggtagcgctcagcgtgctgcttcaggtctattatctggagctggaatccaatgagcagaggtccagggaggatattgtggagttggcctggagttcactggaacggttcaatattacgaagctgggcactgccgaatctgtggagcggctggtggatggtctgctgtggagcggaagcggcggggattttgaagcctactattatgatgatctgtcccggcagatggccgtgcagaaatacaaatattttacggtggacgaggatgctacacggaccagctgggaagagagcggcaaaaccgtttaccggctgtcggaatatgccatggagctgatcttcatgagccacgagattattgaagaatttcagatcagcatcaagctgctggaaattcagatgcacatcaagcatgggcgggtcacgcgcgctatgcaggatgtaggcgagctgatctcacgggtgcggaagatgacgcagcagcagcaggagtaccgcaatgcgctgcgccggaatcccaagcatatgttcagtgaatacggtgtgctgcggcatcggcggctggaggaaattcacctgcagtttgacgaagagcgcaggcattttgacaacatccaccgatcgctggcccggctcgccaatgatgagaaggatgttatcgacttcaatgagctgcgccagctctcggagagggtcgagctgtccagacgagtgcatgatgagctggctgaggtggtgctgagcatctttgaagcggagacaaatctgcggctgaatttccctgagctattctggggagccgggggctttaatttccgcacgcatatctgggaggaatgggtgaaggccgaagggctgccggatgcggacagcctggaactgctgatcggcgggctgttcacgcccagccaggattttatctacccgctggcctgggcatgggaggagcaggaggtcggctttttgcccgaagatgtattagacgagccggacgaagccggtgaagaagagagcatcccttatacacccaagtccattccctggtcaagcgtttccgagctgtggctgcccgtatttaaaggactggcggagaaaggaagctttaccttcgccgaagaagcatttacggaagaggaacagcgcaaatggtcgggtactccggatgcggttgatctgtgggcgcagtttttccatacggaaattactgtccaaccgcaggatgcggacagccaaggcggggcggctgatgagtgccagaaattaatccggcatctgctggcggcaaatccggagctggaggttctccgcggcaaggtgctgcggacaacgattcagggcagccatcgcccaagcgtcacctggcccggtctggaaatgagtccttataccataactatcatagagaggtga

SEQ ID NO: 52597 - DNA, 759 bp, Paenibacillus riograndensis SBR5
atgaactattcgctagaacaattacagcaggcttcgcggctgttttttgacctgctgcgccggaaggtgatttcgctggatgatcccgcagccgctgaatgccttcaggacaacggagcttatgacgccctgcagtacatggccaaggaaggaggctgccggattatgaattccggacaccgcctgcacctgctggtcaatccgctgggctcgggttttgccagcaatttcacacaactcaggaacaaatattcacggattgagcgcaaaacccatttacatatcatcaacattattattctggtgttcctagccgagatggaccaggatgagcatcatttcaagcccgggcaggacagcatgtcctatattcaaatctcagatcaggtatcctcattgtttcaggcatggatggaaatggacagcgagggcggcttcagcaggcagtggcgcctggatatccaggcgatgcacaaggtctggacaagcctctatatgcagaccaaaagccaggaggaagctgattctcttagcagaggagccggttcccggatcggattgattcatgagggcatgaagctgctggaggaggagcatctggtcttcatctcggagaacgagaagcggattttcccgcgtgaagaattatatgaaagaatgcgttatctgtaccatgatgttgaccgttataaggaactgaaggcactgatcgggcgtaccttgacggagaaggagggggaagcccatgccgcgcattga

SEQ ID NO: 52598 - DNA, 4497 bp, Paenibacillus riograndensis SBR5
atgccgcgcattgagcgaatccggattaccggactgaaatatgaaaagatgctcaaaaagtatgacgatatggttctggacctcagcaatgaggatggaccggccaacacactgattaccctgatgaacggcggcggcaagggtgtgctgctgcaatcgattttccagctgttgattccgaaagcagcctggggtaaggataatgagaaccaggttgaggcttttttccataatcacaaaaaacagctcaagccctacaccttccacgtggccattgaatggcgcctggataacagcgaccgcaatgagtacatgaccaccggcatcgcgatgacggcccacagctctgtggaccagctggagattaaggttgattatctgctctatgccctgctcgactatgaagaacatgctgagcttacactttccacattgccgctctatgacatcgatgccgggggtcccgtgagtttcgagagcattcaacagtttgtgcgggaccaccggggggaaatggcatcctttggaagccacagctcggatctgaaaaaatactataatttcctggcagaacgggatatccatatcggcgagtggcgcaacatgcggcggattaacggtgaagagggcgggattaagggctatttccagaaaaatgatgcctttacgaatcagaatctgttcgaaaagcttattattcccgaaatcggcaccagcttgaacgaaggcctgcctgagcaggaaggctctctccagaaaatgttcatggatgcggcgatcgttgcgcagagactgccgatgctggagcagcgcgagaaggcttttgccgagtttaccgggctggcagcgccgctgcatgagctggtgaagcaggggacggaagcggacctgcactaccgcgaaacagagctgctgggacggcaaatgtacaccgtgatccatgacgagctgaagacagccgaagaggggcgccgcaaaaaagcggacgagctggtacagctccatcaggagtcgcggcagctgcgttttgaagcggataacctgaattacctgcgcagcaaagcggaggccgaccggaagcaggaggatttccaaaagataagcgataatcaaatccgcgcccgccagcgtctggaagattcgaaagcgaaggaaaaggagctggagaccgcccattatctggcccggcggaagcttcagctccgccagatggagcagtggcagaaggaaattgaagccatcgaagggtcgcttgagatgaaggagcgccaagaggtggttcaagccgcaaaagaagagctgcgccagcagtgggagcaagtgtacaagctgtggcaggggcggatttcggcgttcagccgccgccagcaatccttaagcgcagaggaagctgcccgccgcaaggaacgggaaagctgtctgctggagctgggcggcctggacagccggattcacgagctgaccgcctccatccgccaatatacggaggcgctcggggtgttcgccgcccgccatgggcaggaagccgcccattccccggctgcatcgcttcagcgggccatcgctgcggccaaaggcttcgccgagaatatcgctgcgctgaatgaacggcgtaaggctgcggatgaagaccgcttccggctgcatacgaagcatacccaggtcagcgggaagctccttgcccatgagcagcaggagggggagctgcaggaacagctggatattcagctgaaccgggaatcgcagctctggtcacagctggtcgtgctgctggagctgtatgaagagcataataggctgggcgcgacaggcttgttcgaagcgaaggctgttgtgcaggagcgcttcatccgcaggctggacgaagccgaggcgcagaccaaacggctacgaagagattattatcatcaattgctggatgttgagctgcagcatgaagcctactggctgccgaacagcgatctgctgacggtgaaggacaggctcgatgcgctgaagatcagctcgatgctgggcagcgccttcctgaacgatcagccttatctgatccgtgaggaagagctggaccggcatccgctgctgccttacggtctcattgttactgaacgagaggctgccaagctgcagccgggaatgctgaaggatctgctgctcaaatcagcagtcccggtcttcatccgcgagcagatggcgcagcctgcggagcagcccttcctgctgctgggcggacaaggcccgcagatggtgctgcagccggaccgttttctggagtggaagcagggaatctctgcaagactcaaggatcaggaagtggagctgcaggatgcggagggatatctggcgaagctgaaatccgcaagacaggagtatgagcggttgttccagggtgagcattcgattagcctcaagggcaagctgaaagctctgaacggcttgcagaatgagctgcgcataagtttgggcgaactgaataccgaaattagcgaaaatgcagctgcaattggtgtgattgtgcgggaaatctccgaatgcgaagccggcaaagaggaacacgaggagaaagcggcagcgctgcgcgaatggaacgaacggacccataaacaggaacaggactataaagacaagcagaaggcagttgaccgcagaagcgagctgaacaaagaaataacaggcaaggaacagcagctggcacagctaaaggccgagctggacagtacgtctctggaacgggaaaggtgggttggagatacccggtattcattgttcccaaggctccaaacctggttccctgagcttgtctacccggccggactacaggcttcctcgacccaacatgcagaggatcagccggagttcccccttgatgcttccattcaggacaaactgcttcagatcctgagtactctggagagccttcagcaatccctgagccgcaatgagctggaaatccgcacaagggccgcacagatcaaagcagcggctgaacagctggctgagcttgaagcagccgttcagcagattgaggcgaattggcgcaatgtgccggagccaaacgatacacctgacgcgatcatggcagccagaacacggcagaagagcgacactggaatgctggacgaggactatcagcttgtccgcgattccttcgtccgctgtcagaccgagctggaccatctgcagaagcagctggccaaagcagagaaggcgatcaaggaaaagcatgagcgggctgtggagctctggaatgaaccgctggacccgaaagaagacgagatcagagaacggtcccgtgagaatgagtatgcactgaacaactgtaagcagaccctggcttcactggatcaatggcttcagacacttgccagccagagcaaagtcatggaaacccatgtggaagggcggctgcagctgcgtgacattcctgaagaagtacagctgcgcactagagaggactgcgagcaggcggtggctgaatggctgctgcgcagcaaggaaagccgcagtgaacggagcgaaatttcacggaaagtcaaggaagagaaaacctcactcagcggcaagattgccaaaggcggctggaatgccgagctggaaaccaagatccaggaacgtctgaacaccgtgcattgggaagatttctccattgcgctgcaggtgctggactcgatgctccagagctcgcaggatcagattgagagcatccgcagcgataaggaaggcatggagctgtcccgcaaaatgtgggttggccgggctgcgaagcgggtagtacagatcgttgacattttgaagcgcatggaacgccggatgatcatccacaacgagaacggccatgcgttcccgctggtgcgtttgaattataaaaacatcaatgtgcccaagacaaccgaagatatcgaaccgctggtgagcgattacttcaaccgctgcatcagcagcctgctggagaaatttccgaagatcgagcaggtaccggcagcggcggtcaaggatctgatcagcgacggcaagattgtctacgccgccctgcagaaccgcttcccggtcttgcaggtctataagccggtgacggagaattatttcctctatgcggctccggaggagtatcactactctgattgggaagtcatcaaccggggagcattggacgaagcggtcggcagcggcgggcagcgccagtcggtccagctgctggtggcgatgatgatcatgacccataaacgggtcaaccgcgagaataaaggctggacggtttttttatatgacaatccgtttggtgaaatggtatctaataacgtgcttgatccggtattcgaaatctccaaggcactgcgcttccagtggctaatcgttactccgccggagctggtgaaaaatgatgttagcgtccgcttcggcgtctactggcagctttattttggcggtgaaaagggcgacatgctggaatccacgctcataaaaggcggacgcaagctgattccggcctcactgttctga

SEQ ID NO: 52599 - DNA, 1071 bp, Paenibacillus riograndensis SBR5
ttgaaagagttaatcatggaggtcattgagcgtaaatacggtgcagtgcgccggacgagaaccaaactgaagcttgagaagcttgagcaggatatcattggcacctatgagtaccgttcggattatgtggatgcaggcggattctccacgtttcaagcggggatgaaggagcttttggctgaaaagtatctaatcccgctgatccggccaaagaaatacaagtcttctgctctggatgaagtctattggctggctgaaacggcttccactacgggcggctggaacgaggcttccatgctgcgggtattggctgcgcatccgctgaatcttgactattacatcaaccatcccgctgagcagacggtgcaagtatgggaatacatagagcggatttatacttttctgcggaccgcaggggagcgggaaatcatcacccgggaagaacgctcactggagctgttcgatgatgagaagtttctgtctgaaaaagaaggcgcccaactcctaaagagactgggcattacactggagacactcaaagcagtgaccgttcgggaacattttgagtattacccagagtctttgcagtctgtgcgcagtatcctgatttcagagaatcattctttttatgactctgccaaaagactgatcaaagcaggcaaatccgtttgcggcttgcagccggatatgctgatttacggtgaaggctggaagatcgtcagcagcttaatgtttcttgcggaactggatgcggacgcacaaggggcttcaattggctatgttggcgatatggacaaggcgggctgggatatttacggaaacctgaagctcagctatccgcacctaaagctgaacctggcgcttacggtttatgaatatatggccaattttgcgaaacacacatacccctatgcaaatgaacagaaatgcaccgccccccacttggagattatgctgcaagaggtgtctgcggttccccggctgaagctgtgtatcaagagattgttagaagataataagcggattccccaggaagtcctaaactacgaagtgatggcgaggttggcgtga

SEQ ID NO: 52600 - DNA, 1506 bp, Bacillus sp. SA2-6
gtgaacgaatcatgggaaggctttgcccagcggatgcagcgcttgaatcccctgtttgagcttgggaggggaatggaagtgggcgagctgaagcctcatctccagaccatcctcatgcaggtgctgctcaccatcttttaccgcgaattgaacgatgatgaccagcgccgcaaatcggacatccgctatatcgtggaagatacaatcaagcaaatgaagctgctggcagacgacaaacagatggaccggatcacgagcgggctgctgtaccagggaaaggaagagtacagcaagccctttgaagctttatattatgatgaaatacggcaatcctgggagacgcaggtgttcaggtatgtgaccatggatgaactgtacacgaatttggaaatgggaagctcgattgtctataagctgacagatgtagcccaggaaatgatttttatgagcagggaaatggcggaggaattttcaatcacgattgaacagctttacagcatgcagctgatcaagaacggaaacttccgcaaagcgacccggaacctggaccatctgatttcacgggtgaatcgcctgatggccaatgagttcaccttccaaaaggaaatgatcaataatcctaaaatcctgctcgtggaagaaggaatgcaaagggccgacaaccgggaggaaatcgaaaagcagtttgaggaagaaaagacgcactttcgcaccatcctgagcatgattgaaaaaacaaaacagcggaacgaagaagattttatccaaagggaattggcgattctgcaggagaaaatcagccatacaaggcagctgcatgaccgctttgccaagctggtgatccagaatatctccaatgagatcaaactgaaagcggagaatccttccctgttttgggaaaacagcctggtgtcgtttcgtgagcattattacgaaaactggctgatgaaggaaggagcccactccctggatactatcgaaaaagtcctagctcctttgttttcgcctaaaaatgaatttattctcccgcttgactggatttggggcgagcaggaattcaacgaacagcagctagcggatgtggtcatcgaagaggagaccgaagaccgtgcacctacacagcgagtaaccaactgggattccgtcatcaaggcatggagctatgtgttccagtatttgcagacgtacggagagttttccctgatgaagctggcagagcttccaatggaagtgcaggatttgtggtttgaggaatccgagagcatcgacttatggatgatgttcgataaaaagccgctgaaggtccaggtgctgcaccggaaggaagaaacattaagcgatgagcgggaaatccttctgtttaaactgatgatggaatatccgcaattccagatgtttgaaggcctgaagcttttcacgcagtttgattcccaggcagagcctttcctctggcaccagatgaaaatcaccccttttaaaatatgtgttcaggaggagagaggatga

SEQ ID NO: 52601 - DNA, 747 bp, Bacillus sp. SA2-6
atgaatgcagaaagaatcaaaaaagcgtcagctgtctattttacactcttaaaagagaaagtcatcgatgaaaacagcgaacacttccagatctattttgacccggaagtgaggcagacggtgctgctattggcggacgaatctggtacatatatcattgagtcgccaaaacggatccaattggtggtccagccaaccggctctgtgtttgcaacgaattttacccatatgaaggataagcataaacaaatcgaaacaaagaagcacttccatctcatcagcgtgatcatcatgtcattcctggccggcatcgaccgcaatcaggcagcaaaaatccggacaaagcgggaaggaatctctttttacaccctggagcggcaagtcaacgacctaatcatgaattgggacagcatcctaaaaaatcagcctggctttggcgaggaacagaagatcgacgcgaaggaagtggtgaccgcctggaagtacatggaggtggacaccgaggattacggtcttaaaaaagggaacagaaggacgagaatcggcttgattgcgagcgcgatgaaattattggagacagaggggctgatctatgttcttgatcaggctgatattccaaaggccatcccgcgccaggagctttttgaacgcattgattatctgtaccatgattatgaccgttatgaattatttaagaaactagtaacaccagaggagggtgagcatgccgaaaatccatcgaattag

SEQ ID NO: 52602 - DNA, 4461 bp, Bacillus sp. SA2-6
atgccgaaaatccatcgaattagaatcgtcggcctcaagtatgatggcatgcaaaagcaatacagagacaccactttcaacttccataatgaccagacctcgacgaatggcctcattgcgatgatgaatggaggcggaaaaggggtgttcctgcagaccatcttccaaatcctgaagcctggaacttcgtggggaaaacaaaataaccgttattaccagcagttcttttttaaccataaagagcagtttatcccctacaccttccatgtggtcattcagtgggaactggacggagccgaccgccgccatctcgtcaccgggggaatgttctcggccgaacagcggatctcaatgagtgaggacgggaatgaaagcaggacgctcgagcaggaagcgaaaatccttccgaatatcactttttatacccgggaatttgaaaagagggaagaggcggctctggagcatatcccgctctttgaaaacgaggaggtcgctgaaacagaaagcctgaaggactatttgaagtggaatggctatgacgtctaccgcgatacgaaaaagcactaccgcatcctggatacatacggaatcgaccgtaaagactgggatatcctgaaggacatcaacaaggatgaaggcggcgtcggcaaatatttcgaaggagcggaggatgaccattccctgttccaaaagcggatcattccgacggtcagccaggtactgcatcggacagagcaccaaaagaacgaccttgtcgagattttcaagagccaggccagcatcgcgaaggatctgccggtattgcttaagcgggagcaggcgcataaagagtttcttgaggacattgttccatttgaggatcacctggcaaagggagtccatcacaaagaaatcgtcgaggcaagcatgaaggaaggcaggcagctccttggcgcgctccagcatttgaagcagtatgaagaagaaacgctgctttcgctggaaaaagacatggaaaagcttatggaaaagcaggcagacctgcgctttcaaaaagacaacctggaatatgccaaagcgcacagagaggtcatggattgggagaagaagctgtcggaagaaagccaaaagcatgcctccctgcaaaaagtggcacttgagaaacaggaacggaaggaacaacttgtttttcaagctttattaaaagagtggagcgaaaacgaaagcagcatcaccgcgcttgcccagcaggcagaaaaactggaacaaaacagcggcctggagcaagtgaatgaaagaatggaggagatcagggaggaagcagccggccaatggaaccaatccttccaagccattcaagaagatgtgaagaagcatgttggctaccagaagtttttaaagaaaaaggccaaggagctgtcgcgccaggataagcataaaacacaggagattgcccagctgggaacggaaattgatttcctttatacccaaatgcatgcttttgaatcgaaggaagccgcactgatcgaggaatttggcgaccgcttaacctacgattttaagggctttgtcgacagcctttccaggcagattgatgataagaaggccaagattgaggacctgcaggctaaagagaaagcatccagtgaaaagcagacggaactggcatctgcaaagggaacgctagtccagtcgatccagcattgtgaagaaaaaataaaagagttgaagtcggcctctgaagagcagaaacaacgagaaaccaagctggccgacaagctgcacggtttgctcgatgatgcaggtacaccattcacccgctcactcttgtcgaaatacagcctgaagcttgaagaaatgcttgatcataaccgccagcaggctgaaacgctgaaaaaagagctttgggaaacacagcttgatgattccctgaatgacgaacccttctggattgccaataatgatgtaaaggaattaaaggaatggatcgatgaaaaaaccggcattgatgtcttttacggaacgcaattccttcaatcgctaagcccggaggatttggcaaatacccttatggcccatccgctccttccatacggcttggtggtgaatcagcatcaatggcaaaaaatcaatgtgcaggttctttcaggcagaatgtataaaagccctgtgccgatttttatgcgcgaggaaatgaacaaggaacagcattcttcttcctttgtggtcatgaacggaacagaaaaagagctgctgcatgaaaaaaacatgttcacacagtggaaaataaagattgcgaaacttatagaagacaagaaagagactcttgttgaaatggaaaaaacggaaaactccctgcgagccgtcctgaaggaaatcgaccggtttttatcgagggagctttcaagtgagattgaaaaagcagtcattgaggagcaaaccctgcttttctcaacgaaagccaaactgcgggaaatcaacgcccaggtagataaagaaaaggaatggcagctggagcttaaagatcagcgggaaaaagcaacccgcaaaatcgagaagctgacgaaggatgtccaaaccctagaggcttttgaagaggaaaagacgcttcatcaggaaaataagcgggtgaaagcagaaaaagagaaacaaaaggatgttttgggcgcccagcaggcggaaatcaatgcggaatatgaaaatatcgttgaaacgcagaccagctggaacgaaacatacctcgagtggaagcatgctgccgagcaaagcatcaaggaaatttcttattttataaaggaagcagcttttccatctggtgaaaaagcagagctttccgaagaagggccgcgcttatcgtccaatgtactggcagagctcatcggaagcgttgaagagcttaagcagctgcagaagtccaaggaggaacaagcaagggaattgcttgtgattcaggcgaaaatagaaggagaacaaaagcagcagaaaaagctggagaaaaagctccatactcataatgaagattggaaggacgctccggaacctgaagagccaatttccatgctggaaaacatgctgcaaaccgcccaaaaggaaacaaaggcagcagagaaagaagaacgggaacagggcacgaaggtgaccgtggcggaaacgtccctggaacttgccaaggggcagcgtgaaaagtcagccaagaaagtcgccaaacatgaaagaaagcctgaagaatgggaagaccttgacctggaaatcaaagccgtcgagattaaagaccagcagaaaataacaaaagacgaaatcaagcagaccgaaacagcacaaaaagagacagaggcgaaaatcaccggctatgagggggatctgctgaccttatccgtcatcctcaaagaggaagcggctccgtttacagacgatgatttggagacaatccggaatcaagggaagcaaagcattctatcgtggtgcggggaacatcaggccatccaggaagaaggccaggaaaagcatgcgaaaatcgagcaatcattgcgcaatctaaagctcatgatcgagggcaaggattgggaggttcgctttaagaatgaagtcttaacgacactggatcatatggatacgaggcattaccaccatatccaaagcgttgtgaaaaacatgaagcgtttctcgcaaagcggactggaacagctcgagcgtgacaaggaaagggcagagaaggcgcagaacttctgggctagccgcgcaagcatgaaggtgatgggcatttccgaaggaatccgctccatgattgcgaaaatgaagctgaaaaatgaacggggcaccttcccgcttgtccagcttaaagaagatatcctcccgaaaaaggcggaagacatcgagccgctgctgaaacagcattttgtgtcggcgatcaacaaaatcaccagaaaatatgacaccattgatgaccagaaccgggagcttgaccaggaaatcaaacagctgatcagcgatgaacaaatcctgttcgtttcactccggaatcgttatcccgagctccttgtctacaatatgaggacagataatgcctttatgtacggtaaaccgcagcgcgaacattattccacctggcagaccatcaatcaaggctccaggacgaaatcggatggcagcggcgggcaaaagctgtcagcccggatggtcatgatgatgatgctcttgtcggttaaaggcgaaagcaaccaaagctgggttcctttaatctgtgacaatccgtttggccaggcggcctcggcccatgtactcgacccaattttcgccgtggctgaaaaactgaagttccagtttatcgtcgtcacgccgcctgaattggtaaaaacggaaatcagccaacgatttgagtcctattataagttggacttcatccgcgaaaaagggaaggaaatcgtatccgatacagttgtaccggcattcaggatttatcagagtgaggaagttgttcaatag

SEQ ID NO: 52603 - DNA, 1065 bp, Bacillus sp. SA2-6
atgaatatcattgaaaccagggtgagagggtttatcgctgatatccagcatcctaaacagaaaaagaaaataaatataaatgatttggaattccagcttcgcagactgctggataactattttgagatggacggatattcgcacttttatgctgcggtccagaaccttcaggaagagggcattctgattccaatccaaaataatcaatacaatggcagaacaccagggcttcccctatattactgggtgaatttaaaagtccgggaagctaaatgggatcgccttgaaatgatgaaattaagcgatgtgtttgatttttccttttatgagcggcatcccgaatggcagacggaagaagaatggacccggattcggaatgtatatatgttcctccaatcaagccaggagcgggctatcgtgtcactcgaagaacggagcctggagctgttcggccatgaaaagttcctgatggacgtcgaccgctttcctgagggaaagggctttttatccagaatcggagtttcggaagagcagcttaaaatagtaaaatacggggagccgtttgtcttttggatgaaacaggggaaagagatcaaggatattcagcgcgttttgattgtcgaaaatctatcattctttcatacttccattcaattattggaagacaatcagcttgattatgagcctcaactgatcatttatggagaaggcgccaaaatcgaacgaagcttttcgtttttctttaggatgtttccgccgaagccgtatcttttctattatgcgggcgatctggatgccgcagggtacggaatcctcattcggcttatggataaatataaggattgctgcatccagccagccttgaaaatttaccgcaagatgatggaatgcctggagcaaggcaatgaccaaaaaggcggccagctccaaaatcttcgataccgggatgccttctttgggtggtttacagaagaagagcaagctctgctccagcaattgtgggaggaaaacaaaagaatcccgcaggaagtgttaacaatcgaaacatggaggagatggatgtga

SEQ ID NO: 52604 - DNA, 681 bp, Paenibacillus durus ATCC 35681
atgtcgttagaagaaccggagagcttacacagcaatctgccgctgggggcgatggaacggctgtccgcggtgctcagtcccgatgaggaatatgcatttgtgcagattatgttctcgtcgtcggctgcggtccgcagcggcagcttcggcctgtcccggcgcgaggtgatgaagattctgaagctggagccaggggatgagcagggatttgcttcttttgtgaaaagggtgaatcaatcggtagcccgctattacaggcttatctatgatgagcgcagagaccgggcggtcgtgctgattcatgtgcccgccagacaggcgagagagctgttgtcctccgagagtctggctctactgatgtttattttttatcaccaggaagtgctgcaaaatgattacaccctgtttacccaattgctggaggcgttcgggcatgaatcgctggatgtaaggcggaaaatcctggcgaatctcgatacgcttatcaagctgggcgccgtgtcccgctatgagaatccgtccaatgaggaagcctatgccctaaccgcgatcggggcgcggctgttctcggattcctatctgaagcggttcgcggaattcagtcattcccagcaattgaatatggacgatgtgctgaagttttttaaacgctacaatctggaggcaggtgagggatattga

SEQ ID NO: 52605 - DNA, 3234 bp, Paenibacillus durus ATCC 35681
ttgaacccctgggcgctggaatttagcggcatccgcgatttctcggatacgaggctagagtggggcggaccggaagaccatgtgctgatcggcggaccgaacggctcgggcaaatcaacgattacgttctgcctgggagcagtgctggcttccaccaaagtagatttagagggactgcgttcccgcaatctgccgccggaccgtgtgtggcgggcgacgattcagcttatttttgccaacatcggaacaagtcccgtcgacgcggccgcgtacatcggctttcggctgaatctggagcagaaacccggcgatcccttgcggaaggaatactttatttgcgagggcaatgagccgtggaaatggaataaagagacccgctatacgccgggagacagcacgaaccatcttcatgagtaccggcatcagctccagcataaatacaaagtggacccggatgccttttacctgatctggtatcagcaggatgtgaaccaattcgctgtgatgcggccggaggagcgtttccgtattttcagcgagatgaccggtatagagcggatgcagcacaactgggaaaaggtgaaggaggaacgcaaagacgcgcagtcggcgcttcagaccgctgaaagcaaccaacattcgcataggctgaacctgggcaactggcagcaggagcgggaccggctgatcagccggaacgaacggcgcaggcttggtctgaagagcgtactaaccgcttcagctgcccttgagcggctgtacggcagggagcaggagcttctgaaggagcagacggatgagcttgaagagcgccatacggatgaactggaccgccggatgaagctggaggaagagcatcaagcttaccttaaggagctggaagaaagaacacggcgcatggaagaactaacccggcagcttgaggaagtggaaggcgaagcgtcgaaagagcgggccctgcgcgggcaattgaatgacgagtaccgtcagcttgaagatattctcagggagctggacaaacagatgcgggcgattccctactccagagccgaggtggaagaacggcttgcgcaggaccgggcaaagatgggggatacggaagccaaaggccgggagacggaggaggcttacaaggaggcgcagacgcatctggactggctggccgctgaaatcggcaagttggagtatgccctggaggaagacttccggaggctcggcgatgccaagaaaatgctggcccaatacgggggaagcgccgctctcgaacgggaagcggaaagtctggaaagcaagcgttcttccctgcgtgacagcgggcgcgagttggagctgagcatccggtcgcttgcggacgagcttgaggcgttgaccaagggaaccgggatgtacagcttgaggcaggaagcgtctatccgccgtctgcgcggcaaaggtatgaccgtctatgctcttcgcgatctgctggagatggatgagcatattccgctggagcgggaggatcagctcgaagctgttaaatatacgctgttcgtggatgcaaggggcttcgcggctccgacggatgtctaccatgtggagctgccttcagtggtaccggaacgaacggcggacgagctggctctacttggacttcgggtgaaaaaggatctcgacgaccagacctacgctgcggcccagaaagcgttgtggtgggtcggggagctggtatccggctccgattcttccaggccccggctgaagaatggccagcttgtcgattccctgggtcggagaggcccgcaggaagacaagcggtggattcttaacccgcgcggaatcaagctgcgggcggagcgcgcccggcaagagctggggaagctggagcttcagcttgaagccgtccgccgcaatctcgcggaatgcgaggaacggctgaatcttatccgttcggtacttcagcttattaaagaggcggagacggttgtgggcgccgtcgccgagcgggatttgcgcgggcgcgaactggaccggaaggccggagagcagaggaaatggatggacatccggaaccgttctgccgaagagcggcagagattgaatctggcgtcggccgagcttgcggtccggcttgaagctctggaaggctaccggcaagtctacgaccgcgccgatcaggaaagctcgaagatcgagcggttcgggcagcttggcagagagctggaagcctccggagaacggctgcaaggactggagagagagcttcaggacctgctcgcggaaagcgaccggctggaccgctcgttggaatcgacgaagaggcggatcagggagaagcaccagtacattgaagagtcgaaaaaagcgctggaggcgctgggcagggagaagcaggagcagtttgagcgcctggaagttatccaggagaaccgcgctgcggagcggcagttctacagcgattggaccgatcgcctgcgagtggtatatgccgggcttcttgaggagtccccggattttcccgacgtaccggactggaatccggcgcaggccaagtcgcataaggaagacgcccttgttcagctaaacctggcgctgggcgaaaccgtcgacgagaacgcgcttgaaaattacgagaaggtaaagcaagagtttgaacggggcgagcaggaggtgcaggacgcccgcatgctgcttcgccagcttgaggaaagtcttgccgaactggaggagaagctggtcagcacgaccaattatgagatcaagcgggtgggcagccggtttgtccgctacatggaccagttctcgttcgacggcgaagtgagctgggacatgcaggagatgaagcaggggaatatcaagtattacctgaacatcaaagccagaaagcagggtcaccgcggcccgctggaggaagtcggcatgaaaggccggggcggacgggtcggcaaaggggtgtcgggcggcgaggaatcgctcagctcgcttctgttcgctctcgcgctgctgaagacgattcaggcggagccgggatacatcgtgctggacgaattcgacagcgccctggacgaaggcagaaaatccaaagtattcgcgctgtatgagcaggaactgtctagaaaaatgattatcctgtctccgaaatcccatgaatcggattatttgcggcattttaacgaagcgtttgtcgtgtatcatgacgcaagaatcccgaaaagcgctgtaattagaattaagaaaaaagctgaaaataaggtctaa

SEQ ID NO: 52606 - DNA, 1419 bp, Paenibacillus durus ATCC 35681
ataaggggatgtaaaagcttgttaaatacggagattatcgatttcatatgtactcattatttatctaaaggctcggagcttgagcaagcgactctcagtgaatcaggcaggcgtttcgaaattgatattttcaaggcaggctcaagaacacgcaggcgcataggaaaaatcaccggcgggcatacggataccgatcttgctcatgaaaatagtgtccctgaagtgctggaacggctgtttcatagcccaagggtccggaagagcgagcgtgagctgctgcgtgaaatccgggatgcttcgctgtgtaatggcggattggcggagggatggattatgcggaaagaccggtacgagtccgatgggaaaaccgtagcacggacggagtatgttatggggtatacactttatattcatctggagcggaaaagaagacgagcacaggaacgggagaagcagaccattgcgaactggaacgcgaggcttggaaccatactggaagagcggaataaagtcccggatggccggatcgggaaggaaaaccggcatttattgtggaattttatagaggatatggcagcgaagctcgaacactgttccgattataaagctgtcttcaaggtcatttggaacaaagagcagccatggcagggcagaaagctggagttctatgttgattttattatcgcattggccgaaatcgcaaccgcccgcgctcattttgactggaaggagataggggcgcgttactaccgggaaatcggcggttcgaagcgctttgatccctataaggcggattttctggaggcggcggaggaacaaatcggctgtcctctcccgctgattgggctgtgcagcgccggaacggttaccccgatttactttgctggagaactgagcggcaggggcggattcgcttatccgcaaggctttttgcatgcggttacggatgtgaccgtttggaagaccgaattcagaaccggctgccatacattatggctaactgagaatcgggccgtgctcacccggatgagcgctgaaccggactttctgctgaactcgggcagtttgattatcgggctggacggacagcttagaagcggacaccgtaagctgatcaaggatgtattaaccggctcgaagtcgattgggcaggtcattgtatggtgcgacggcgacaagtccgggctggacatcgcaagaaacgtgcatgccttgctggattcggcgtctccggaggcggtgaaatggattttgccggctgccggagaccctaagggcaacgatccgcgctcctgtcttttccgtacatgggaggcttatgaggcagcggcgcttgccggactggaccggaacgaagcagatgagcaggaagcggaaatgggggatacggacatttggaacatgtggatggatctttga

SEQ ID NO: 52607 - DNA, 1467 bp, Enterobacter aerogenes; identical to SEQ ID NO: 51883

SEQ ID NO: 52608 - DNA, 4437 bp, Enterobacter aerogenes
atgtggctgattaaacgggtttatatggatggcgcaggccatgaagaagctttctacaaggacctcacactggactatattggcctgtctcaagcggtcggtagccctgttgttgaaggcctgcgctcgcccgtcagaaatgcgaaggtggtgaccagtacttatcagcagcttgtaaatgggggcggtaagtcaacctacatcgcgctgctgttatcgatttttgagccgtccgttagtgacttcacccaatatctggcaaatcatcgccagagtgaataccactaccgcaattacttctataaagaactctctgttgttttggttgagatggtcaatgaatcaggacaaacgttattactgggacatgctcatcagcgtaatggagatgatgttgaccgcacactgtttatttgtgatgcgcccgactccctgatgggcgcgccgtttgatgaagtcccttcttattcccgcgcggaacgcaattctgagctgcgcccctatgctaatagcctgcgcagttttgatagctggcttagtctcaaggccagtagtgaaggcggcatgcattggcgtaaaaccaccagacagaacgagtggcgcgcatttttactggaacaacaaattaacgttgatcttatcaaaacaatggtgaccttcaactccgaagaaggtggcctgacccgttttatcgaatacaaaactgaacatgatttccttggcgcgtttttcgcctgcaccatgtctaaagatgcggctgagcggctgcgggaactagtagcgcatgaagttgaacgtcagggagagttagaggggatccgtcgtaacgagtccttcctgaaggatgtgctggctaactggctggcgtttcttgagccggctaaacagctggaaagcatccaggcgcagcagcaactgctggatgatggcttccgggaagcaatgcgcgatctcgcagcctttgtcggggatgctcaggttgaacagacgcagcttgaagataacatggagagtttgcaaacgcatattggtcaggcgatgtctctgcgtgagcagttaggtaagcgcagagctctgcttgaatatgatttcgtgcagtatcagttcgacaagcaaaaagcgatagtcgatgcgcttcaagacgaagccgataccaatcagcgccagattgagattactcaagctgctatagactacaaagcctatgctaaggccctgaatgagtaccgccaggcagatgaagatctgaaggtattccaaagtgaaacggaaaggccgctacaggtgattttcgagcgtactgctggcgaagccttgggcacattagagtgggcaatcgacagacatcgccagcaggaggctacgcttgaggaagaattagggcagatggatagggaaagcaatacccttaaacaatcatacgacgaactacaaaagatgctgggtggcctggaggcggatcgtgagagatataaaagagacaaacggcagggcgaatcgcaacggggccaactatgtgaagctgggttgatccagaaggatgaaacaccagtagcagcccaataccgactggaattaaccttacgcaatgcacagcagagtgaagagctggctcatacaattcttcatcagaaagagcaggcgctggaagcacagctgaatgttgtgcgggaggcatcaattgagaaaagtgaggcccagcaaaaactcattctggctgaacaaaaacaccagtcagctgtggatagtgctttagttttagcaaaaacctatcaaaaactgccaacgtcaatgcaacatgatctagatattgaagacacgagttggcacagcgagctgtgtggattgcagctcgacaaggtattgaatgcgaactctcacacgctgaatggaatgaaagagcgtttactgcaagcccggcacgaactggacgagttaaggatgacgggacatgaactggtcgcaaagcaggtcaatgaggcacttgaagcgttttatgcggcgggtattgcacgggataagctctggacatttccacactatttggcctctgtttacaacgatgatgcacaaaagattgctgcggtgatcgatcaaaaccctggccgctacctgagcctggtcgcactcgacaatgtaacgtttgaacaggtccataaaattagtgagatcttgccctggaagaaggcacctattgctatttacctgctggatgaagcacaagatctccgccgagaaacgtctgaattagtacaggtcgtcctctcaaaccacgataagcatggatatagccaggctgcttacgaagcccggctgcaagacctggagaatatcgtagcgtcgcaggaagtcagtgtgaaggctgcaaagagcgccttcaaagtactggaatatttcagtaatgaatggcgtctgcattatgaacagtatggtaagcattgggcgggactgcttgaccaacaggagcaggctctcttaatactggaaaatgctgatgcagtacttaagcaagctgagcatgatgagcaaacactgcgtgacgagaagagagatgccctggtgaggttaaacaacgcccgacagcagaaaattcgggcagaaaaagcacatgataaactaagcctttttgtagaaacagaatgggcgaagcgtgaaacggcgataatgaaaatggagcagttagctgcacagattcaacgaagcaaggacactatttgcacccagaaagagagactggaacggctgaacgaaatcgagaagaacaagctctccgagaaaacccttttaaatatccagatgggcaactggagtaatctgtgtaacgagccgttctattcagagattacggcgactgaaggtatggtaggacgaagccccgaagatgcccatgagatggcagctcaggcgcacaaaaaattgctcgaagcagccagcggtgatcaagtgaccgctctcaagcaacaactgaaagatgctgaacaggcacaacgttctgcctctgagcgtttgatcgctcaccccacctacaatacatatccggacgaggtaaaagcggcggccatcaatgagctaacggtcattaataaccgcatcgtacgcctcaacgaacagcagaagcaattcacgcaaaatctaattaattctcaggtaactctgcaaaatttttcccaaagctgcgaggaggctagtaaagcaattgacgaggattttgtctgggaagagaagcccattgagatagagacaatccaaacgtctctggctgaaatcgtcaacagcctccatgaaattgaataccagctaaaacttcacctggagcaaaagaagctgcagttgcaaaagattgaaaatgtgaaggaacggctacagaacgccaaaacagctcaagcgatgatccagcacattacgccgacctctgcggcgggtctacctggcaggatccagagcatcactgaatatgctgacaatctggcgacacaatgccaaatgtatgccggtctaaatgaaacgctaaaacagcaaaatatacgcgtctctacggtctggggaaaattccgcaaacggatcgaagaagagttggccaaggatccagacgcccaagccagtcaggaatacttacggcagttggactcaatcgcaacttatcatgaagtgctgggcgatttggacagggtcggtacagggatcacgcaggtattcgaagctgtgcaggatagcctggaacaattccagcgttcgattgatctgactgtcacccatctgactgctcatctggaaggggcgattaaacttctcaagcgcgcgatgtcggtcaaaattcctgaggattgccccgtactgcctggccggcccattatcaaaatgacggaccggctgaatgatgttgccgctgatctcagggggtttgccagcagccgcttgcagcagtggatagctaagggacagatacctcgagcgcccaatcgggatgccttgacagctgatttggttcagtcggtatttggcgaaggggagctggaggtgcgtttgctgaagacgaatgccagccgtccacaatggactcctgtcacccgacttgaaggttcaggtggacagcgccttacatctgcctttttactgtttgtgacggttggtaaagtacgagaatacgatacgggtatttcaagtgcaggattcttgttagccgataacccgctgggtaaatcgaatgccgatgatctaatgcgaattcaaacccaaatggccaaagcctataaaatccagctcatctacctgactggtatttcggatgaaaatgcccaatcaatgtttgataatcatctcttcctgaataaagttcaaaaactgaggcggcgcgatttggtcaccgttgataaagaacgccatgccctgtgggcggcttctctggctgctaagccacagttcgatcccgtcatttaa

SEQ ID NO: 52609 - DNA, 1044 bp, Enterobacter aerogenes; identical to SEQ ID NO: 51885

SEQ ID NO: 52610 - DNA, 1467 bp, Enterobacter aerogenes
atgtcactagggtttttggagcaggctcgtaatgaatctatggcacgccgcgagctgacgattcaatctcacgcgttgcttgtagtgcggacgctggattcaatatacagcgccctacagcgcaatccgtttgatggcttcaagcttgatgcactggcggcaattatgtatctctttgacgccatgctttattatgctgaccgcgagcgccagccaggtatgacgcgtaaagaagcggagctatgtctggttgggcacctcaatgaagcctatccagggcaagacgcgtccgactacgcgcaagttgccagcaagatttttgcggcgatcaaagaccctttccgtctcagttattacgacttctcgcaacgaacgcattccgaagagcagatagtccgtctggtacgctatgatcagctatccggctcagatgatattctctggtcgctgactgatgaaggaatgcttttctataccctccgtttggatgaaacgccgatagaacgagctgcgattctggcctggcgcacgcttaaaaccatccgtcgcggtgagatcgacaaggcagtacaccagatccaatcaacgcagcggcaactggagcaatatctcattgggatgcggatgaaagtacgcgctgcccagtctggtgatttgagcgcatcttatgcacacgatatccgtcccgtactcaatgattcctttgataaaacccgagaggttttggaacatatccagaactcaatgtcggccattaccgaaatgctggttgaaggaagttcgaaattaaatcccgacaaattaaataagctacgtaaggcacaagagatttttgctgaggtctgcgcttttacgcagcgctatcaagactgcttacttgatgttaacaaagattttgagcgtgctcgtctgaaactcattattcccagagataatacccttttccgggaaacgctggaaaaaggtgtactcaagcccttactgtctcattcccctgacactgtcgaaaaggaaatcgatggcctcaccgcacgcctgttggctccccgaagacaggatgatgatcggcacattctgtttgaccctgaagcgctgctgaacctctatctcgatagatttgaacaggcgcttccacatgagatacgggaccccaccgagcagcctgtagctattgaaaccaacctgcgaaatatccctgaatccgtcattaaaaaatgcagcgattgggttagtgaccgattgaagaattgggggcatgtgagctttagagatgttttcgacgcctatgagtgcgaagaattatccgaacaagaacaacaggtttgtttacttcatattggcagcctggcagctaacagcgatcccgcaatagaagtagagatagacgacgctatcgaaacaacgctctggcgggctgacaatatcaaactgttaacggtcgctcccttacacccctttgaggagtag

SEQ ID NO: 52611 - DNA, 4437 bp, Enterobacter aerogenes
atgtggctgattaaacgggtttatatggatggcgctggccatgaagaagctttctacaaggacctcacacttgactatattggcctgtctcaagcggtcggtagccctgttgttgaaggcctgcgctcgcccgtcagaaatgcgaaggtggtgactagtacttatcagcagcttgtaaatgggggcggtaagtcaacctacatcgcgctgctgttatcgatttttgagccgtccgttagtgacttcacccaatatctggcaaatcatcgccagagtgaataccactaccgcaattacttctataaagaactctctgttgttttggttgagatggtcaatgaatcaggacaaacgttattactgggacatgctcatcagcgtaatggagatgatgttgaccgcacactgtttatttgtgatgcgcccgactccctgatgggcgcgccgtttgatgaagtcccttcttattcccgcgcggaacgcaattctgagctgcgcccctatgccaatagcctgcgcagttttgatagctggcttaatctcaaggccgatagtgaaggcggcatgcattggcgtaaaaccaccagacagaacgagtggcgcgcatttttactggaacaacaaattaacgttgatcttattaaaacaatggtgaccttcaactccgaagaaggtggcctgacccgttttatcgaatacaaaactgaacatgatttccttggcgcgtttttcgcctgcaccatgtctaaagatgcggctgagcggctgcgggaactggtagcgcatgaagttgaacgtcagggagagttagaggggatccgtcgtaacgagtccttcctgaaggatgtactggctaactggctggcgtttcttgatccggctaaacagctggaaagcatccaggcgcagcagcaactgctggatgatggcttccgggaagcaatgcgcgatctcgcagcctttgtcggggatgttcaggttgaacagacgcagcttgaagataacatggagagtttgcaaacgcatattttccagacgatgtctctgcgtgagcagttaggtaagcgcagagcactgcttgaatatgatcttgcgcagcatcagttcgacaaacaaaaagcgatagtcgatgcgcttcaagacgaagccgatatcaatcagcgccagattgagattactcacgctgctatagactacaaagcctatgctaaggccctgaatgagtatcgtcaggcagatgaagatctgaaggtattccgaagtgaaacggaaaggccgctacaggttattttcgagcgtactgcaggcgaagccttaggcacattagagtgggcaatcgacagacatcgccagcaggaggctacgcttgaggaagaattagggcagatggatagggaaagtaatacccttaaacaatcatacgacgaactacaaaagatgctgggtggcctggaggcggatcgtgagagatataaaagagacaaacagcagggcgaatcgcaacggggccaactatgtgaagctgggttgatccagaaggatgaaacaccagtagcagcccaataccgactggaattaaccttacgcgatgcacagcagagtgaagagctggctaatacaattcttcatcagaaagagcaggcgttggaagcacagctgaatgttgtgcgggaggcatcaattgagaaaagtgaggcccagcaaaaactcattctggctgaacaaaaacaccagtcagctgtggatagtgctttagttttagcaaaaacctatcaaaaactgccaacgtcaatgcaacatgatctagatattgaagacacgagttggcacagcgagctgtgtggattgcagctcgacaaggtattgaatgcgaactctcacacgctgaatggaatgaaagagcgtttactgcaagcccggcacgaactggacgagttaaggatgacgggacatgaactggtcgcaaagcaggtcaatgaggcacttgaagcgttttatgcggcgggtattgcacgggataagctctggacatttccacactatttggcctctgtttacaacgatgatgcacaaaagattgcagcggtgatcgatcaaaaccctggccgctacctgagcctggtcgcactcgacaatgtaacgtttgaacaggtccataaaattagtgagatcttgccctggaagaaggcacctattgctatttacctactggatgaagcacaagatctccgccgagaaacgtctgaattagtacaggtcgtcctctcaaaccacgataagcacggatatagccaggccgcttacgaagcccggctgcaagacctggagaatatcgtagcgtcgcaggaagtcagtgtgaaggcggcgaagagcgcattcaaagtactggaatctttcaggaatgaatggcgtctacattatgaacagtatggtaagcattgggcgggactgcttgaccaacgggagcaggctctcttaatactggaaaatgctgatgcagtacttaagcaagctgagcatgatgagcaaacactgcgtgacgagaagacagatgcccagctgaggttaaacaacgcccaacagcagaaaattcgggcagaaaaagcacatgataaactgagtctttttgtagaaacagaatgggcgaagcgtgaaacggcgataatgaaactggagcagttagctgcacagattcaacgaagcaaggacactatttgcacccagaaagagagactggaaaggctgaacgaaatcgagaagaacaagctctccgagaaaacccttttaaatatccaaatgggcaactggagtaatctgtgtaacgagccgttctattcagagattacggcgactgaaggtatggccggacgaagccccgaagatgcccatgagatggcagctcaggcgcacaaaaaattgctcgaagcagccaacggtgatcaagtgaccgctctcaagcaacaactgaaagatgctgaacaggcacaacgttctgcctctgagcgtttgactgctcaacccacctacaatacatatccggacgaggtaaaagcggcggccatcaatgagctaacggtcattaataaccgcatcgtacgcctgaaggaacagcaaaagcaattcacgcaaaatctaattaattctcaggtaactctgaaaaaattttctcaaagctgtgaggaggctagtaaagcaattgacgaggattttgtctgggaagagaagcccattgagatagagacaatccaaacgtctctggctgaaatcgtcaacagcctccatgaaattgaatacaagctaaaacttcaactggagcaaaagaagctgcagttgcaaaagatggaaaatgtgaaagaacggctacagaacgccaaaacagctcaagcgatgatccagcacattacgtcgagctctgccgcgggtttacctggcaggatcctgaacattacagaatatgctcaggatctggcgacacaatgccaaatgtatgccggtctaaatgaaacactaaaacagcaaaatatacgcgtctctacggtctggggaaaattccgcaaacggatcgaagaagagttggccaaggatccaaacgcccgagccagtcaggaatacttacggcagttggactcaatcgcaacttatcatgaagtgctgggcgatttggacagggtcggtacagggatcacgcaggtattcgaagctgtgcaggatagcctggaacaattccagcgttcgattgatctgactgtcacccatctgactgctcatctggagggggctattaaacttctcaagcgcgcgatgtcggtcaaaattcctgaggattgccccgtactgcctggccggcccattatcaaaatgaccgaccggctgaatgatgttgccgctgatctcaggggttttgccagcagccgcttgcagcagtggatagccaagggacagataccccgagcgcccaatcgggacgccttgacagctgatttggttcagtcggtatttggcgaaggggagctggaggtgcgtttgctgaagacgaatgccagccgtccacaatggactcctgtcacccgacttgaaggttcgggtggacagcgccttacgtctgcctttttactgtttgtgacggttggtaaagtacgagagtacgatacgggtatttcaagtgcaggattcttgttagccgataaccctctgggtaaatcgaatgccgatgatctaatgcgaattcaaacccaaatggccaaagcctataaaatccagctcatctacctgactggtatttcggatgaaaacgcccaatcaatgtttgataaccatctcttcctgaataaagttcaaaaactgaggcggcgcgatttggtcaccgttgataaagaacgccatgccctgtgggcagcttctctggctgctaagccacagttcgatcccgtcatttaa

SEQ ID NO: 52612 - DNA, 1044 bp, Enterobacter aerogenes
atgatctggctatcccgactggagtcgacagccaataaacatcgtcttgccgctggtaaggccgcccgtacagtgaaagctaatgcggtgctggatgaggtattacgcgcacacaatcaagaggccttgagccaggaggcgcctgatttgctgagccaggctgttactctattgcttgagagggactggcgggctcagcctaagcacaaagcgagttggcagcgctactggcggggtatgagcctgccaagtgcttttgtttacgaaggtgccatcgttcctacgaagacaacatcagaaatagcctggcatccttggttggcccgacgtattacaggacaactgacccagccaatcaaggcacgcttacaacagctgaatacatatctttttcgccaaaccgagggcgacaagtcactattcccgggcttgcttgggcatcgtgagcggtctctgcttatatttggtgacgaaaaagcgctggactccttgccacctgatggctggaagcatgtcgctctgactttggctgatatgggcgcggttcgatgtgcaccgcctttaccttatgagtcatcatgttgccatgatcttccggctatcattgttgaaaactccgatgtgtattatcgactatgtcaacttaatcgagttcagactcgctggtcactggtcatttacggcgcaggtaacaaagtgtccggccaggcggagtgcgtgtcacaactccttgaggtcgaacaggtaaaacagctactttattttggcgatctggatgtagcgggcttaaaaatcgcccatcagttgcagtgtaagctgcttagtgattacggtatcagcttgcatttggatgaatggctttataatgaactgatcttaaatggtctaatgacgccagaagggaacgccaacaacgaacggtttgattttgaattgcagtgtaggtggatgccacagtttgttttacgagaaatgaagactcttctggcgatccatcggcgtctaccccaagaaggcgtggcttctttaggtttagtcatatag

SEQ ID NO: 52613 - DNA, 1467 bp, Enterobacter aerogenes; identical to SEQ ID NO: 51883

SEQ ID NO: 52614 - DNA, 4437 bp, Enterobacter aerogenes; identical to SEQ ID NO: 52608

SEQ ID NO: 52615 - DNA, 1044 bp, Enterobacter aerogenes; identical to SEQ ID NO: 51885

SEQ ID NO: 52616 - DNA, 1506 bp, Paenibacillus etheri
atgaattggtcggattttggcgaacgaaataaacgattgaatcccctatggaatctgggggctgggatgaaccttggcgagatccaaccgtacaaagaaatggtttctttaagcatcttgttgcaagtctattatttggagctagaatccaatgagagaagatccaaggaagatattatagccctgacttggactgcattggaacgcttcaatatcgcgaatctcgggactaacgaatctgtagaacgtttagtggacggcctgctctggagcggaaatggtggagatttcgaatcctattattatgatgatgccgctcggcaaatgtctgtgcagaaatataagtatttcatggtggatgaggatgcgacccgcagtagctgggaagagagtggcagaacaatctatcgactctctgaatatgccatggagcttatttttatgagtcatgagattattgaagagttccagatcagcatcaagctgctcgagattcagatgcatattaagcatggccgtgtaacaagggcgcttcaggatgtgaatgagcttatctcccgggtccggaagatgacccatgagcagcaggaataccggaatgcattgcgccgtaacccgaagcatatttttagtgaatttggagtggctcggcatcagcgactcgaagaaattcatcagcagttcgatgaagaacgtaagcattttgataatattcatcgttctttggcccggttagccaatgacgagaaagatgtgatcgacttcaatgagattcgtattctttctgagcgtgtggagctctctaggcgtgtacatgatgagctggctgaggtagtcttgaatatttttgaggtggagactaatttaagattgaacttccctgaattattttggggagctgcaggctttaacttccgtactcatatttgggaggaatgggttaaagaagagggtctcccaagcggcgacagccttgaacttctactcagcggattgttcgctccgaatcaggattttgtttatccacttccctgggcttgggaggagcaagaggttggctttatcccggatgttgtgatggatgaacttgaagatgagatagatgctgagaccattcaatatattcctaaaggtataccatgggcggaagtcgttgaactgtggaagcctgtgttctatgcgctagcccggcggggaagatttacgtttactgcagaagcttttaccgcagaggaattaacccgttgggcacgcacaccggatgctattgatctatgggtgcagttttttcaatcagagattacagtacaagaacaggctccagagaacagcaacggatccgacgaatgccagttgctaatccggtatgtacttgcggatgatcctcaactggagagcctgcgcggtaagctgctacatacgagcattgctccagaactaaccccaagagtacgctggtctggtctggatatgagtccatatactattacgatcgtggagaggtga

SEQ ID NO: 52617 - DNA, 759 bp, Paenibacillus etheri
atgagttatacattagaacaggtacagctagcttcacggctattttttgaattacttcgtaaaaaagtaatccctctcgatgatcctgcggctgctgaatgcctgcaggatgcaggaacatatgatgcgcttcaatatgttgccaaggaggcaggctgccgagtgatgaattccggacaccgtctccatttgttagtcaatccactcgggtcagtgttcgccaccaactttacccagttgaagaataaatactcacggattgagcgcaaaactcatttacatatcattaatatcatcatccttgtatttctggccgagatggatcaggatgagactcactttaagtccgggcaggacagtatgtcctatatacagatatccgatcaggtgtcgtcactttttcaagcgtggatgcagatggatgatgaaggtcggtttagccagcagtggcggttggatatccaagcgatgtcgaaggtgtggactaatctttatatgcaaactaagagtcaggaagaaagcgatcttctaacaagaggcgcaggctcacgaatgggtctgattcatgaaggtatgaagcttctggaagaggagaagctcgtgttcatctcggagtcagagaagcggatattcccacgggaagagctttatgagagaatgcggtatttatatcatgatgttgaccggtatcaggaattaaagaaactcatcggacgaactttagctgagaaagacggtgctactaatgccgcgaattga

SEQ ID NO: 52618 - DNA, 4482 bp, Paenibacillus etheri
atgccgcgaattgaacgcatacgaattactggacttaaatacgagaaaatgcttaagaaatatgatgatatgattctggacctttgtaacgaagaggggccagccaatacgcttattacgcttatgaatggtggcgggaagggcgtactgctgcaatccatttttcagttattaatgcccaaaacgccatggggaaaagacagcgagaaccaggttgaagcattttttcataatcataaaaaacaacttaaaccttatacctttcatgtagctatcgaatggcatctcgacaacagtgagcgtaatgagtatatgacaactggtattgctatgacggcacataactcgctggatcagcaggatattaaagtggattacctactgtacgcacttacggattacggagaagcgtctgaacttaccctttcgacgttgccactctttgatgaagagaatgctgaacctacgagttttgaaacaatccagcaatttatacgagatcggcggggagaaattgtacctttcggcagccatagctcggatttaaaaagatattatgatttcctggcaactcgggatatccatatcgccgagtggcgcaatatgcggcggatcaatggggaagagggcggtatcaaaggttattttaaaaagaatgatgcctttaccaaccataacttgttcgaaaggctgattattccagaaatcggctccagtctgaatgaggggctaagagaagacgacaatacgctgcagcgtatgtttatcgatacggcgacagtagctcaacgactgccaatgcttgaacagcgggaacaagtctacacagagtttcttggcatggctgcaccattatacgagctggtgaagctgggagtagaggcagagagcgttgttcaggaaactgaactgcgtggacgtcagatccatacggttatccatgaagagcagagaaatgtggaagaagagcgaagtaaggttggtaatgaactggctggtcgttatcaggatgcgaagcaattgcgatttgagacggacaacctcaagtatttgcgcagcaaggaagaaatggaactgaaacaagaagagttcaaaaagcttagtgatgatcagagccgtgcacgtggacggctggacgattccaagactcaggagaaaaagcttgaagtggctcatttcttagctaaacgtatgctccacacacgacaaattgagcaatggcagaaagaaattcaagcgatcgaaggatctctggagatgaaagaacgtcaggaggttattcagactgctaaagaaaagcttcgtaaacaatgggatgtggtgtctagcctctggcaacaaacgatcagaggatttggaacagcggagcgagcactgacgactgaagaaaaaggtttacgtaaggagcgggagagcttcctgcaggagttggctggcctagatattcagattaatgaattaacgttatctatccggcaatatacagaagagctaggcacattcgcagctcagcatggtcaggaggctgcccatactccggcggcggcgctacaacgtacgatttcagctgcccaaacgatacttctggatatggaagcgttagagaaacagcataaagaggcagataaccgaaagctggcactacataagaatcatgctgagctcagcgagaaacaccggtcttatgaacgagagttagacgagcttggggttgtgcttgattcacagacctataaagaatcgcagttatggtcacagctcgttgtactactggaaatgtatgatgagcataatcgtttaggagctactggcctttttgaagaacaagaggcgattcaagtacgctttatccgaaaaatggatgaggtggagcagcagacgaaacgttccagacgggattactacaatcagcttatggatgtggaacttcagaaccaatcctactggctgccgaattcagatattctggcggtcaaggatacactcgattcgcttaagattcaatccacaccgggtagttcctatttaaatgatcgtccatatcttgaacgtgaggaagagctagagcgccatccacttcttccttatagtctgattgttacccggcgcgaagctgataaaatcaaaccggatttgctgaaggacacactgctgcaatcagctgtgcctatctttatccgtgaagagatggtagcttcagatccggtatcttttaaacttttagctaaccaggggccacaaatggtactggagccagatcgtttcttgaactttaagagcggtattcagtcgaagctaaaagagcaagaacaagtgcttcaggacgcggaggcttatttatcgaagttgaaatctgtgcgtcaggaatatgagcggttataccaaacagagaacactgtgacgattacagccaaacgcaatacactaatgaaactgcagagtgaacttcagctgagcattatcagtctgagcaacgagatggatgagaacgagagcacgcttgcccggatcggtcgcgaacttattgagaataaggcgcttagtgcagagcatgagcatagagcagcagcgttgcaagtttggattgaacgtacgaagaagcatgagcaggatcaaaaggagaagaaaaagtattcagatcgtaagagtctggtgagcagggagctggcgagtaaagatcagcagctcgagcatcttgaagcgcaaatggtaagccttggcggtgaacgcgagaaatggatgggagatgccaagtatgctctgtttcctagactacagcattggtttcctgagattgtgtttccgacctctcatcagcttgcggatgatatggaagccacacccatagatcccgtagagcagaatcttctgttgcagcagctcagtaccgttgaaagtctgcagcaatcgctgacggagaatgagcttgaaattcgaacaagagccgcccagattaaagcggcgagcgagaatttaacggagcttgaagccagcctgaatcaagtggatgagaattggcggaaggtaacagagcctgctgaatctaccgaatccattatggctgcaagaaaccgtcaaaagtctgaaacatcttcgctagaagaagactatcagatggttcacgactctttcatccgttgtcagaccgaattggagaatttgcagaaggaactacgcaaggtagagaaaggaatcaaagagaagcacgagcgtgccgtggaaatttggaatgagctactggagcagaaagaggcagacattcaggagcgtttccaagagaatgagcttatgcttaaccagtgtaaacgatctttggaacgaatggatgcgctcattcagacgttatccaatcaaatcaagatcatgaatgcacatattgaggatcgggtcaatctacggactgtgccagaagaattgatgctgaacgtaagagaaagctgcgagtctctggttgctgactggcttcttcggattaaggatagccgggttagacgggacgaggtctccagaaaggtgaaggaagagaaaaattcattaaccggaaaacttgccaaaaacgaacggaattctgaactggagaccaagatactagatcgtttaaatacggttcattgggataacttcgctattgctcagcaagtcctggattcgatgttacgtagttcacgcgatcagattgagagcattcaaagcgataaggaggatatggatctgtcccgcaagatgtgggtagctcgggcgtcttatcgtgtagtacaaattattgatattatgaagcgaatggaacgtcggatgattattcataacgagaataactatgccttcccgctggtacgtctgaattataagaatatcaatgtaccgagagcaagcgatgaggtagagccgatggtgagcgattatttcaatcggtgtatccaggaattgctcgcaaaatatccaaagattgaacaagtgcctacacctataatcaaagaggttattaatgacggacgaatcgtctatgcggcacttcagaatcgcttcccgattcttcaggtatataaaccggtaacggaaaactacttcctatacgccgctccggaagactatcattattccgactgggagatcatcaatcggggagcgctggatgaggctgtcggtagtggtggacagcgccaatctgtacagctgctggtagctatgatgatcatgacgcataaacgtgtgaatcgtgagaacaaagggtggacggtctttttatatgacaatccatttggagagatggtttctaataatgtgcttgatcccgtatttgaaatttctaaggctcttaaatttcagtggctgattgttacgccgccggagcttgtgaagaatgacgttagcgttcgctttggtgtgtactggcagctctatttcggaggtgtcaaaggggatatgctagaatccaccctagtcaagggaggaagaaagctcattcctaattcacttttttga

SEQ ID NO: 52619 - DNA, 1080 bp, Paenibacillus etheri
ttgagatcgattcttatgaatgcgttagagaaaaagtttggcgctgtccgtacagggagaagtaaagtagaacttgataagctggaaaaagaaatcattagaactgcttatgaaacaccggcagaatatgaattgttaggcggagggtttcgtgttctagcggtcgctataaccgagcttgtggctgagggttacctagaaccgatgaaatccagtccgatgagctataaacaaccttctatacctacatcttattggttatctaagagtgcctcggctcaagcgaggtgggatccttcagctgtgttaagggtgcaagatttgctagatcttcattattacttgatacgtcctgaaactcagacgcaagagctttggagccggatagagcgggtttctaattttttgcgtacagtgaaggatcgcgagatgattaccatagaagaaaggtcactggaattgtttggtcaagagaaatggctctctgatcctgaaggaaaacaatttcttactagagtgaaactaacactggaaagcctaaaatgtgtaaatgcacgggaaccgtttatttattacgtcaagccagcagtaactgtacggaacattcttattgttgagaataaatcatttttccactcagctaaacgattaatgcttaatgaaatgatgatttgtggtttatcattggacatgctaatttacggtgaaggttggaagatcgatagtagcttgctcttactggaggaactgaacattgatccacttcaaaccaccctattatatgtcggagatatggataaagcaggctgggaaatttacggtaaactgaaagtcagttatccgaatttgaatctccgactggcgcttccaatttatgaacagatgatgaagctgacagaggagccgtatacatataaagttccgcagacttgtaacccggagcatctgtacaacgtagtgcaagaactctcaagcaacttggaactgctggcatatatcgaacgattactgaaagaggacttaagggttccacaggaagttttaaattacgaagtgatggcgaggatggcagaaagatga

SEQ ID NO: 52620 - DNA, 1467 bp, Paenibacillus etheri
atggatctaccactaatttcaatttttcaaacaaacgaatctaaaccggaaatgcatcaggccttgagggatgttgcattattatctggagttcttaacgatctcaactcacaaaactttctgcaaacacctatcgaaattttacgcttcctacgtattattcaattgataaatgaagaagccttgggactcgatgaaccgattgaaaacgctgatacgttatattttcgttatcgaaatcgttttgatgatattgaaccaccaagtaagaaaaaggtcgatcaaattgtaaatgtcctagtgaagtataactggatatccaagcaaacaaggcaacttaaaatgcgagacgtaggtaagcggatgatggatacgctcatacgtctagcaaatgattcattagcctattatatgcatgatgatattggaagatctctattccaagctagacgggatgccgagcttagtgaagcttatgatgatcatggcatttctggtggtaataaaattgctagtatgattcgcaacgttgaaaatgcgattcaattgatgaaagaacgcgagttggagttgttagcagaccgtaatgcgttaccgcaactagagatcatccatcagttaatgcaggaattggaaattaaactatcggaacgattccgccaattttatacgttagaggatagtctggtactcagtaatttaatgcaatcaggcacttctgcacttgcagatggcacgaatttgagcatggggatgatcaataagtatctaaaatttacaatgatgaagcaaacgatgctattgtcctcgataaatccagaaaaagtaaggctgtttattacacaaatgtatgatccgcctcaagaatcagacattccaaacgcttatcaaataatgagctttatggagcagaatgaatacgaaggtgagtccatggatggtttatggattccgattaaattcgctgcaccgctttcaggggaagcaattggtgaagccatagaatatctagaaaactatgagccgattgttgaattgatgcaagaagacgaccaggaaatacaatatataaatgaggaaatagatattgctttattagaagatatgatgggagaaacagaatggttgctaaccaaatccatgattgaaacggaagcgattgaagtattcatgaaggaagtggaggctgctcctatagagactgtaatgattgaagcgacgtctacggcgtggggggacgccattaacgcgcttactgcgttatctgcattggtaggcagcaagaagttaacgttggaggaagcaaaggatgagtcacaagttcaagtctctctatatgagaaagaatgggattggatgagtcgtgatgatagcaatcaagtggtcaaacataaaaattatcgcattatagaaaataaggacattgatagtatgcaggagaggagtgatgatgaacttgatggatga

SEQ ID NO: 52621 - DNA, 681 bp, Paenibacillus etheri
atgatgaacttgatggatgagatgaatgtaaatccacttaatgccatgcaagccatcaaaggaatgctatccgaggacgaagaaattgtgtttatgaatctcttattctcatcctctgcaacaatacgtgcgggcaatttcggattatccaggcgtgaggtggagaagcaattaaagagctccggtgatgatgagaagttcgattcctttctgaagcgtgttaatcaagcggtaagtcgatactttcaagtgatttatgatgagaaaaaggatcaagttatcgtcatgatgagagtttctgctaaagctgcacgtagtacattgtccaaagaaagtttagcaatcctactgtttatgttttaccagcaagaagttttacagcatgagtatacattatttgatcagttgttaaatgcccttggacatgagactacaaaggccaatcaacgtttgaatcttaatatagatcagttgaagaaaatcggtgcgcttgaagaatatgatacaaattcaaatgagaaagcatatgcaatcacggcaattggtgcaaatatgttctcggattcctttttaagacgtactgttgaatttagtcaatctaatcaattaaataaagaagaggtactgaaatttttcaaacgatataatctgtatcaggaaggaactgaccaaatagaatga

SEQ ID NO: 52622 - DNA, 3222 bp, Paenibacillus etheri
atgataccttggaaaatgtggtttacgggaatcagagattatcagccaactgagatggatttgtcaggaaaagaatcgcatatactgataactggtcctaatggagcagggaaatctactgtaacatactgtatggggagtgttctatattcttccaaggttgatttagaaggtctgaaatctcgtaatcttctgccgaatgagacgtggaaggcgcatattcgacttctgtttaagaatgaaggacgcatgcgtattgatgcacctaattatgttgaatttgcaatttatattttacaggaaccaggacagccgactaagaagcaatttgttataaaatcgggtgatgatccagaacagtgggatgaaacaattaagtatacctctggtgatcggcaatacaatttcacgacttacaagaaggatctccagttcaaatataaaattgatccggatttattctatctaatttggtaccagcaggaggtgaatcaattcgctgttatggatccgcaggagcgttttcgtatttttgccgaaatgcatggaatagatcatgtacaacgtaactgggaagaaagtatggagcagctaaaggatgtgcaggagagtttaagaagtgctgaagcaagtgtggaaaataaaaagcaatatctcgggatggctcgatcagcgctagaccggtatgaagataatcgtaaacgtcttatagagggcgggaagttgtacgctggagctttgctgaaattagagatttattacaaacaagaacaattaaatctagtagccatggaagaacaattgctcgtggatcatgatatcgcaagtgatagactggtgacattgcagaagcaaggcgatcgattgaataatgaaatgaagcaaatacaagaagaaaaagaaaagcttgatacgaaaattactttattgcaggagcaattagcctctgtgaaaaaggaaattgaagaaacttcaattgtaattggagaattagaaattcagctaaaagaacttagtcaagaaaaatctagaattacacatactgaagaagaggtacatcaacaattatcagcaataactaagcagctcaacgaaatgaatattgagattgagaagacggaagctagtattcaagaatctgaggatattatagcccaattaatagattcaagttcttacttgaaggcgctgattcaacaggataaaagcttggatcttatacaccaagaacggttacggcagtatcgcagcagtcatgatgtacagatggaaattgaccgcttagatcaatccattcaactatccaagcaggaacgagaagataagtctaaattacttgaggagttatccaatgaggagcggatgcttgagtataatcaattatggtcagctcgtcaaagggaatcactatctttgttcaaagcgataggtgtgcgtgcctatacattaaatgaattacttgaattaaatgagtcagctcgacttacagcggaggaacagtttgagacgataaaatattcgatattttttgatggctcgcacgttcaagctcctaatgatttgtatcatgttcctttacgaagtataataccggatcgttctgttactgaaattcagacactccaaattcgtgtgaagaatggaatagaagatgatgtattcccacatgcggtcaaggctttatggtgggtagaacaattttttctatcaggtgagacaagaatagagaatgatatgcttatcgactcaaaggggattcgaggtgcacaagagaaaaaaagttatatattaagccagaaagctatgcagaaacgtaaagaggagattcagaagaaaactagcgaattgaatacatcacttgcgaatctccatgactctcttgagattgatacgaaaactatgcaagaactacatgccattatacaatctgtgcgtgaatcggaagcctttcttacaatgaaacatgaacgtgaaggccggatcctgaagtatgaagatgagataaagcatcttcaggaacagaaggagcatagtcaggaatttaaggctactcacacaaagtttattgagaaaagaatcaggctggagcatacccaagttatactacaacttgaagcggatttttatgtgagattaggtcagcagaaggaacagtttgaaatgttacaacggaagactcatcggtacaaccacttatgcttacagcaggatgcgttgaagcagcaaaatgatacattggaagagctggctgaacaaaaagatggagatgaacgtcgacaaaaacgcaatctttcgaataatgaagacgaatttcaacaagctacgcgtacacttagtcaaattgataatcaaatcaacgatacaaaagagtcacttgatacatctaaaataaatctacttacagtaaccgaagaaattgaaaatctcaaagggattgcacggtttatttatgatgaggtgacaagtgagtttgaacatgagcctaatcatgcgaagaggcaacaatcgctttcaaagctccgccaagagcatgagtctggaaaagtaacatttaacagcgctagaaatgaatcaggtattgatcccgctgcatctgagaattataaagtgataaaagaagaggttcaacgattgcaggatgaatttaaacggacaagcttattgtttgaagagaaccaagaacgagctgagaatttgaaagatcagttagagacgacaatcaacatgagggtccttgaaattcaacagcgatttaagaattatatgagcatttttcaatttgaggggcagatcgattggaatcagcaggaggatcgtcgaggtcgagtgctcttccatttattcattaaggctcgcaaggaagggcaccgaggaacattagaggatgttagtgtgaaggcacgtggaggaagagttggcaaaggtgtttctggaggcgaagaatcgctcagttcactactttttgctcttgctttattgcagaatctgcaaacggcacccggatttatagtcatggatgaatttgatagcgcgttagatgagcagaggaagttaaaggtatttgatctttatgctggtgaattacaacgtaaattgattatcctgtcaccaaagtcgcatgagaactcttatctggatcgattctcgaaagcgtacattgtgcagcatgatcccactgtaccacggagtaaagtgatggggttaaatttgcaacgaatatga

SEQ ID NO: 52623 - DNA, 1308 bp, Paenibacillus etheri
atgcaaaaattcgatgatgtactttcgtttattagtcaatcttttttgaaaaaagatgagcaactagaaatgcaaaggacaataggtgaagcttcacttattgatatagatattgtgaagaaaacagaacgtacgataagaagagtcgggatcattacgattgcacgagagtacacctcaattgttgaagatcgcccggatcaacagcttttacgttggaccgtaggaaaacgtgctgcattagacgataatcaacaaacctttgattggcttcataagggctggattttgaaagaggttcgttttaaacgtgatgggaaatctgtagaacgaattcattaccgtatgggttatttattatatgtatatttaaccaataggcaaagggatgagcatcgggatagtataaatcaattcactcaatatcagtcgaatgttgctccgaaaatggaacaaatcaagtatttacatgacgaacgattacatcaattgaaaggtgtagcatcgtttttatcagatagtttacagtggggccttaatgatttagatgaacagtatatttttcctacgaattggagcgtatctaaacgaatcaatgctttaaactttttattagcttttctaatgatttctagcaacaaagagatatttgattggaaagaaattggtgcacattattatccgggtattggaggctctaaggtatttgatgcgtataaagttgagtttctaaactttttggagacgttaggtggtcattcgctggaaactttagggatgattagtggtggtcaaattacgtcaatctattttgctggagagcttgaaggaaattggtcgagttatcgagcaggccctgtgcatgccttaacaagtatttcagtttcacaagaccattattcaactagagcaacaacactctggttagttgagaatcgagccgtgttgactcggatatctgcagaatctcattttttgcaggagacaaattcattgataatatgtgtggatggtcatcttcgaagtgcgcataaacattttatcagacaattgttgttgaatagtcctatcgagcaaaccatcttttggagcgactatgatgaagctggattacaaattgcaggagagatgtttcaatcgcttatgggacacgctgttcggcataaatggatctgtccagatcattcgataatatccaattggtcagagtatcaatataacatggaaagtttactacaatattcgaaatcggaacaagagatcgtgttaggggaggcaaaagattggagaagatggatctaccactaa

SEQ ID NO: 52624 - DNA, 1578 bp, Microvirga vignae
atggatgatcgaagtgaccttcatctagaggggcaggcgagcacagccgccattcaagaagacctgctcgcctattttggctcgcgggcatcccctcaagagctgcccgtcgaaagcccagccgcatggtctgatgacctactggctgccaggggcgcggctcgacgcgacacaccggctgcgagcctcgatctgaagcgtcgggcggcaggattgcgttatgttcagcccttggcggatctcgagtatagtctttccaaggtcgcatccgaacacaaaatggaactggatggctaccgcatcggcctgcgtctcatccgtgacgtcgccctgttgaataccttcgacgatggaccgacgaattcgcagctccggggcatgattgccgaggccgtgtttgagcaatggcctgatatcagtcaccctgtcttggtacagcttgcgacgctgacgctccagattctcgaaaaccaacgatccaaagaggtcgataaacggttcgaggtcaatgtcttcgatccgatcagccgaacgatcgagaaactccgattccgttatcttgagtatacacgatcccagagcggcgaataccgctatcgcgtcagcgacgaagcaaccctggtctatggggcgctggccgaccacgaccttgatcgcgaccttcaaggagcgctccataaactcgtcgaagaggccatccggcatggccaaatggaaagagctgaacggatctcgcgtgaggcccgcggcctcgcccggcgcatctatttgcggattcgacatctgatctcggatcttttgacgaatgcgagggcggtgtcctggcaggctgaacttcaagcgcccgtcgaagacgcacgatcccatcttgagaagcggatcaccgatcatgagcggcttcgagagatcgtgatcgaacgcagaggcgaggtccaggagacggaaaccgcagcccgtctcgatcagttcatggaagatcttgaagaggagcgaaatgcgatcaacctcctcctgaaggaactcaactcagcccatcagaagttcatggatgcccaggcggcagctttccggtttcggcggagggctcacctcccggacccgaaggaagtcgcgacgtcattgttaaccatgtcagtcgaggcaatggaccggaccattcccggcatccttcggaccatggcaccgattgatccgatcaggttcttcgatctggaccgtcttctggtggccctgcgggatcaggtcgaacaggacatcgtgccggaccgaatgcggcaggtcgccgatcagcctgttgggtcgttgtcatccttctccgccgaagaacgggatgaggcccaacagatcgtcgcgagggttctcgcggaacccggcgatctcacaatggacgacatcttcgcccgcatcgacgctcgtgcctccagcatcagagtccggcgtgttgccggcatgcttttgtatggactgtacgggatgggcgcccggaaggcccgccgcgacgttgtcatcgacgggcaattcgagaatgatcttttcgagggaaagcgcctggtatttccgctccggagaacatcatga

SEQ ID NO: 52625 - DNA, 4320 bp, Microvirga vignae
atgagccatatccgtcgcatttacctgtgcaacgtcgggcaggcgacgtcctggcgtccgcctcagattcagaagattttcaagccggagatcggccttgagccgttcacgatcatggagctcgagaacggcggcggcaagacaaccgacatttcgttgggactggccaccttcgagccgtcgttccgccgcttcctgccggccatcgcaaaggaggactccgacggcggacaggcgcgccatttctccgactacttcagtgaggatggcctgcccggcatggtcgcgatggagttcatcgtcccgagcacggcgacagcggacaggatcgtcatcgtcggctatgtcgttacccggcgcgaagccgaggggaaaggacaattcaggcgtgacttctttgtgatcgagcccctgcccgatctggtcaccgccgacgtgctcgcgaccctgccgggttccggagaggaagatgcctatccggaacttcgttcgcacagggacatccaggcctggatcaagcacatgcgcgggcgcggcgatatcgttttcgatcatgaagacggtcaggaccgctggcagaaaatggcagccagccatggcatcgacctgcggctgctcggaatgctggtcgacgtcaatcgccgcgagagcaatggcgacatgggcttcttctcataccgcaccgagcgggaattcctgacagcgctcacgggaagcctgttcgaggaagacgaacttgcctcccactacgaacatttttcgcaagggatcgcaaagatccgatcgatggagccccgacaggcggcaatggagcagctgaccgttctgcatgacaacgccagccgtttcagcagagcggcccgagaatacaacagcgccatgaaacaacgggaggattcgaccgtttccatgggacggatcgtcgcccggatgcgggcaaccgagttcgaactcgacgggcagatccagcaaggccttcagacgatcgatcacctcacgctcgaacgagaaaatgcctccgaacgctacgaggaaatgcaaggacagagcgaaggctcgtggtcgaccttctacaaactgacctgtgccgatgccgcagaacggcatgagcgcgctatcggcgccgttaccactgtcaagcgggagatcgcagctcttggccttgttcgtcttctggcgagagaggctaagaccgcggaggatctccgggacgttcgaaacaagcttcaggagcaggaagaaggtctacggccattcattgagtccgaggcccgtgcccgcggcgttctgatcgcgatcctctgccgacggaaggtttcccttcaggatcaacgccaggcagcggacagtgaaaggcagaatgccaacgcagagacggagcagtctcgcgacgcgtcccgtgccctggtaaaacgccggcaggatcttgaggggcaaaaggtacgctccgagagtgacgtggccgaagcagagcgggcccgttccgaacggatcgcggacgggcatctgcaggagagcgaaacggccaccggcgcaatcaaacggatccaggcggaggaagaagcagcccgaattgcgctgagcgagtggtctggggcgattgtccgagagcgcgaggccatcgcctcccttgagaacgtgagcggcgagcttcacgccaagatcgaggaagcccgccaacgcaagacccagatccaggaagctctgcgaggcgaagagcaccttcgggcgcaatgtaacatgtccgaggaggttacccgctttctcgaagggccggttgacccaggattgccgcgacttcaggaaacgctgcgggagcgcgccgaagacctgcagcggaaaatccttgccggtgaaattgtcctcagacgcaaggaggacatggcaaaggcggtcgaagcctacggggtggcctttgatcggcctgacgcccagcgcatcttggaggcgcttcaccgtgccgggctccgggaggccaaggcgggcggcttctggctctcccagaccgtcctggatccgacgaaggcccgcgcgatcgtcgacgccgatcctttgcgcctggacatcgttgttcccactgcggccgaccttgccaaggccacggcgatcctagagcgagagacgccggacatcctttctcacgttgccatttccgtcgcccgggatgtcgtgccggatcaggatcctgaacggatcattgtggggccgcaggatgatgcagcctgggttcgatcctcagctgtccgattggccgaggatactgccaccgagcggcagcgcctgagtgccgaggggaatcgcctcaggatcgaggctgaggctttcgtccggatcggcgctctggtcgagacttggatgagaacctacggaccgcgctgggtcgatgatcaacgagcggccctcgatgcggcggagacgcggattgaacatctgacaggagaagccgaccaggtccggcaggaaattgcccagaggacccagacggtcggcgagcttcaggatgccgtgcgcgagtacgagcggaaaacggaggacaggcggcaggctctcaagcacctcctgcgacttcgcgatatcgaggcaaaggccgctacggctcgagaacgcctcgccgagatctatgcggagatcagcgggatcaaggagcagctggaagtcgttgagcaccggattgccgaatgggcagctatcgagcggacggccttcgagcgttcggtcaaactgggtgtgtctcttaaagagatcgacgccaagttggtccggttgggcgatgccgctacgcccgcggaggttcctgatctcgctgttgaggatgcggaggcctcctgggtgcgtcagaaggaagatcttgaccgcaagcggagcggcatcgatccgggcctgaccgtacgggaatcctccctggttgagaacttggaagccatccaatccgaaattgccgacttctgtaaccgcgagggtatcacccggcaggatggcatgcgtttcctgccagaggctcatgtcctcgacgatctgaccgaacgggccaggaagagactagccagtcacgacgcggaggtcagggccgcatttagggctctgcacgaggtcgaaaccgcccacgacaagttccggcaagaacggaaaatctcacggtatccagaccttccctatgaaaacccggaggacgcacaggtcgcagcccaagcgttcggcgccgaggccgctgcacagctaaggcgccgtgaggcaatcgacgaaaaagaaaaggccgtggcgctcctgatcagcgatctgaggacgcaacggacacgtgtcaaggattggtccgataatctaccggcagggttcgctcacatccttcccgacggacacgccattgccgacctcggcgccgaaatgaaacacttcaaggagatggtggagcacagggaccgggcgatcgaggcggcccggaagtggaaggaggatgccaccgaaatttcccaatcgatcctgaagcaggtgacgtccgacaccttcaagagtgtcgatccaatggttgccgagaacatcaggacgtcttcccttgaggccctgctccagagcggcgatgagttggaggggcttgtcttcgaccggattgcaagcatcaaggatgacgtcgaaaaccttcatcggcagatcgatctcctgacggatcttctcaagcggttcgtcggacaaggcttcaggatgcttcgtgatgtcatgaatgtgcgcattccggacgattcgcccgtccaacctggaaaggccatcgtgaggttccggaccgggatcgtcgacatcccgcaggaagcccgggaccgtgttatggcgactgtcatcctggagatggctcgggatcagcggactccgagggatggagcccatcttctggtcgatctcatgctgaagcttacaggcagcgacatgggaactcaggttctcaaacccacgctcgttgacggccaatatgacccgtataacaaaatgacccacagcggcggcgagaagatgtcggtcggcatgatgttctttgccggcatcgcgcgcctgcgggccaaggctctcagaaagccgatgcggcgctgtgccgtgctgatccttgataaccctctcggagccctcacgagtccggatctctggaggagcactctctccgtcctgaaggcgatggatgtgcagatcatcgcctatacgggtgtcatcgatcacaatgtccatgagatgttcccgtaccacgtcgtgatgggccggtttagaacgccggatggctctgagatccatgttcgaccggtggattatcagcgcaagccgctgccagaggcggcatga

SEQ ID NO: 52626 - DNA, 1071 bp, Microvirga vignae
atgtccgatgcgatccggcttcttgccgagctgcgaaagggcaggcgccagacggtcatccgagccgagctcctcgtctgtgcacggtccttgttcctggagagcgacaagcagctcccaaggcgcctgcgagcggcattggaagacttgcagggcaacggatcgatccggcttccttcgatccgcaacaaggaggcttgggaccggtcaacggttcctcccctgccccaccagatttccctaagggcggtcccgaaggagcggaaacaacggtcggaagcggcttggacgcctgagttcgcgttcgcgtcgcggattcaagccagtgcgaaacgtgatgctctcgtggcaattaatgaccatttcgcccggaaccgagggccatgggaccgcatggtgccgtatcgcatccggagcgcccagatccttaatgacgagaaagcgtttgaccggcttggcctcatcgaagggaatacgatctgtggccaagcgcccctatccctgatcggtgcctacaatcccgacctccccctcgtacgggaggatgctgcggccgcaagtacgaccgtcctcattgtcgaaaatgcccatgcctacgacctgatcgccagtttgaaccgagaactgagtgtctatcgttccgtcctttggggcggcggcaatcgggtgaccaaacggacgatctcggccctatccctgcgccgtgccctcagcgcatgccaggcgaacaggattgagtacgccggcgatctcgacccagagggcattcggatcgcagcgaatcttcatgccgaactcgccaaggaagggatggcccttcacccggcgtctgccatttatcgggtcatgcttgagatgacgcccttcccgatggcgacacagcagcagcccgttggcgacgcaatcgcttggctgctggaagagttcagggccgactctgcctcgctgttcgagggtggccaccgggtggcccaggaagtgctggacgtccctcaggtgaccatggctctccggcagcggatcggcgacacggccgctaaaatgacaataaggcaatcctacccacattag

SEQ ID NO: 52627 - DNA, 1467 bp, Enterobacter sp. GN02548
atgtcactagggtttttggagcaggctcgtaatgaatctatggcacgccgcgagctgacgattcaatctcacgcgttgctggtagtgcggacgctggattcaatatacagcgccctacagcgcaatccgtttgatggcttcgagcttgatgcactggcggcaattatgtatctctttgacgccatgctttattatgctgaccgcgagcgccagccaggtatgacgcgtaaagaagctgagctatgtctggttgggcacctcaatgaagcctatccgggacaagaagcgtccgactacgcgcaagttgccagcaagatttttgcggcgatcaaagaccctttccgtctcagttattacgacttctcgcaacgaacgcattccgaagagcagatagtccgtctggtacgctatgaccagctatccggctcagatgatattctctggtcgctgactgatgaaggaatgctgttctataccctccgtttggatgaaacgccgatagaacgcgctgcgattctggcctggcgcacgcttaaaaccatccgtcgcggtgagatcgacaaggcagtacaccagatccaatcaacgcagcggcaactggagcaatatctgattgggatgcggatgaaagtgcgtgctgcccagtctggtgatttgagtgcatcttatgcacacgatatccgtcccgtactcaatgattcctttgataaaacccgagaggttttggaacatatccagaactcaatgtcggccattaccgaaatgctggttgaaggaagttcgaaattaaatcccgacaaattaaataagctacgtaaggcacaggagatttttgctgaggtctgcgcttttacgcagcgctatcaagactgcttacttgatgttaacaaagattttgagcgagctcgtctgaaactcattattcccagagataatacccttttccgggaaacgcttgaaaaaggtgtactcaagcccttgctgtctcatccccccgacactgtcgaaaaggaaatcgatggtctcaccgcacgcctgttggctccccgaagacaggatgatgatcggcacattctgtttgaccttgaggcgctgctgaacctttatctcgatagatttgaacaggcgcttccacatgagatacaggacctcaccgatcagcctgtagctattgaaaccaacctgcgaggtatccctgaatctgtcattaaaaaatgcagcgattgggttagtgaccgattgaagaattgggggtatgtgagctttagagatgttttcgacgcctatgagtgcgaagaattatccgaacaagaacaacaggtttgtttacttcatattggcagtctggcagctaacagcgatcccgcaatagaagtagagatagacgacgctatcgaaacaacgctctggcgggctaacaatatcaaactgttaatggtcgctcccttatacccctttgaggagtag

SEQ ID NO: 52628 - DNA, 4437 bp, Enterobacter sp. GN02548
atgtggctgattaagcgggtttatatggatggcgcaggccatgaagaagctttctacaaggacctcacactggactatattggcctgtctcaagcggtcggtagccctgttgttgaaggcctgcgctcgcccgtcaggaatgcgaaggtggtgaccagtacctatcagcagcttgtgaatgggggcggtaaatcaacctacatcgcgctgctgttatcgatttttgagccgtccgttagtgacttcacccaatatctggcaaatcatcgccagagtgaataccactaccgcaattacttctataaagaactctctgttgttttggttgagatggtcaatgaatcaggacaaacgttattactgggacatgctcatcagcgtaatggagatgatgttgaccgcacactgtttatttgtgatgcgcccgacgccctgatgggcgcgccgtttgatgaagtcccttcttattcccgcgcggaacgcaattctgagctacgtccctatgccaatagcctgcgcagctttgatagctggcttaatctcaaggccggtagtgaaggcggcatgcattggcgtaaaaccaccagacagaacgagtggcgcgcatttttgctggaacaacaaattaacgttgatcttatcaaaacaatggtgaccttcaactccgaagaaggtggcctgacccgttttatcgaatacaaaactgaacatgatttccttggcgcatttttcgcctgcaccatgtctaaagatgcggctgagcggctgcgggaactggtagcgcatgaagttgaacgtcagggagagttagaggggatccgtcgtaacgagtacttcctgaaggatgtgctggctaactggctggcgtttcttgatccggctaaacagctggaaagcatccaggcgcagcagcaactgctggatgatggcttccgggaagcaatgcgcgatctcgcagcctttgtcagggatgctcaggttgaacagacgcagcttgaagataacatggatagtttgcaaacgcatattggccaggcgatgtctctgcgtgagcagttaggtaagcgcagagcactgcttgaatatgatctcgcgcagcatcagttcgacaaacaaaaagcgatagtcgatgcgcttcaagacgaagccgatactaatcagcgccagattgagattactcacgctgctatagactacaaagcctatgctaaggcccagaatgagtatctccaggcagatgaagatctgaaggtattccaaagtaaagcggaaaggccgctacaggttattttcgagcgtactgcaggcgaagccttaggcacattagagtgggcaattgacaggcatcgccagcaggaggctacgcttgaggaagaattagggcagatggatagagaaagcaatgcccttaaacaatcatacgacgaactacaaaagatgctgggtggcctggaggcggatcgtgagagatataaaagagacaaacagcagggcgaatcgcaacggaatgaattatgtgaagctggattgatccagaaggatgaaacaccagtagcagcccaataccgactggaattaaccttacgcaatgcaaagcagagtgaagaactggctaatacaattcttcatcagaaagagcaggcgctggaagcacagctgaatgttgtgcgggaggcatcaattgagaaaagtgaggcccagcaaaaactcattctggctgaacaaaaacaccagtcagctgtggatagtgctttagttttagcaaaaacctatcaaaaactgccaacgtcaatgcaacatgatctagatattgaagacacgagttggcacagcgagcagtgtggattgcagctcgacaaggtattgaatgcgaactctcacacgctgaatggaatgaaagagcgtttactgcaagcccggcacgaactggacgagttaaggatgacgggacatgaactggtcgctaagcaggtcaatgaggcacttgaagcgttttatgcggcgggcattgcacgggataagctctggacatttccacactatttggcctctgtttacaacgatgatgcacaaaagattgcatcggtgatcgatcaaaaccctggacgctacctgagtctggtcgcgctcgacaatgtaacttttgaacaggtccataaaattagtgagctccttccctggaagaaggcacctattgctatttacctgctggatgaagcacaagatctccgccgagaaacgtctgaattagtacaggtcgtcctctcaaaccccgataagcacggatatagccaggccgcttacgaagcccggctgcaagacctggagaatatcgtagcgtcgcaggaagtcagtgtgaaggcggagaagagcgcccttaaggtactggaatctttcaggaatgactggcgtctgcattacgaacagtatggcaagcattgggggggactgcttgaccaacgggagctggctctcttaatactggaaaatgctgatgcagcacttaagcaagctgagcatgatgagcaaacactgcgtgacgagaagatacatgctcaggtgcggttaaacaacgcccaacagcagaaaattcaggcagaaaaagcacatgataaactgagtttttttgtagaaacagaatgggcgaagcgtgaaacggcgataatgaaactggagcagttagctgcacagattcaacgaagcaaggacactctttgcacccagagagagagactggaacggctgaacgagatcgagaagaacaagcgctccgagaaaacccttttaaatatccaaatgggcaactggggtaatctgtgtaacgagccgttctattcagagattacggcgactgaaggtatggccggacgaagccccgaagatgcccatgagatggcagctcaggcgcacaaaaaattgctcgaagcagccaacggtgatcaagtgaccgctctcaagcaacaactgaaagatgctgaacaggcacaacgttctgcctctgagcgtttgactgctcaacccacctacaatacatatccggacgaggtaaaagcggcggctatcaatgagctaacggtaattaataaccgtatcgtacgcctgaaggaacagcaaaagcaattcacgcaaaatctaattaattctcaggtaactctgaaaaatttttctcaaagctgtgaggaggctggtaaagcacttgacgaggattttatttgggaagagaagcccattgagatagagacaatccaaacgtctctggctgaaatcgtcaacagcctccatgaaattgaataccagctaaaacttcaactggagcaaaagaagctgcagttgcaaaagatggaaaatgtgaaagaacggctgcagaacgccaaaacagctcaagcgatgattcagcccattacgccgagctctgccgcgggtctacctggcaggatcctgagcatcacagaatatgctgacgatctggctacacaatgccaaatgtatgccggtctaaatgaaacgctaaaacagcaaaatatacgcgtctctacggtctggggaaaattccgcaaacggatcgaagaagagttggccaaggatctagatacccgagccagtcaggaatacttacggcagttggactcaatcgcaacttatcatgaagtgctgggcgatttggacagggtcggtacagggatcacgcaggtatttgaagctgtgcaggatagcctggaacaattccagcgttcgattgatctgactgtcacccatctgactgctcatctggaaggggcgattaaacttctcaagcgcgcgatgtcggtcaaaattcctgaggattgccccgtactgcctggccggcccattatcaaaatgaccgaccggctgaatgatgttgccgctgatctcaggggttttgccagcagccgcttgcagcagtggatagccaagggacagataccccgatcgcccaatcgagacgccttaacagctgatttgatacagtcggtatttggcgaaggggagctggaggtgcgtttgctgaagacgaatgccagccgtccacaatggactcctgtcacccgacttgaaggttcgggtggacagcgccttacatctgcctttttactgtttgtgacggttggtaaagtacgagagtacgatacgggtatttcaagtgcaggattcttgttagccgataacccgctgggtaaatcgaatgccgatgatctaatgcgaattcaaacccaaatggccaaagcctataaaattcagctcatctacctgactggtatttcggatgaaaacgcccaatcaatgtttgataaccatctcttcctgaataaagttcaaaaactgaggcggcgcgatttggtaaccgttgataaagaacgccatgccctgtgggcagcttctctggctgctaagccacagttcgatcccgtcatttaa

SEQ ID NO: 52629 - DNA, 1044 bp, Enterobacter sp. GN02548
atgatctggctatcccgactggagtcgacagccaataaacatcgtcttgccgctggtaaggccgcccgtacagtgaaagctaatgcggtgctggatgaggtattacgcgcacacaatcaagaggccttgagccaggaggtgcctgatttgctgagtcaggctgttacgctactgcttgagagggactggcgggctcagcctaagcgcaaagcgagttggcagcgctactggcggggtatgagcctgccaagtacttttgtttacgaaggtgccatcgttcctacgaagacaacatcagaaatagcctggcatccttggttggcccgacgtattacaggacaactgacccagccaatcaaagcacgcttacaacagctgaatacatatctttttcgccaaaccgagggcgacaagtcactattcccgggcttgcttgggcatcgtgagcggtctctgcttatatttggtgacgaaaaagcgctggactccttgccgcctgatggctggaagcatgtcactctgactttggctgatatgggcgcgtttcgacgtgcaccgcctttaccgtatgagtcatcatgttgccatgatcttccggctatcattgttgaaaactccgatgtgtattatcgactatgccaacttaatcgagttgagactcgttggtcactggtcatttatggcgcaggtaacaaagtgtccggccaggcggagtgcgtgtcacaactccttgaggtcgaacaggtaaaacagttactttattttggcgatctggatgtagcgggcttaaaaatcgcccatcagttgcagtgtaagctgcttagtgattacggtatcagcttacatttggatgaatggctttataatgaactgatcttaaatggtctaatgacgccagaagggaacgccaataacgaacggtttgattttgaattgcagtgtaggtggatgccacagtttgttttacgagaaatgaagactcttctggcgatccatcagcgtctacctcaagaaggcgtggcttctttaggtttagtcatatag

SEQ ID NO: 52630 - DNA, 1506 bp, Bacillus vireti; identical to SEQ ID NO: 52232

SEQ ID NO: 52631 - DNA, 747 bp, Bacillus vireti; identical to SEQ ID NO: 52233

SEQ ID NO: 52632 - DNA, 4464 bp, Bacillus vireti; identical to SEQ ID NO: 52234

SEQ ID NO: 52633 - DNA, 1074 bp, Bacillus vireti; identical to SEQ ID NO: 52235

SEQ ID NO: 52634 - DNA, 1605 bp, Desulfosporosinus acididurans
atggcgaaatttgagtttcttgaaggctttgaacagaggatgaagcttgtcgcggcgattgattccattattaaccgtaccaatcgtaagatggagttcgaaaagttgtttgagtccgggcagctggataatatcattttttcagtccttgtctttattatggagaagaccttgactgaggacgaagattgtaccatggagagcatcgcagactttgtggcccagcttatctctgcttattctgtcagcttgaccgcggaggtcattcgcaaactgacagagtacatcattaaagatattctgcaaaacggtggtgaggccaggtactttccggttatgaagtacgggcagggcatggagcagctgcgcatcaggctgattgatgacaagcttatcgatgatccgcgcggctatgtcctgaattaccaactgactgatcaaggttatgatttactgtttcgcactaaagaagtcgagcaggaaattagttttacgattgaggagttaaaactgcgcgaactgatcaaacgtaaaaactacaaaaaagccatcggccaaagtgccaaccttgtccagatgatcaggcaaaagaaaaatgacatcaggcagtttgtgcagaaggtgcgggaaaatatttacgaggttaatattgaggaattcgaacgcttggtttccagtacttatactttactggaagaagaatacagcatgatgaacgaaattcgggagatgatcgtgctctcggaagaccgcctcagagaggaggaagatacccggggagctttggatgagcagatggctaaagcacgctcggaaattgctgtcattcgtagaaatatcaatctgacaatcagcgaacagaaagaactgattctggaacggctcagtttggcgcggatttataaggaaacgatcgctgattcttttgccctttccagagcccgttattatgattttgaacaggtaatcttaaagcctttggaaaattgtgaagaagaaaacatttcctctctctggcaattattaaatcctttattgcggcctaatcccgaccgcagcttgaacctgctgacactttacgaaagacaagcgcggcttaagcaggaggaagaggttctccccagtattgtcctggaggagctgggcgaagacctggagctgcagaaaattaagcgaataaatgagagtaatattgagattattcggagcatcctagagtttgcccagcaacaaaggggatcctttaggttcggcgagtttttgcaggatctgcagagcagggaacgagtattgcaagaattaacggcggatgacttgatttttaaaactatgcttaagctgtatgatttgcagatgatcgatataaataagtggaagtctcagcaggaggacgttgtggctaatgccacaggggaactggatgtcagctattgtctataccaaattgaatattcccagcccgatttatatgggattaaaaaattggagatcaccaaaccggacgaacaattatgggaacaggaaattgcaacgtatattggaaaagagatgtttagcaggcgtattgtcatcagtgattttatgattgaggtgagctttgagtga

SEQ ID NO: 52635 - DNA, 702 bp, Desulfosporosinus acididurans
gtgagcgatataaaaactgccctgaagatttatcgcaaattgctggacaagggacagcttgatcgggaaactgagggagatctgttccttgagtttcgcaatgttgaggtcagagcaatcctcgcagaatttgaagaggagctcgattttaaagttattgaaacagcggggagcctctatttgctgccgaacagcggaaacggagtcttaggttttacaacgaaggatattcgagaagcggtagcaacagatgcccggttagtcgatggttatctgcttagttatatttcgatgtttattttgtacttattttacggcggacggaatcgaaatcccaaacagcgggaatttttaaggatcagtaagctggtcgaggaactggataagcgttttagtatggctttagcggatcaagaagagacgaagcttatggaagaaaactacgccctcaattttatgcgcattgccgaactctgggaaagcaaacaggatttcgaggaaagaggacgtaaaacgaaaaccggcacgattttaaatacttgccggcttttagagcgggaaaatcttctgagacttgtagatgatgaccgggaaatacgtcccaccaaaaaactggatgacttaatgctcaattattacttagatgacagccgcgtggaagaaattaaagggtttttcgaaggagttgggcaggatgcctag

SEQ ID NO: 52636 - DNA, 4410 bp, Desulfosporosinus acididurans
atgcctaggatcaaccgtattcgcattattaacttttcctacaataatgattcgcggcatattcaggatgaaacgtttaattttcacggcggtgaaaatgccctgctcagcttagcgaacggagggggaaaaagtgttctcgtccagttatgctttcagccgattgtcccggaaattagaattcagggccggcgcattaacgctttttttcgcaaaaaacgattgcctgcttatgtcttaatcgaatggaaactagacgctgccggaggctatttgctgaccggtattgggatggtggctgctgaagtttccggggtcgaagatgagagaaaccgggtgaagtattttaccttcacttcgagatatacgggttccaatgattttgatctggccaatattgagctcatcaagcaaagcggaaatattttggagatcaagccttttaaagaagcccgggagatgatagctgagagggaaaagaaagatccttataattttggctgtttttatgatgatgatggagatcgctaccgcaaacgtctggctgaattcgggatagctcaagatgagtggcgcaatattatcgccaaaatcaatgatcacgaaggcggtttagatgagattttccaaaagcacaaaaactccagtcaattgttaaatgagtggattattaaaaccattgaaaaagtgatcttcaaagaccgtgccgaagcccaccggctggaggaaatgctggagggccttgtacgggaggtcattgagaatgagcgcttcattttagaaaaagaagtgctggacgagtttttgaaggtctatggagagcaggttgtgtctctcgttgaactgcttaatggattggaagagcaaaaaaactatggcgctaaactggcggctatgtatagctatttagattctgagacggttaaacttaatgaaaaaaatgaggataataagattacgctagacaatatcgaactggaacgaaagcggatcaatctggaagaccgctctcatgcgtattggttaagaagggacgagtatttgctggcagcctcgcggttggctgagtcggaagagaaaagccgggaaaatgaggagaaacttgaaataaccaaacgatcgttaaagattctgcaggctgccggattaagggatgaactaagagtaaaacgagctgacctttcgggaattgatgagaaattaaaagtttctaagtcccaatttgatacggataatcggatgcgtaatctggagtattcgctcaaaatggcaactcaggaaatcttacaatcccttgagtctgttttgacgcgcttaaaggaagaaaaaggcgaacaggagacattaagggttcaggctgataaagatgttagtgatctcggaaataatttaaggaaatttgagggagagaaagggagtctccagcagcaaaagttacaatatgagtcacatgaacgggacgttagatctaagctaaaacttagcttgagtagaaatctgctgggtgaattggctgcggatgagattgaaaaggccagatttgaactcaagaagaagctggaagatttgaaaaatgaggggcagcaactgactgaagaaagagctggcaaggaacaaaggcagctggaggcagatcaagagattcaaggggtaggggaagaaacgtccagagaaaaaaatgttcttcacgacctggagcgagatattgaagtttatgaacaacaggaacgggagattcaagggattctgcagaaatttgggtttaattttgaacttaggtttgaccgggtgcggcttcaggcagcctttgaccaactgctcaaagaccttaatcattccctggaagaagccgtacggatgcgtgacgatgctaaggagtcactattttccctcaacaatgggagactgcatattccagaagagataatttctcttctggccgataaggatatttcttatgagaccggcgaagcttatttgcgcaatcaatccccggaaattcggcaaaagctcttagctgcaaatcctgtattgccgtatgctctgattctggctaggcaagatatcgaactcctggctcaagccataaagaatctgaccctgcgccgtgctattcctattatggcctacgaggatttaagtcttagcatgtcattacttgctgacagatgggttcagaccgctgaaggaatttttttggtttgtttgtatgaaggccggatttttgaccatagcggtctggaaaaactggaggaagaactgaagcgtaagcaaaaagactccttggaacaatatcggcattatactgaggaacgaaatgaagtcgtcgctaaacaaacgatctgtagtcgctttgcctttaaagcagattatcgctatgatttagcaaagaaaaaaacagcgtcagaaattaagctccaaacgctggcagatagaagggattttctgcgccaggagaaagagaatctgcgtataacgttgcagaatcttaagcaaaaaatccaaacagttattgagtctcagcaaaaagcccaaaaagccgttgagctctttgaagcctggatcgaacaagagaatgattaccagacttgccggcaaaggcttacggaagtaaacgaggcgatagcaggtgcggaaaggagaaaatccgaactagaagcaagcttagtaagctttcagaagaagatcgaaggatttaccttggaaatcgagcagaaaaaaatagaagtcagagatattcgaaaaaagtacaatacctatcaagatgctcaggaagcagaattcatcgcagggactgtcgaagagctggaagaaaggctgcaagccctgaaagctcagtacagcggagaaattgagctcttggaaaaacgtaaaactgagctgcagtctgaaggcgtgaaaaaggaaaaggaactttccaaactaggactatcagaaggcgactatattgaggttgtttatgatgaaggaaaactagacgagattaacttggaaatcagcgtcctggaagagtttaacaagaagctgcaaaataaaagattcgcggctacaggaattgagtccgccgctaaggaagcctgtcgtattgcggaggaagaagtgcgcaagcttggtgcagaaagccccttaggtcaggaagatatcaaaggggattttccagggcgccgacataaactggctgagcaacaggccaaactgactgaggagatcacgcaaatatcccgtaaaattaccgactacaacaaactgatggagcaaattacttcccatattaataaattaaaggttgaaccggaaaaaggcttccggccagaacaagatgtcaagagtcaaacaggactattggtggaaagatatcgcaccattgaagcaaagaacagaacccaaggggatggccttcgccagaaatattccggattgaaagcggaataccgggacaaaaatacgaatatcggcaatatctttaagggtcttgaccagctctgggataaagcggagatgggttatgacgatttttattatctttatgaacgcctgagcctgcatcaagacaaactccgtgaattaatcaaactgcatgaaaaccagctctttaatttagaacggaacaagaaggatatggtccagcagagtctgctccagggaatgagattctatgaagagatagaatggatatccgatcactccaaggtgcgcttacaaggcagaagcaggccggtgcaaatgcttaagattgaactggccttagattcccatgatgctgcaggtctgcggatgaaggactatatcgaagcgtgtattgccaaggtgcgcgaggaaaccagacaggaaaaaagtgaggaagaggttaaaaaggctatagccaaactgatgtataaccgggagttattgaatatttatttgggtaattccaatattccggtccgtgtctttaagatcgatctgaacatgcaaaacagcagtcttaagacctgggaagacgctatgcgcgagaactccggcggggagaagtttgttgtctatttctccgtgctctcagctttaatggcctataccagatcacggacattagaggccgctggagcagaggaagataaagattccagcgttttagtgatggataatccctttggccctatttcttcggaacacctgctcaatccgctttttgaaatcgccaaaaaacatcgcacccagctgatctgtctttctgatctgaaacaaaactccatcctgaattgttttaacctgatctacatgctcaaagttagagccagtgccatcggcagcaatgagtatttgaagttcgaagaaataattcgagatgacagtgatattcataacgatgaaaaactggaaaaagcgatatttagggtttctgagcataaacagattaatttatttgactaa

SEQ ID NO: 52637 - DNA, 1194 bp, Desulfosporosinus acididurans
atggaattgctcgaaaaaatatttctgcattccaagcaaacgatttctgatcaggaattgcagcggatagctcaagaatcggattacgaattattccatactcaagtcgaaaagttcgtcgagagcggcgttctggttgcggtgaaatcctcgaaaacaaatggacgtataccgccgctttttaatagatatcgaattatcaaaccgcaagaagatttttctgcttacctggagtcggttcgtcgtcttaatccgcttttaaacattgctggttatttgcaacgcccggaattatataaaaaacacctggagatcgttgagggtctcagcaggtatttgtggtttgcccgggaattattagaacagcctatgtcccgcaaggaacgatcattttcggtctggggccgggaaaagttattagatgaacatttggccttagtaaaagaagtgcttaagtttaatcgcttagaagagacatttctaaacttttatgatactccggaacctttttttgaatatcatcatcagccgggtgagttaacaactgtattagtgatcgagaataaagacacttggtttaccttgcgcaagctcatgcaaacaagcggaaaaagtaacattgcaggaacggaagtcaatgttcttctctatggagaaggaaacaagattaccaagaaaggtgccttggaagaatacaaggttaccatgttgggcgggcagaagaaaaaaatttctgccggcattagcgcagctaaaccgacgacagagggcgcgtcttgtgacgaatgtgcgaaggacggcgtcagcattcggcctgcaatctctgttgaggctgataagaagggcaactcgtgcgaaggcagtgccctcgtcgtcggccagtgccagccaaggtttctgtattttggtgatctggactgggaaggtattcgtttgttttttcgtaccagagatgccaacccctccctggatatcaaaccattttcctatttgtaccgcctaatgctggaacttgcagagtcggtcgaattgccgagatctctggatcaaagaggggttagcggcccgctctctgagtttctttctctaatagggctaactgaagagtcaagcctcagttcgatactggctgagggcaggtatataccgcaagaaattgtcaattatcaagtggcagctaaaattctcaagtag

SEQ ID NO: 52638 - DNA, 1599 bp, Peptococcaceae bacterium CEB3
ttgggagaagaattaagagggtttgccgggcgcatccagaatgtcgcgctctttcagcccttatttgccttgaacaataatcgcaagtacaatcaatacgacgccttgagccttggctttggcgtcttgctcttgatcctggaaaacatgctcattggccgcaattactgtgagcatgaagatatcgctcgttttttacgcggggtcgtggcagaggtttatagcacggatctgactgaaaatgaaagcttggagatggcttactattttctggatgccttgcgcaacaatggccggcctttcgacctggagtataaagacttggagaatggccaggatgtgcgctgcaagttcgccctcatcgaagtggccagctacgaaatccacggcacgatgcgttttcgcctgacggacgccggcctagacttgcttttcaagacgaaagaaatctacaaagaattgcggatcagtatctcccagctttatctgcgccaacagattgaaaagggtgtttttcaggaggccttgcgcaccgtcgatgacctttatgtccaggtgcgggatgtgcaggccaagctggagcggattaggcagctcgtcttgcgcaacgtttcggaagtgagtgtggcgaactacattaccctcatggaagaggtgacggaacagctgggccgggaaaaggaggtcttttcttccttgcagggcctgctcaaagagaccgtggaaggctatcgtttccgggagctgaccggtaaggagagagagagttttgatcagctcgtgctggtggccaaacgtttagacctcgtggtcaatgaacacaaccgtctcttcaccagcaaactttctctgggagcgctgctcgaagaggcgatgctggacagcctggccaataccttccgcaccaaaatcaatttcgagcgcgattttgtcgatcaagtggttagtgataatccggatttggaggctttgcgtcaggttctcaaccctctcttccgctgtcaacgccatccttcgtttaatattctgcgtgttctggagccgcagcggctcaaaggggaagagagcgacccggaagacgtttttctgggtcccacggaggctgatttggaactcgctgtcgagcgcgaacgcttgctcaaacaccaaagggatgaacgcaccctggactatctggagatcgtgctgggttccctgctcaaagaaaaggaacaaaagctaagcggcattctcaagtcgctcgccggagaggtgtacgtccgcctgatctctgaggtcgagttctatgcctttctcgttcaactccaccaaatgggcaggattcccttgacggtggatgaagagatgcgggtgaagatcatcgattcggaaacgggcaaccttcccttcctgctcttaaaatacgtcgacgcgcatccggagtccgccgcgctgggggaagtggacgtggaggcgaccccccgggagctcaggttggaaaatggcagcagggtcacggactaccgtttctctgtctgtccacagggttctctgggttctcaacatgctcaaaatcttcaagacccgcaaggtcctcagaggagtgaaaccggtgtttga

SEQ ID NO: 52639 - DNA, 735 bp, Peptococcaceae bacterium CEB3
gtgtttgaatcctataaagcggagaccgtagccagtgccttggaaatctttctcgagctcgtgaaaaagggcgaactgcacgcggaagaatatccccaactcgtccagacctataaaaccgaccttgaagttcaggggctcttaacgaatattgtcgaacccttggcggatgtgaaaattctggagtctttgtatgtcctttacctgtctcccaacctggacaaccgctttttcggctacaccaatgaggaactgcgccagcggctggggcttacgctcaaccgggagctttacctcgcttatttcattatcctgtctctcttggctatgttttacggggaagacagcctcagtgaagtgagccgcagctatgtgacggccgctgacctggaacggttcgtctcggagcggctgcagagccttgccggtgctgccgaactcccggagtgggagaaagaactggaggtgaatttgctcagctctgttgaactctggcaggacatgccggagtatgatccggagttaaagacgcttaggcgcagcaacaaaaaccggatcagtttcatcctcagggttgccaggtttttagaagaagacgggctggctcatgtggaacaggaccgggaaatttatctcacgcagaaaactgagcaaatggtgcgcaaatattactctgagcgcaaccggcaggagaaacttctctccctgctctgcgcacgcaaggaggaagcttaa

SEQ ID NO: 52640 - DNA, 4395 bp, Peptococcaceae bacterium CEB3
atgccacacctttggcgtgcccgcctcacgaacatcgaatacgacgccggcaagaaaatctattccgacgagctctttcgctttaacggcaggaataccctcattaacctggccaacggcggcggcaaaactcttttgattcagcttctcctgcaggtggttctacccaatgagtctttgaacaaacgccctctggcagaccttttaaccggcaaaaagtataccggccatattttggtggagtggaaactggatacccaggagcccgcgtttcttaccacgggtttctgctttacgcgcggcaatgaggaagacgagcgtttgaaatacttcctctacactctccattatcacgtggctaacgacttcgacatcaagaatatggcgctcgtgcaggataaaactcccttgtcctattctgaacttctgaaccttctgcgcggggctccgcgcagccccgagacccgtatttccatctacgatcgggatgataaaagacgcgcctaccttcgtgacctggagagctatggactctttgcacaagagtggaagaatattaagcagaccaacaatatcgaaggtggggtcggggagttctttgcccaggctaaaacctcgcgtcaactcttggacacgattctcattcccgccgtggaagaggccattttcaatggggaggaagatgccaaacgcctggcgctagcctttcagcaggtgaacgaaagcctgatccgcctgccggagttggaaaagaacctgcgggactttcagctcttgcggacggagggagagcgggttttgaccgaggtgcggaggtttgcgcaaaaccaggctactctgcgggaggaaaaaagccggttgcgtcaactctttaaccgggtcgaacaggaatgggaaaccgtgggtcaggacctgggccaaattgaggaagcgctcgccggcaagaaaaatgagcgccagaggctgctttacctggcggagagcattccctatgtgcgcttggttcgggagaaagaggccgcggagcgggagcaccgccaggctcaggaacaactgcggagtctcagggaacgcgaggctgaggcggatttccgttggcgtcagagcaggggagtgaacttctacctggagagggcggcgcttttggcggccaatcaagggtatgagaaacagagagaccttctcgccctcggccgggaagataaactcctggagctcgaccgggcccgggcgactttccgcgccgtgcttacggttctgcgcacagaaatccaggaagagtatgattgcctgaaaacggataatacaatccttcttaggcgggaacaagccttaaaaaaagagctggaggggttgcgtcaaaccgacaaagacctggcgggacgcattgcttccttggctgcggttctcgaacgttatcaaaagacgtgggatgaattagcccaagtttatcaaaatattggctggcttgaggtcccagaacaggccttaaaagatctctccacggatctcgcgtgtatccgcaacacccttcagggtttagaagagaaacgaagcacgttgctcagcgagcaaaaggagcgggaagaaagtttaaagaccctgatccttacgatttcggagcgcgaataccggctgagtgacctgcaaaaagaaaaagaagcgtcagagcgggccacggccaatctgcaagaagccctggggcgcttttccatccactgtgtgcatcctcaggccgagcacagccggatcgaggcggaaatcatcagcaagaaaatggccttccgggatcggatccgcctggaaggggtgcgattggaagaggacaaaagccaactcagtctcctgcgggatacagacagttacgtgcccaaccgggaaattctcaaagtgcaaaaactcttggaagagctgcggataccggcccaaaccggaagcaaatggttggaagaacagggggaagaagcggaccgggaagcctatttacgccatcagcccctccttccctatggactggtcttagcggaagaggacttcaaacgcctggaaaacagcaacacctggcagagcgaactcctgaactccccggttccgctcctggcccgccgtccggcattagtgcctgccgaagaatccaccctgagtaagattttgcccatcggtggcccggcgtatctcctctggcataaagggtatcgctatgctctctcgggtgagtcccgcagggaatgggcgcatgatctggaaacggagattgagcgcaaaacagaaattctgggtaaccttcaggtgaccgaagaccagctggttacgctccaggaacaggctgacggttatttccggctttatccgcccgggtatctccccagcctcgctgcccaaatcgaccaggctgaagaagccctggctttagcccggagtgagaacgaaaaactcatggctgagaaagcggaagccgagcgcgagagcaaagagacacgctcacgactggaagagaagcgaaaagcggagaatgcgcgggagagagatctggagcggtttagagcctggcagcaggactttctcgaccggaggcagaaatactcggagcacaaccaggcgttactggaccagcagcgcctggcgtacgaactgcggcaaaaggaaagcgagcaagaacaaacccgggaagagcatctcaatggggaacgaaagcttaaagatctcgaaagcctgaaacaacgaagagaagaagagctgaactctgtgcctgtgcccagccggcaagttctgcctgagcacgagatgagctatgaggaggccaaagccctctgggaggtcagtgaaaaagcctttgcccaggcgcattctgaactcaggcattgggaagaaaacatccggcgcaaccgcgaggacagtgagaagctcttaaaacgcctcgtccgagagctgaagttagaactcacagatgtggaagaggccaagtaccctatcactgaagaagagatcgatcgccaggaagcggaggttctgaagctcaaagaggagaccggcgcttggctggaacgggtcaatgctgcggaaaaggtgatcgaacgccttttgggacagctgtcagaaaaagaagctcgcatccggcaaacgtatgggcgggaacccgccctggcttttgaagatctcgaaggcgaagcggccaggattgcgcgggaaatagacgccctgaaaagtcaggtcgaggaatggaaccaaatcgccgctgatacgctgaaacgtaagaccatgctgacgcgggctttggatagcctggccgccggcctgaagaatttcgaagtgcctcccagtgaggaaatcctggccgaggctgattggcaggctgcgcgggacaagctggcagcgaccatcgaagcctggagcaagctcctgcaatccacccaaaaggacagccaaagactgcgggaagctgtggaaaaggctttccgccactatgcccaagtcctgcgggatcaaggaaataccgtgatcgaccgctttgtcagccatttggtggcggacgaagagcgtcacttccaactggaggctgtggagcaaagctttgccaagagctttgaaatcatcgcccaatacgaagaaaaagccgcttttgagatgaaagaagcggagagaaacaaactggaactggttcagcgatccatcaagcaggtggagcgggtggcgcaggaaatgcagatgatcgaccgctatgtcaaagtggattatgccgggcggcgggtgaacgcggttcagatcaagctcaaagagatcgaagcggacaaggcgcccgctctgatggaggcctatatcgacgacctgatcaaagaacttaaacgcctggcccaagaaggggagacggaagaaaaacaagaaaaatttatcgaacgcaagatgtcctcgcgccagcttttaaatgtcctgtccgctctggaccaggcctccgtccgcgtcctcaagcccgaacagcacccgaccggcccttacttcagcgcctgggaagaagtgcaaaaatggtcgggtggggaacgttatgccggctatatggccatgttcatggccatcctttgctacacccgcagcaagatgtccagtctgcataatccgcccaaagtcatgctggctgacaatccctttggcatcgcttcatctccccatgttctcaacctgatcttccaattggctgaaaacaacaaggtccagatgatctgtctcacggccctctcggaagacgcgatctttgcctatttccctaccgtctacagcctgcgcctcaggccttttgccggtaacgattacatgacctcgaagattgaacgcggctcctaccacattgattccctggaggaagaactgaaaaagaagcgccaggtcgagttcgattggtga

SEQ ID NO: 52641 - DNA, 1116 bp, Peptococcaceae bacterium CEB3
atgcttgaactcattagcgagctaattgccggcgcaaagcaaaaaacgctggcgagttccagcctggaggatcaggtgtataaccggctgggagaagaatatgctcgtcttggcggttatcccgcctttgccgcggtgatcgaggctctttgccgggaaggaacactccaagcggtaaaagcctccagaagcaacggacggacaccggccttgtctaaccggtaccgcaaagtgtcgggcgtcttgtctgaggaatctttgggcaagctgttgggaatgcatcctctcattaagagtgaagcttatcggaagttccctcagactttcactgaagacgaggcataccttaaggcgctggatgcttttttgaaaaatcctggcctcaaagccagtctggagcagggaatttccgcgaatgaacgctcctttcaaatcttccgggatgagaagtttctgctgagttcgcagggacgtactttcttgcaacgggttggcctcaacctggaagatctgtcctgttatgtgacctgcgaacctttcttttatgttgattatcgccaagtctcgccttccgaacaaagctcatctttgccaggggttccggtcgcccataccgctctcatcgttgagaacaaagacacgtttcacagtatcaaacgtgcctggcgagccggtgggcggcggctgggggagcaagacttcgatcttttgatctatggcgaaggccgcaagatcgtcagcagctttgcttttgttgaagatatacagggaatatcgccggagaatctgcgcgttctctattttggggatctggacccagaagggctggatatttttggggctttggcgacggctttcccggattaccgcattgagcccctggtcttttgttatgaagcgctctggcggctttatggccatgctgcccctttgagacgggagacagagcaaaaactccatcccgattatgaaggcaagttcttggagttttttccgcaaacgctgcgttcggaaataaaatccctgctcgctcagaagcgctatatccctcaagagggcttaagctatctgtttttcagccggtcgggagaggtgtcactttgggagaagaattaa

SEQ ID NO: 52642 - DNA, 1680 bp, Robinsoniella sp. RHS
gtgattagaacagctttcattactacaaatggaatagaagaggaaattatgtttgattttttagaaggttttgaaaagagaatgggatttgcggcggttgtggattccattgtcaatcgaaagaatacgaatatggaaattgagggctggtttcagggagaagaattagataatctgttcttcacgctgctggtctatattatggaacagactttgaatgaaaatgatgaatgtacactggaaaatatagcgcgtttcctggatgatattctgccggtttatcagaagaaatggccttttgatcaggtgatgaggctggctgaatatatggtgaaagatattctgcaaaataaagggacggttaaaaattatgggattatggattacgggcggcagtggcacgatattcaggtgcgcctgatcagtgataagataacagcagataataaaattatatatcagctgacggatcagggatatgacttcttattccggacaaaagaaatagataaggaaatggattttaaactggaacagctaaagctgaagatgctgctcaagagaaagaactataaacatgcgttaaaacagagccgggatttgatcaacatgctccggcagaagaagcgggagatggaatccttcatagaccgggtgaggcagaatatccataccattgaccggggggagcatgaaaggctgcttctggagacttacaatctgattgatgaagaatatgaagatatgctggaaatgaaagaggcggttgtgaaggatgaagaccggatcggtcgggagatagaggaaagcggctattcggatgaaacaatgaacaacgcgttatataacctgaatctgattaagcggaacattcagattgtgataggggaacagcggaacctcattggaaaacgttttaatatgaatgatatttatgaagaaaccattcgaaacagcttttatgcatctgtggttaaacggtttgatttccaaaaagagattatggatgagatggaaaaagtaaattcaaagaatgtatcaaatctctggaaactaatgacccctctgtgtatgccgtcattggacaagaaaatgaacctttccctgatttaccagaatcagggaaaacttagagagaatgaggaagaagaccatgtggtggaagaagaggttctggaagaggacttacaggctgcagacagagaaattagcaatgctatgaatttccgggttatagaacggatctttaagtttgctggtgaacggggaacttcttttactttttcgcagttttatgaacatatcgtggaaaaaacccagagaatacatcagtatacggagaataaaagaatttatctgattctgttaaagctgtatgattatggggttattgatatagaatcgtggaaaaagcacagcagtgaagatatgattccggatacaaacggagagtttgacctgtcctggtgtctccggcagatggaagacaggtatccggatttttatggtgtggaacagctggtatttgaaaaaaaagactttatttttcatgccgtgttagaagatacggttggagcagaagtgttatacagtacaatagaaatggcagatatagaaataatacctaagatcagaagcgaggtggggcaggatgttgaaacaggcattagcgatatataa

SEQ ID NO: 52643 - DNA, 705 bp, Robinsoniella sp. RHS
atgttgaaacaggcattagcgatatataatcgtttattagaaaacggagaaattgatgcaaaaacggatagtgaattgtacatagaatataaaaatgaagaggtccgcgaaattctggagcagttttcagaagaattgaatttccggattctggatacaggtaatactatttatatgataccgaatctggacaatgatgtgctgggatatgtgatgaaagatttcagggaaaacatagcgacgaacgcaaagctggtcgatgcctacctgcagtgttatatctgtatgatgatcttccagatgttctacggcggaaagaatacgaacccaatccagcgagagtttatccagaccaaagatctgattgaggtattggaccagaaaatggagggatacctggcaggagaagaggaggctctttccctggagaaggattactgcatcaacttttataaaatagctcagctatggcagaataaacagattggggacagtattgccagaaaatcgaagctgggaacgctggcacgtgcctatgcgcagctggaacatgagaaattggtccgtgtactggaagaaggcagagaaatcaggcgtaccagacgcatggatgacctgtttttatattactatctggatgaagccagggtacaggaaattcaccagctattttcacagggggagaagatcaatgccgaagattaa

SEQ ID NO: 52644 - DNA, 1008 bp, Robinsoniella sp. RHS
atgaagattgacatttcgaaaatacagaaaaaacgtttccgctacgaggatatcttaaatctctatccggatatgaattaccggcaattgtttgatattctggaggaactctgcgaatcaaaacagatagcaccaatcaaaaaaagcggaaagacatccttttatccggcggtctttcgagaatataaaaagctgccgccttcggtagattacagttgttacatcgatgaaattgcggcgttgaatccaaggctgaatatcagcaggtatctggagaagccaggggaatttaaggagctgcgggacggaatctgtaagctcagtgaaatgctctggaaagatgacccgcggctgcagcagaaaatgtctgttaaggaaaaatcctatgcgatctggggtgatgagaaatatctggagagtaaaagcgggagcagaatcctggcttttaatcagtttgaccaggtgagcctgaattattattatgcgccggagccgtttttttgcagggtatttgatcagattgcgggtgatgtgattgtcattgaaaataaagacacatggtattcaattggtgaagcattgaaaaattcaaagaataaaagatttttaggggtcaaagccggactgctggtctatggagaaggaaataaggtgacaggtgaagctgcactgcagacttttgtgacggaatatggtttcgagaagagaaagatactttatgcaggggatattgatattgccggaatccttatgttttatggtgcggtcactcataacagggagattatgatacaaccttttatgcccttatataacaaaatggccaaacgggcaaagaatttacagatgcagccgacagatgataacaggggaagagactggaataccggattcctggatttatttgaagaacaaaatcgggaggttgtaagaaaagtactggatgaaaacagaagaattccccaggaaatactaagttttcaggattatattggaatgtgtgattag

SEQ ID NO: 52645 - DNA, 1497 bp, Bacillus firmus
gtgaacgagtcatgggaaggattcgcccagcggatgcagcgtttaaacccgctgtttgagcttggaaggggaatggaagtcggagagctgaagcctcatatccagacgattctgatgcaggtgctcctcaccattttttatcgggaattgaatgatgatgatcatcggagaaaatcggatatcaaatatatggttgaagattcgattaaacaaatgaagctattggctgatgagaagcagattgaacgaatcacaagtgggcttctgtatcagggaaaagaagaatacagcaggccgtttgaagccctatattacgatgaaatcagacaatcatgggagacgcaggtattccgctatgtggcaatggatgaattatatacaaacctggagatgggcggatcaatcgtctacaaactcacagatgtctcacaggaaatgattttcatgagcagggaaatggcggaggagttctcaatcaccattgaacagctctatagtatgcagctgattaaaaacggtaatttccgcaaagctacccgaaacctcgatcacctcatttcacgggtcaaccgcttaatggcaagagaattctcctttcaaaaagaaatgatcaataatcccaaaatcttattgatggaagaagaaatgcaaagggctgataaccgtgcggaaattgagaagcaatttgaagaagaaaaaaatcacttccgtaccatcagcagtatgattgagaagacaaaacgaagaaacgaggaagatgatcacattcaaagactcctgcaggaaaagatcggccatacaaggcaattgcatgaccgttttgccaagcttgtgattcagaatatctcctatgaaatgaaattaaaagcggaaaacccttcactgttttgggaaacaagtctggtttcgtttcgggagcacatttatgaaaactggttcatgaaggagggggtatcttccttcgatcatgttgagaaggtacttggtcctttattttcgccaaagaatgaatttatcttgcccttggattggatctggggcgaacaggaatttgatgaaaagcagcttacagagacgatggaggaagaaacggaagacgaaagcattacccatcagcgcgtaacgaactgggaatctgttatcaaggcctggagctatgtgtttcaatatttgcagacatacagagagttttccctggctgatttaacgacattgccgcttgaagtacaggatttatggtttgaagaatcggaaacgattgatttatggatgatgtttgataaaaagcctctgaaggttcaggtgctgcaacggaaggaagagagcttgagcgatgagagggaaattcttctttataagcttatgcaggagtatccgcaattccaggtgtttgaaggattgaaactttatacagagtttgatcatcgggcggaacctttcctctggtatcaaatgaaaatcactccgtttaaaatttgtgttcaggaggagaaatga

SEQ ID NO: 52646 - DNA, 747 bp, Bacillus firmus
atgaatgcagaaagtattaagactgcatcagcagtttatttcacgctattaaaagacaaggtcatcgatgaaaacagcgagcactttcaagcgtatttcgatcctgatgtaagacagacggtgcttttaatggcagacgaatccgggacctttataattgaatctccgaaacggattcagctcgttgtgcagccgaccggctctgtttttgcgacgaattttacacatatgaaggacaggcataaacaggttgaaaccaaaaaacattttcacctgatgagcgttgtcattatggcattcctggcgggcatcgaccgcaatcaggcggctaagatccgcacgaagcgcgaggggatcagcttttttacattggaacggcaagtgaatgatgtcattatgaattgggatagcctgcttaaagcaaagccggatttcggagaagaagaaaaaattgatatgagagacgttgtaacgacatggaaatacatggaagtagatacagatgattatggagccaggaaagctaatcgcagaacgcggattggtttgattgcaagtgccatgcgtcttttggaaacagaaggactcatcatcattctggatcgggaggatataccgaaggcgattccaaagcaggagttatttgagcggattgaatacctgtatcatgactatgaccgttatgagatattcaaggaattgatgaaaacagaggaggatcagcatgccgaaaatacatcgaattag

SEQ ID NO: 52647 - DNA, 4461 bp, Bacillus firmus
atgccgaaaatacatcgaattagaattgccggcctgaaatatgatggcatgcaaaagcagtatagggacaccacatttaactttcataatgaggaaacctccacaaatggcctcatttcgatgatgaatggaggagggaaaggtgttttcctgcagaccatatttcagatccttaagccgggtaccgcatggggaaagcagaataatcgcttttatcagcaattcttttttaataataaagagcagtttattccttatacctttcatgttctcatacagtgggagctcgacggggctgaccgcaggcatttggtgacgggcggaatgttttcagcagaacagcgtatatcaatgaatgaagagagcggagaaagcaaacctcttgagcaggaagcgaaaattgtcccgaatattaccttttatactagggagtttgaacgaaaagaagaagcatctcttgaacatattccgctctatgaagatggagaactggctgaaacagaaggcttgaaggattatttaaaatggaatgggtacgatgtttaccgggatacaaagaaacactaccgaattctggatacatatgggattaaccgaaaagattgggatattatgaaggacattaataaggatgaaggcggcgtcggaaaattctttgaaggtgctgaagatgatcattccctgttccaaaagcggatcattcctacagtcagtcaggttctgcaccggacggagcatcagaagaatgatcttgtggagattttcaagagtcaggcaagcatcgcaaaggacctccctgttttgctgaaaagagagctggcacataaagagttcctggaagatattcttccttttgaagagagcctggcaaagggtgtcgggcataaggaaattgtagaggacagtattaaagccggaagacagctgctcggcgctttggagcatttgaagaaaacggaagaagaaatactcattgatctggaaaagggaatcgaaaaattaacaggcaggcaagtggatcttcgttttcagaaagataatcttgagtatgcaaaagctcaccgggaagtgctggattgggagaagaaattcgcggaagagcagaagaaacatatagttctgcaggaagcggtgaaggaaaagcaggagcgaaaagatgagcttgcttttcagctgttattgaaagaatggcatgaaggtgaacaaagcattggcgcgctttcccagcagattgctaagctcgagcagaacagcggccttgagcaagtgaatcaaagaatggatgaaatcaaaaaagaagcggcacagcaatgggagaaatccgctgcttccattagggaagccgttcatcaatattccggatatcaaaagtttttaaagaaaaaagcaaaagacctttctaagcaggataaacaaaagacccaggagattgcccagcttcgtacagaaattgattttctttatacgcaaattaatgaatttgaatcaaaagaagaacagcttatcaaggaattcggtgaccgcattgcctatgatttaacgggttttattgaaaatctgaataaacagatagataccaaagaagcagcactcaaagatatactggcaaaagagaatagatcaaatgaaaagcaaaatcagcttgcttcttcccatggtacactcgcacaatccattcacttttctgaagaaaagtgtgaagagctaaaaaggaaaagtgaagagcagcagaaaaaagaaacaaagctgtacgatcagctccaaggtgtgctgcaaggtgtcaatgctccattcacgaatgcccttttatcaaaatatgcgtttgaagtggaagagctcctcgttcaaaatcgcgagcaaggggaagaattaaagaaagcactctgggaaacgcagctggattatgccttgaatgatgagcatttctggattgccaataatgatgtgaaggaactgaaggaatggattgatgaaaagacggggattgacgtattttacggatcccaatttctccaatccttaaagccggatgaaatggcgagccagatgctttctcatcctcttctgccgtacggattagtagtcagcaggccgcaatgggaaaaaatcaataagcaggtcctaagcggaaggatttataaaagtcctgtcccgatttttatgcgggaagatatggctgatgaaaatcagcagaatgcctttgtgatgatcaccgggacggagaaggaactgctggcggataaaaataagttcacaaactggaagattcagattgcgaaacaaatagacgatcagaaagatacacttgcagagttggaaaaaacagaaacagcgctgcgccgtattataaaagaaatcgaccgattcctttcccatgatcttgccattgatatcgaaaaagtacttcttcaggaaaaggaagccctgctttcgagggaaacggaattgcaggctatcatcgtgcaggaggaaaaagaaaaagagctgcagctgggacttagagaacagctggaaaagacgaaggaaaagatcgaaaagctatctaaagatgcggaatacttaacggaatatgaccgtgaaaagtcaatgcatcaggaaaataaacgggtaaagcaggaaaaagagaaacaaaaggaagttttcgaaaagctgcagaatgaactgggaaacgagcttcagaccatcgctgaccttcaggaaaagtggagccagacctacctggaatggaagctgtcagccgagcaaaatattaagaagatcggcttctttatagacggtgctgcttttccagcagctgagaaagcagaagcttctgaggaggttccgcgattatcaccctatattttagaagaaatcaatggcagcattgaggagcttaaacagctgcaaaaatcaaaagaagaacaagccagtgaactgctcgcgattcaggcgacaagagaatccgaacaaaagcagcaaaggaagctggagaaaaaacttcatgctcttaatgaagagtggaaggacgcttctgtaccggatgaaccaataagtattttggaaaatatggtacaggcagctgcaaaggaaacaaaggcagcagaaaaggaagagcgtgagcaggaaaagaccgtaaccattgctgaaacttccttaaagcatggaatggatcagcgtaaaaaatcctcaaaaaaagtggccaagcatgatcaaaagcctgaagaatgggaagagcttgatctggaagtgaagacgatcgaaattactgaccagaccaaacagacaaatgcagaaataaagaaaacggaagaacgcaaaaaagaggcagaacaaagcataactgagtttgaaaaagatcaattgcatttatccgtcattcttaaagaggaagcggcagctttctcggatgatgacatcgaaaaaataaagagtcaaggaaagcaaagcatcctttcctggagtgaaaaacatcaggctattcaggatgaagggcaagagaagcatgcgaagattgaacaatcactaagaaatttaaagcttgctattgaaggcaaggattgggaaatccgctttaagaatgaagtcttaactacgcttgatcatatggatacaaggcattatgcgcatattcaaagtgtcgtccaaaacatgaagcgcttttctcagagcggcctggagcagctggagcgcgacaaagaacgggcggaaaaggcgcaaaacttctgggcaagtcgggcaagcatgaaggtaatgagcatttcagaggcaattcgctcgatgattgcgaaaatgaagcttaagaatgaaaggggttctttcccgctcgtccagcttaaagaagatatcctgcctaaaaaagcggaagatgtcgaacctttactgaaacagcattttgtttcagccattaataaaattacgaagcgatttgagatgattgatgataataatccgatgctggatcaggaaatcaaacagcttataagtgatgagcaaattttatttgtttccctcagaaatcgctatccggagctcctggtttataacatgcgtacagacaatgcattcatgtacggtaaaccgcagcgtgagcattattcgacctggcagacgatcaaccagggttcgaagacgaaatctgatggcagtggcggtcaaaagctatctgcccgcatggttatgatgatgatgcttctttcggtcaagagtgaaaccgatcaaagctgggttccgcttgtctgtgataatcccttcggccaagctgcttctgcccatgtgcttgatcctattttcgctgtagccgataagctgaagttccaattcatcgtcgtcactccgcctgaattggtgaaaacagagatcagccagaggttccatgcgtattataaattggacttcatccgggaaaaggggaaagaaattgtgtcggatacgattgttccggcttttaggatatatcagggagaggaagcagttcattag

SEQ ID NO: 52648 - DNA, 1086 bp, Bacillus firmus
atgtttaagaaggtgaacaaaatcaacatcatcgaaacaagggtgagaagctttattgaagatattcagcaccctaagcaaaagaagaagttaaacataaatgacttggaatttcagctgcgcaaattgctggatgattattatgaaatggacggttattcgctattttatgaagccattcaatcattgcaggatgaagggcagctgacacctatacataatcatcaatacaacgggaaaacaccgtctctgcctttatatttctgggtgaacgtgaaacctcacaccggcgaatgggatcgtctcgaggtgatgaagttaagtgatcggttcgatttttcattttatgaacggcaccccgaatggcagacgaaagaggaatggagccgcgtcaagaatttatatgcttttctccaatccagcggcgaacgggaaaccgtttcacttgaggaaagaagcctggagctgttcggccatgaagaattcctgcaggatgtgatcagttttcctgatggaaaaggttttttagcacgaattggcgtatccgaagagcagctgaaagtggttagatacggggagccttttgtgttttggatgaaacagggaaaagaaattaaagatattcagcgagtacttataatcgagaatctatcattctttcatacttgcattcaattattggaaaacgatctgctcgattacgagccggaactgatcatttatggggaaggcacgaaaattgaacggagcttttcgttcttctttaaaatttttccggctaaatcgtatctattctattatgcaggagatcttgatgcggctggctacgggatcatgaccaggctgattgagaaatatccggaatgctgcattcagcctgcattgaagatttaccgtaaaatgcttgaatgtctggatcaaagtaatgaacagaaatccggacagcctcaaaatcttaaataccgtgatgcgttcttccggtggtttacggaagaagagcaggaactcttattgcaattatggcaggaaactaaacgaattcctcaggaagtcttaacaattgaaacttggaggagatggatgtga

SEQ ID NO: 52649 - DNA, 1557 bp, Streptomyces viridochromogenes
gtgatctttgaagagccgtccgcggtctacgaaagcatcacgtcgcggatgcgagccttggcggtggtctatccgctgctggccttggacaccagcaaggtcaagaaggagcgcgggtgggatcggtaccgcatggccgagttggccttggccgcgattgatgtcgtgacgctgcgcacggacatgcggacggccgtgcggcaggaagcggtcgtggagcacgtcgccgagttcgcggcgttacaactgccggggcggacgggcgaagagtaccgggcggtcgcgcgctgggtgaccgagcggctgatcaataccgaggaacgcgatcgcgcgtttcgtcacgagatcgggtacgtgacggacgacggcttcgagacacgcgaggcgtccttccagatcctcaaggaagtccccgatcaggtggggcaggccgctctcatcgccaccgacgcggcgatcacggtgctggtgcacgcgatcgatgtcgacattgcctcggaacagatcgccgccgaggccaagttggaggcgctcctcaaacgggcccgcatcagcgaggcgtggcagattgcgcacggcgcacgcatccagagcatccggtacgccaaggacatccatggtcgcgtcgaggcgatgaagcgcaatgtgcggactgtggactgggacgcggaggtcaaggacacggtcgaggaggcgttggagcatgttcgcagcaggtccgcggccgagacgcagctcaaggagcgtgtcaaccagcttctccaagccaccgacgacgagcgcaagcgcaggcagctggaggacctcggggcgctcatccatgagtgctggcagcgtcattccgtgctgatcgacatgctgatgaaggtcggcccggaatttcggcgacagcaagaccgtcaggtgttcgtggcaccagcgattcacacccgggtacatctgcatgagcagcttcttcaaccggccctggaactttcactcgacgcctgtcttggccccttggaggcgttcacccgcgcagtcttgggcccggtgcggcctcgcgtgatgtatctgccggacttcttcgaggcactggccaaggtcaccgagcaggtaggcggcgagttggttccggttcagagcgagcacgactggtcggagataggggactcatccgcgttcagcgacgaacagcaccgggccgtggacacgttgttggaagccgtcacggaccagggcgtccggctctccaccctgctagaggcgacacgtcatccaggtacggggaccggcccggaatccggtaccgatgagctgctcgccgaccgcgtgcaacagctgttccggctgattcctgtgcgccaactcgccgatggcgaaaccaccgtggtggccgtggacgacggcgccgccttggctgacgaacgctttggtggcagcgactttctcctgatccgcaccagcgggaccgccatggccacagcgccgcagacgagcccgcctccgcccgctgttcccgcccctcgccgcccggaaggccctggcgcccgcccactcgatcaggagagcgcatga

SEQ ID NO: 52650 - DNA, 4458 bp, Streptomyces viridochromogenes
atgtatgagctcaaccgcattctgctgcgaaacttcgggccccgagatgcccgctacgaggacgttcccctggacttctcaggcgccggcgccgaagtggaaacggcctcgctgatccccgacgccggccacgtcaaccagcgccccgcacctgccagcctggtcatgctgcaaaacggcggcggcaagggcgtgctgctgaccggtatcacctgcaccaccatcccgtaccgccacagcgacctggagacgctacgaaacttcgtcgtctccatggcccagccgtcccacgttgtcctcgaatgggccgacgcccgcaccggacgcctgctggtcaccgcacaagtccttgccctcgatcacgacggcaagctgcaccgctgcttctacagcttccacccgtccgcagccctggacgccgaccggctccccttccaccgcgacgggcactgggtgccgttcgaggactactgcaccgaactgcgcgactgggaaaagcgagttgaagccctggagctgcgcatcgtcgagggccaggagaagtgggagaagcaccagcgcggtctcgggttgcagcccgatctcttcgacgtacagcgcaggatgaacgccaaggagagcgacgccgccgcggccttcaccacgaacagcgccgacgccttcgtcgagtggctgctacgcaaagccaccgacgatgaccagtacaccgaactcggtacggccttccagggctatgccgccgcgcacgacgcgcgcgccctatgggaaagggaacgacagttcgcggtcgagatgcggcaggcgtgcgaggacgtcgccgaccttcatcacgccctggaagagcatgccggtgcggctgacgccgctgaaaaggacctggtccgcctcgccgccgccctccggaatcgccacacctcgctgaccgccgcggcagccgaagacaactccaccgtcaagagcacgcaccgcacattcgaaggcgccaagcgggcccgcgaactcgcccagtctcgcctgcaccacgtgcagactcagtcgcatgccctcgaactggacgaaatcacacggcaacaggaacaaacccaaaaggacaagcaggaagccgagaaccagagcgcggcatggcagaccgtgccgatcgcactgcgtcacgctcaggcgctggacaaccacaaccgggcccagcaggccctcgccgaggcagagcgcaacgccgcaccgtacgtacaagccctcgacgccgcggcagcagcgctacgcgcgggatacacccgcgccgagaaagacgtccgggatgcgatccgcacccacgagaacgccaccgccaaggcgcagcgccggatcgaacagtggcgtacccgcagcgacgagctgctcaccgaggtgggggccgcgaaggaggaaacccgcaccctgcagggggtgacccgcgccttcgcgacacgcctgagcgctgcccgggacaaggaactcgtcgccccgcaggagagtgccgccgacgccgcagctcgcatgcaggggcacgcgcgccacagcgagcaactgctccgggaggccaaggagagccgcgacgctatccgcgccctgcgcgaccaggcatacaacgtcctggcggcgaaggagaaactggcctggtccgcgcggaccgccgcgacggccgccgatgaagaggtcagccgtctgcgggctcgagccgaggccgttcgcggcaacccgctgtgtgccgaactgctggagactgacagtggcgagctgcgcaccggggacgctttgcgctggctccacgaccatgccgtcggcctgcaccaattcgctgagcgacgcgcaggcggcctcgaatccaccctgacacgcaagcgcatggacctgcagcacgaccaggacctgctcgccctcctcgacacgagcgagggccttctgcctgcggccgtagaagtccgggacctgtgtgggcagttgtcggaccacgggatccacgccgtgcccggctggcagtggatgcgcgacaacgtcccgaccacggagcgccagcaggtcatcagcgcccatcctgacctggtcggcgggatcatcgtgggcgggcctgacggcttggaagccgccaggagccgcgtggagcacctgcgacccttgccgtccgccgccgtcacggtgggaaccggagaacggatgctgagctctcacgcggcgtccgaggacggccggttcgtggtcgagcccacgcccgctctccacgacgaggaggccgccgcggccgagcgcgccgcggtcgacgcccgcatcaccgccgtcaccggcgagttggacgcgctcggccaacgcctcaccgcagtacgggatctggtccgccagatcgcgaactggcgtgatgcctgcggtgacctgcccgtgcccaaccggcttgagcagctgggcgaactgcaggatgcagcggaggcggctgaggccgcagtggaaggtgcccgtactgcagccagcgagcatgcggccgcgctggaaggcgccgagggcgaatgtgatcgcctcgccgaggaggcgcaggacgcgcagcgcgccgctgacggcctggtccatctggcgcaggaggagtctgctgccgcccaggcgcagacccggatcgcggtgcttgccaccgaaagcgcggcgcgcgccgatgaactcgaatccctgggcagccagatcagccaggccggggacgagatcgtgcgtcacgcccgcgcgatcgaggcggccgagcaggaagcacacggctacgcccgggcacgggacgcgatcaccgccacctctcaagcacaacaggcccaggaggcgcacgatgccgctctggagccgcttcccgttctccagcatcgctaccgccaggcgcaggacgagctgaagggcgtcgagatcggcgaggaccagcagcaacgggccgacgcggcgcagcaggccctgctccatagtcaggaggaatggaatagggtccccggccacgtacagggcctggccatgcagtacagccacgatgcgcgggccggcaacgaggtacaggtcgatgccattctgcgcgcccttgaaacccgtgtgcgcacctacgacgaaacccttcaagggctacgcgaccaggcgacccgcctcaaagaacgtgccacacgcctgtccccggctgccccgctgagtgaggaggacgccaccgcgtggacaccggccaccctcgccgaggcccgcagccttctggccctggccacgggcgagcacaacacggctcaggaagatgaacgcgttgccgccgaagtgttcaacgcggcccgccgcgctcagaccgattccagtcgggagttggcggcattcgatcgtgtcctgccgctgctggagtccgctgtccgcggcttggtgattccttcagaccaggccccttacgacggtagtgcggaagctgccgagcgcaccgcacgccgagtgacagccgagtacatcagctctcgtgagaaagccctccaaacggagcggaagcttgaaggcggcgtcggccggctcaaagaagtacctgctgatgtccgcttcgaacgactcgacatcccgctgcggacccagatctccgccctggacagccgccacatccctgccatggccgccacctggaccgcagccctcagttctcgcatcgcggccctgaactccgacctggaaggcatggccaaggcccgtgaggccctcgcctcgcaactcggcggccacgtcaccgacctcctgcagcgcctggaccaggccagccgcttttccgccttccctgacggggacactccctggtccgggcagaagttcctcaccattcgctacaagaagccggaccttgccgctctcgccgcccagatgcacgaaaccgtcgatgacctggccggcaatctgcgtacccgcaagctcaagggcaccgatgtcgtcatgcgctgcctcaaagccgccgtcccccgcggattcagcgccgaggtcatgaagcccaacgccgcccaacgcgtggaccgcgtgccggtggaggaaatgagccgggtcttctccgggggccaagaactaaccggggccatcctcctgtactgcgctctcgctgctctgcgcacctctccgggaccgcgcagccgcacacgcaacggcggactgctcctgctcgacaaccccatcggccgagccaatgccggatacctcgtcgacatccagatggagatggcctccgccctcggaatccagctgatctacaccaccggactgagcgacgaggacgtcacctcacgcttcccgatgcgcatccagctccgcaacgacgccgaggcccgaagcggcctctccctcatccggcttgacgaccaagtacgcaacgccctcatccccacgccccgcatcgcccccgaccaaaacgcacccgaacccgccggctacctcacctcagcccggctctacaagaaacaggacgacgcccgatga

SEQ ID NO: 52651 - DNA, 948 bp, Streptomyces viridochromogenes
atggaggcattccgagaggctctgccgggccctgccagcggcgagcacgcacgcagcacgctcgccaccttgctgtacgaaatcgccgaacacggcatcatcaacctccccaccacccgtacgaaatgggatgccggccgcccagcccttcccgagcaggtccggctccacacggccacgtccgcgaaatccgccactccacacaggcatgtctcgtggagaccggaactcgactgggcctacagtgcccggctgaccgcatcacagaccgaggacctcctcgcctgcaaccgctggttccgagacacccgcaaccaccccgaccgacgagctccactccccctacgcgagcgctcgtacgacatcttccgccacgaaaagcgcctcgacaccctgatcaccggagcgctcttcgccccgggcaggctgaccctcgaacaactcgccacctaccgcgaaccaccgccgctggcctaccgccagctcggcaacggcgacaccatgctcgtggtggaaaacagcgacacctacgccaccctgcgcgacctgctcaagcccgaccccggccgcatcggatacatcgccttcggctccggaagagccttcgaggcatccgtcgaaaacatcgccgaactcgacggcatccaccgcatcgtctactacggcgacctcgacgccgaaggcatcgccataccggccagagcctcaatcaacggggcccagcacgggctgccacctatcgaaccggcaatggggctgtaccgcctgctgctcgcccacgaacccaccaccggcgacatcatcgccagcgaccgggcgcacagcctgacggcatggctccccggagaacttcggcaggcagtccacgccctgctggccaaagggcaacgcctcgcgcaggaggcaaccaaccggaacgaactcggcaccgaatccgcctggcgatga

SEQ ID NO: 52652 - DNA, 1521 bp, Bacillus sp. LF1
atggaaaaggcgcggcaattatccttcgaagatttagggtctcgctttaagaccttaattcctgtttggattcttggcacaggggcaaattttggtcgtttaaacccttatgctcgccacttatcattcaccctgattgcagtgattttctatcaggaattattggatgatgtcagacgaacaagggatgacctggtacagacggttttcaagatggcagaatccatgaaaaaagattgtgattggtttgaagccgaaaagatagtagatgctcttatggttaatgagggcagttcgaagcatacctttgccttccaagaacaattctttaatgaacataaaatggaatgggagacctttcgttttcagtaccttgagattgatagggatgcgacaaactttgaagaagggctgccggtttacaaactatctgaagaagcacaggctctttttttaaatactaatgaaattcaaaaacatcttcctgtttcgatacagcagattctggttgaattgctgattgaaaaaggtgagttgaagtctgctttaagaatgttggattcgttaaaccatcgggttatgaccctgttaaaagaggaaaaaatccatatggatgagcttatcaggaatccaaagtcaaccatttacgaaaataaaagtcgatgggggaaacaattgaaagatgtggaggcacaatttgatgaagaaagccaaaagtaccggaaactagatggaattctaaggagaattgctgtgtctccagagcatcaaaatacctacatgcaattaactaaacgactctcaaaaactaaaaataatcacgataggctagcaaaattggtgattgaaaacgtccgattggaattgcaaataagaaactctcatttccggaatatctggctaaccaataccacctcattcaggaaaacgatttgggaagacaaagccaaagtagtaggttttgctcatcccgacgaaatgttaacgctggtagaatcattgttttcgccctataagccttccatcttaccattggaatggggaattgaggagcatctggatttatctcgccccacttttggaggaactggaaccaagacaaagccccaattagagcctatatccctcgattgggattccattttaacattatggaagccaatatttgaagagttgttgaaaacagggagagtttccttaaggcatttgcaacaaatagatgagttaacgatggcaaggtgggttgagaatcgggaggcttttgatttttggttagccttcgcttcgatggacgaacctttcatagttaatgaggaaaaccttcaacaaatagacagtgacgataaagccttgttgctctccaagttgatggaggaatatcctgaattatccatattaaggaacaaacagatttttagcattcccagcaaagactcaatggttttacgaaataaaatcgatgtatctacctatttattaatcatggaggaggcggaagaaaatgaacatcgcgcagattga

SEQ ID NO: 52653 - DNA, 762 bp, Bacillus sp. LF1
atgaacatcgcgcagattgagagggcagcttttgaattagtggcttgtttatggcagagaaagtatctgccgaatgaccatccattagtccatccatatattgaatctcaggaagttcgaaattgcgtaagaaggctggcggagagctttgggctaagggttgtgagacaagataaacacatacacattcttgtgcaaccccacaactccttccacactaacccgatatccgagttgaaaaggaatgttaaatcctatgagaatcgagttgatttatacatcatgggagttgtgtggatggtcatttgttccgaagcggataacgacattgattccaaaatcaagtgggagaatgaagggctatcctatggtgagattgaggagttagtgaccaaagccttaaatcactggcacgaacttgatatagaatcggaagggacattttctaaggactggtcacttgcggtaaaagaaatgcataaaaagtggaagttgcttcggtatcacaaattagaaaatggacgtgtaagttatatcaaggaatctaagtttggattgattgatggagcagtaagagagttggaaaaggataaaatggtgtttatagaacgaactgcacaaaccagccgaatgaccccaacgccagtcttctttgagaggttgcgcgcacgatttggaaatatggatagataccaagaccgttatgatgtgttccaagttttattagaggatgtaaaagaaactggagaaatgggggcataa

SEQ ID NO: 52654 - DNA, 4563 bp, Bacillus sp. LF1
atggaagcgagactagcaaagatgagagttgttggattgaagtacgactcaggaaacatacatacggatgacttaaagttggactttaccattcctgaatctatgcctggtcatgcagcctatattcttagaaatggaggcggtaagggggtttttttccaaacattgtttcaaacattagaccctttgacttcgtggaagaaagaccttaaccatgtacatcatttcttttttaatgatgaagatagacccatcgaatacacctttcatattgtccaagaatggcaagtgtcattatccaaacgtgtgatacttggtatagcggtgactccgcgcctcgtctcgaatgataaaaagtctcaaacaaattctcccatagagcttgattattttctttatactatggagcctttagtgattgagatggctgatatttttgaacttcagttatggaatgaaaaagaaaaagaggcggttcctttcaatacttggaaagaagcaattaaatccgataagtcattccatttttattcgaagcaagacagagattcatatatagaaaaaattgaggaatatgggtatgataccaacacggttaacattttaaaaagaatcaatgatggcgaaggcgggttcggagagttcttcaaaggctctaccgataatactggtttgttctacaaccttctcattccaacaataaatgataagattgagggaatcgattcacggaataaaaaagaggtatccgttgtaacctcttggtttttagaagccttgaagatttcaaaggaattgcccgacctgttagcaatggtagacagcattgaacaaattaatgattttattctgccacttcaagaccgctttagggaaggagaagaaattaaacagtccgtagagatttgggaaaataaaggaagtgaactccttcaactcctaatgtcattaatggattacaaagaaaaccaagtaacgaaacttgaaaaggaacaaactgcccggaaagagcaacgtgacatagcaagatggaaatatgcaaatatcgattatattgttctgcaccaagagagggatgaggttgatgggcaatactatgagttggaacatgaacaattaaaagcagaccttgccctgaaaggatatcaaacgcaacttataaaggaaaaagtgaatcttgaactaaaaagaagaatggacaaactggatgaaatagaggctaataatcagagcatttcgactctaatggattcggaagatttaaaagaagcaacagccggtcttaaagaaattagggagtattttaacaagaaatgggaaagtatttctgaatcctggcaaaaggaaatgaaccggaatgcacgctctatcctcgctcatgagaccaaaattcagcaacttaaaatggacatggactccgagagtaaacaaaaaagagatttggaatttaaggcatatgacctttcgaatgcaatagaccaattcgagaaaaaattagaggaagcttgtatacagtatggggcagaactgccttaccagatttccgacatcatagatgagaccagaatggaactaacccaagttaaaacagcttttgaaagcgcatcgaagtctcagtctattttggaaaatgaaattttagatacaaggatagatttagccaggcaggaagaccgtgtgaaagcaattggaagtgaaattaagcaagtggagaatgaaagcatagttgctacccaaaaagaaaatgaactgatagccaatgtctccaaaattttaaaaacacattatccttttgaactggaaagggaaagttactacgaaatcaggaaagaccttgaaaattacttagaaaaaactaaggatgcccacaaggaacaacttagaaaaatgtggaccttccaggaagatattcatctaatagaggaaggggataagattggttcctatatcccaaacagtgacttactaaaagtaaaacaattattagatgctcaccgcattgaatccatgtatggaagcgagtatctccatcatctttcccgtgaagaaaagcaatatgaactggagcggaacccagctctgcgatatagcgttgttatattggaagaatcatttgagtcattaaatctttcgtttattgaacaagaattaattcgtagtcatgttgtattggtcgataaaacgaagtcaagtaaaaaggataagcagagcacagcgaatccgttcttagacaaacaagatgagatgaattatttgttcaaagacttaagctatagtttccttgaagatgaatatgagtttgagcaatggaaagttatggtggagaagaacgcagatgatgcagaccacgaggttggggcgtttgagagaaaaatcgaacaaatcgagaaggtttcgaaggaattggaagtccttttaagcgggattctaaaaacggaattggctcttaaacttttgaacctccaaacggaagaaaaaaagcaaacgaatattttatcagacattaaagtgcagttggaagagaaagaaggggcacttaataagaagttggaagaggttgagtcactgagcaataagttagaagtccttgaaaagaatgaaaaggaactcttgctgttagaaaatgaactggaacaagacaaagaaaacagaaaaacaaaatcgaatttccttaagctcatcgaggaaacagagaacggcattacacaattagaggaagaaaaagggaaaataactattcaaaaaacaaacaacagtgcaagttttagcaactggatgggatatgttcgaagcaactacagtacattaaggcggatgttaggggacatacaaatgccagtagcagccgtaatcgatacgtttgatgaaaaacaggatttacgctcacactcctacggtcattcattgtccaaagaagcacgagagaatatcatcaaataccatgagcttgacaagaacataagcaataagaacatgcgattagctgaactgaatcaaacggttaaaacattgcaagaacaagtcataaaacacgaaaatatccttcaagatttgtatgggaactcatggagtgaattatctgtacctgagagtgatgaaatgcatcttgcaacgcttgtaacccaggcagaaaaacaaagggaccaaggaaaagcaaaagtggatggaatcatgagcaaaatgaaatacaatcgtgaggaaatcgaaaagcttgaaaagcgcttggaagataaaaggaaggatatggagaaggactatcctcgctttggtgctgaatatatagagattccggattggaaagcagcgaaagaacaatatcgaaaagagcggaatctcttggaaaggcagtatagtgaaacaagagaagaaatcaccaagcttcatacgtccatcgaagggatggaacaaacaactcgtcttctaaaagacttgaaactgccagttcaccctgctcaagtgctatcagagcaagaaagagtgattattcacgaaaatcctatagaatattttactaagtggaaccagaaatataattcgtcaaccacgaattatcgtagctatcaagaaaatctggggaaacgtattacacagataaaggaaaaaattgagtcctttactaatataccagaaacgtatcaaaaggaattggtccatttcttatccactattcgggatatgagctttgatgatgccgtggcttctttgaacaattatcttgattgggcaaaaaataaccttcaagatgaacttgaacaaaaggaaaaagcggacaaagctgttgacttgtgtgcagaacgtcaatccagaagggttcttgatgtcatcaatgttctacaggacctggtgcggaaattgacaattataaactggaaaaaggaacgttttccattaataaagtacaataagaactttcctttcccgacaaaattagaggatatcaagcctttggtcaaagaactttgtatgaacgaaattgatttctatgttagtaaatataaggacaaaattgataattttacggtgcatgatatcgttaagaccatgaatatatcaaagttagtattaaaggctatgggagattttcctcgcttaatgattcatattcctgatattgagggtggattacttcgaggggaagccaagcatgcggtatacaaggaatgggaaacaattaatcaaggaagtgtcacctcctcgacaaagagtggaggacaaacattgctcgctcatttcattgttatagccatgataatgagacagcgggtagaggaaaacagtccattgttccttgtcacagataatccgtttggaacaatgtcagcgccagaattggttgaaggagtattcagtttgcttgacctattaaacattcagtggttggttgttgcaccaccaattacaaatgtatctattacatccaagtttcctaccattaacaatatgaacattgaggtagttgagggacgtaaagtccttgaaaagaaacttgttaaaaactatcgtaaatatctgcaaaactttagtgtgctggataatccagaagaaaaagaccatatatcataa

SEQ ID NO: 52655 - DNA, 1125 bp, Bacillus sp. LF1
atggggcatttagaagaaatcatcattcgttgtatcacctccttacgtgaaaaacagagaagttcaaggaaacttcttcgaactgaaaaatttgaaaatgaagtaattggagctgcgggttctcctcgaaaatataacgagttgggagggtataaggaatttcataaggtcatcacccggcttaagaaggatgctattcttcaagatgtaacaaatcctggattcaatggtaaacgacctcgcctaaacgatacctattggattacacctaaatacgttgaaaacacatggaataaagcagacatagcaagagtaatgaactatatcgatttaggattttacttaagacagaaaaaatatcagaccgaggatgagtggaaactgatactgacactctatgaatttgtaaaaaacaaagacacacatataaaaataaccagagaggagcggtcactgatgttatttaaatatgaacaacttcctgatgatattgaagcggaaaagtatttagcttcttcacatggaacgagcttaatgaatcgcctccaattaacgccagaagaccttttgtataaggttgtccatgagccatttcaatattggaagaatgaagcagtgccagaaaactatctacatgaggttctggtcgtagaagggttatctacttatcaaactcttaaagaagtattaatccgacagcttccctggaattttggacctatcccacattacctggtttggggagaaggatacagaatatgtagtacattgggctacttaaaggatataaccgatgaccctacccagctgacgatacgttactcaggggatattgattatgagggtttcaatatctactttgatgctaaaaataaacacagagacttcaatatttcgctggcgcaccacttttactcgtttttaatttccttttcaaatgaagttgcgactagtgtattaaaaaaacagaaggtaattgaaaaaaacctgtatttgctacaagaggaatttaaggactacaaagaaacttttgaagttattaagacgttatggaatcaacggaagcgaatcgctcaagagtgtattaattttgagactcttcgcaataagggagggtttcaataa

SEQ ID NO: 52656 - DNA, 1416 bp, Bacillus sp. FJAT-27916
atggctgaatcattgatatcggtctttcaggcggatgagtcacagccggaagtaatgcaatcgatgcaggatattgcctccctatcaggtgtccttagtgatttaagtgcacaaagctcctttcaaacaccaagggagatcattcgattcttacgcattatccaattaattaatgaagaagcgctcggactggatgagccgattgagaatgccgagaccgtgtattatcgttataaaaaccgctataaggatgccgaacctccctcgaagaaaaaggtgaatcaggtcattggggtgttggtgaaatacaattggatttcgaagcagtcacggcgcatccgcatgagggatacagggaagcggatgatgaatgcactcattcgcttggctaatgattctcttgcctattatatgcatgatgatatcggacgtgcattgtttcaggcaaggcgtgacgccgaattgagtgaggcctatgatgaccgcggaatatccggcggcaataagattgcgagtatgatccgcaatgtcgagaacgcgattcaattgttaaaggaacgcgaacttgagatgcttgcggaccggagtgctcttccgcagcttgaattaattcatgagttgatgaaggagttggatgggaagctgcaggagaggattgcgagttttgccacagtggaggacagccttgtcctcaccgatttgatgcagcagggtacatccgccctcgccgaaggcacgaatcaaagcctagggatgattaataaatacttgaagttcacccatatgcaaaaaacgcccctatcctccacgatccagccggaaagggttcgcgaatttattcagcagatgtataatcccccagtggaatcagatatcccgaatgtacatcagctgttcagctttatggaacaaggccagtatgaacaggaggcgatggatgggctgtggattccattcaaaatagccgcaccgctatcagccgaagccatagatgaggcgattgattatattgaaacatatgagccaatctccgccccgatggaagagacggatgaagagattgggtatttatcagaggaaatatcagaggaagaaatagatggattgattggggagacagcttgggcgttaacgaaatcaatgatcaaaacagaagcggttgaacacttttttgaaagccattcagaagcaccgatggaccaggttatcgttgagacgacatctgctgaatggggagatgccatcaatgcgatgaatgccatcgcagccttagttgggagcaagcaagtgacggtcagccaatctgagaaaacagccagcaaggcatatgaacgagaatgggagtggatgaatcgtgaagacggatcaaggattatccgaaaacgacaaaaacaagatgaatcagatcatgaatga

SEQ ID NO: 52657 - DNA, 693 bp, Bacillus sp. FJAT-27916
atgaatcagatcatgaatgaggggggacaaacggaagaatttaacgccaacccgcttaatgccatgcaggctgttaaaggtgttttgacagaagaggaggagatggccttcatgaatatcctgttctcctccacagccacgatacggatgggcaattttggcctctcccgtaaagaggtggagaggctgctaggattgaaagaacaagatgagcagtttttctccttccttactagggtcaatcaagccatcagccgctatatgaaggtaatctatgatgagcggcgtgatcaggtaatcgtgatgatgcgggtgccggcaagggcagcccgtaacacattgtcaaaggagagcttggcattattattgtatattttttatcaacaggaagtgctgcagcatgagttcacgctattcgaccagctgcttgaatcgtttgggcatgaaacgatgaaggctaatcagcgcattttgatgaacttggataccttaaagaaaattggggcaattgaggaatatgataacccctcacaggagaaggcttatcagttgacggcgattggcgctcaaatgttctctgattccttcttgcggagaactgcggaattcagccagtccaatcaattgaataaagaagaagtgctcaaattcttcaagcgatacaatctgtatccgaaaggagaagacgaatga

SEQ ID NO: 52658 - DNA, 3216 bp, Bacillus sp. FJAT-27916
atgattccgtggagattgaaattttcgggggtgcgggattatccgccgactttattggatttgtctggtgaggatgcgcatgtgatgattactggtccgaatgggtcaggaaaatcaacgattaccttttgcatgggcgctgtgctgtattccgccaaggtcgatatcgagggcttgaaatcgagaaatctggaagcaaaccaaacatggaaggccgcgatttccttcttgttcaaaaatgaaggcgccaataagattgatgccccggactatgtggaatttacgctgaaaattgtgcaggagccaggacagccaatcaagaaagaatacagtatctcaactggtgagaatatcgatgaatgggaagaggagaaaagatatacatcaggcgatcggttttataatttcacctcttataaaaatgacctgaaatataaatataaggtcgacccggatcattattatttgatttggtatcagcaggaagtcaatcaattcgccgtcatgcacccagaggagcggttccggatattcagtgagatgcacggaattgacaaagtgcaacgtgattgggaagaaagcatggaaaaggtgaaggaagcagaggaaacttcacgtgcctcagagacgaatgtgaagctgaagaaggcggagctcgggatggcgaaaaacgcatttgaccgctataccgacaatcagagacgtttgtacgaaggggggaagctgtatgcgcagtccttgcttggcatggaggcctcctaccagaaacaagtccgcgaattggctggtcaagttgaacaaacacatgaagacatccatgaggagaacgaagagcttgcacgtattcgtctcgttcaagaccgtctggcttgggaattgactgatagaaaagaaatgcttcaatcaaaggaggctgagcatgaacaggaagagcggattttgcaagatattaaggaccaaatcaagagcattcaagttaaaatccataacctagaagatgaacttgaggacatcacaaagagaaaaagtcagatgactcgtacagaagcagaagtgaaagccgagcttgaaagggtcaagatccgccagcaggagattgaagaagccttgaagcaaaaggattctgagctgaacaaggtgatgaactgctggcaagagggagttcaagtaattgcgggtttagagcaagaaattaagcagattgattccttggagactattcataaggcccgtttggctgaatatataagcagccaccatgtccaaatgacgattgatcagttgaacaggactattttggacaatagggatcggcatgatgttctgcggaaggaaaagcttgagctgcaagcagaattgtcttatttgaaggaaggtcaaaacgtatcatataggcagagggaatcacttgcttatttcaaggatagaggtgtacaggcatttccgctgtcagcccttcttgaaatggaagaacgggtgaatcctcgggaggagcagttgtttcaggcaatcaagtacacagtcttcttcgatggtcgaaaagcggttccgccgaatgatttgtaccatgttcctttatccttggttatccctgatcaagtccggatgtcgttgccgaatgttccattaaaggtgaaaggggatctccgcgaatcgatgcttcctcatgcgatgaaggccctctggtgggtcgcccaattgtttgaggatgggctgccagagatcaatggcggcatgctaacagacagtttagggattcgcgggtcacaggagaaggaacggcttatccttagtcaaaaagccatccgtttgcgcaagcaggaagtagagaaccaagtggatgaacggacagatctgatgagagagcttgatgcgagcattgccggagatactaagttataccagaagctgaatggaattatccatcaagtgaaagaatctgaagccttcatgctagctgagcatgagcatgctcgcaaacgtgaacgattgaaggcacttgtgcatgaacgagatgagttggaagggctgcgtcgtcagcatgaacagaagaagcaggttttgacgcgcaagcagattgaggacaagctctatcaggaccaattggaagaagaagcgagcttttacctggaattagggaagatgaaagagaagtatgaagaacttcatcaattaaacttaaatttgacgaacgaaaagcgccgagagagggaacaaaaactgaagcttgagcttttagaagaagagcttgataagcttgaacaaatcatctctaaggctgaaaaagaagcacgaaatgtagccgggcaaatagatgactccgctcggaaactggaatatttggcagtacaggcagataatcagaaatcggatcaggatgcagccgagtttgggctgatggatgtaaaacgagagctggaggatttgaaacaggctgctcttgccatatatgaggaagcggctcaaaatgttgatgaacataatctctctgctctccctgtcttaaaaagtgaacgggagagcggcaagattacatttgacctcgcacgaaatgaagctggcatcgacccagctgctccgcagaactatgaaacggtgaaaaaggaatatgaacggtttgagagtgaatacacccgcacgaagctattgctcgaacaggataaggaacgaatggaaaaactgcgggatcagcttgagacgacaattagcatgcgggtcattgaaatccagcaaaggttcaagaactatatgagccagtttcagtttgaaggggatattagctgggatagctttgaagacaggcggaagcgaactcactttcagctattcatcaaggcacgcaaggaagggcaccgcgggtcgctggaagatgtgagcgtgaaagcgcgcggcggtaaggtcggcaaaggagtctctggcggtgaggaatcactcagctctctcttatttgctctctgtctccttcaaaacctgcaaatcacgccgggctttattatcttagatgaatttgatagcgccctagatgagaatcgcaaggtgaaggtttttgatttgtatgaaaaagaattgcagcgcaagctcattattttaacgccaaagtcacatgaaaatgagtatctgaaccgtttctcaaaagcattcgtcgttcgccatgatccgcggattcctgagagcagggtcgctgggattttgaagaaggaacgagtggagcattag

SEQ ID NO: 52659 - DNA, 1305 bp, Bacillus sp. FJAT-27916
atgatacgtgttgaagaaattgattatataaaagaatgggtgttaaagaaaggcgaagaactggaggttccatatacgagcaatcgttcagatggattgatgtatgtgaatgtgatcaagcatacgcaaagaacataccgcattactggagtattgactatttcggcaagtgaaccttcctttacggaggttgataagaacttgttgcagtttggattcactcctagaaagaaggttagtcttccggacaatgatcagacattgaaatggctgcgtgagggattcatcataaaagagattcgttttaagaaggatggcagaaccccggactctcagcattatagaatgggatatcgactatttgcctattcagagaatgagaagcgcaaaaaaactgaggctgctgagaaagaattattagcttgggttgaaaaggcgaaattagtgactagtttgtcaattcccagtcataagtcaattgatttacgtcgtttaataaaagtagtggaagatttttgccatcaaacagccgcggatataaaagtatcggtcggctttccttcgggatggacattggcgaagaggctgcgctttcttcattttttagtggcattcctgcaattatccataaagcgagagcagtttgattggaaggagatcggagcctcttattatcaagagattggcggatcgaagcgatttgatcgtgataaaaatgattttatcgagcaattggaagggctggcagaatgcccacttgtacggctgggattgacaagccttgggagaatcactcccttctatttctcagggccgctcgtaggcggttactcgagtttccaatatggtccagtacatgcgctaaccgacctatctatttcgagtgatgattataggacaacggcaaaagcattatggcttgtggagaaccgggcgattttgacgaggatggcttccgaggagaatttcctggaggaaacgaattctttaatcatgtgtgtggacgggcatttacgttcctctcataaacaatgtatctcacagttattggctggaagcgacattgaccaggtgttaatttggtgtgattatgacccggatgggcttcagattgcgcatgaaatttatgagacggtcagtgatgcgaaggggaaagaattaaaatggattcagccggaccagcaggtttcgacaagtctgctcgaatatgaggggtatatgcttgcctttttggaggagaatcgaatggagcaagaagagatggcaggaagcagggaggagtgggtaaaatggctgaatcattga

SEQ ID NO: 52660 - DNA, 1506 bp, Bacillus sp. FJAT-27916
atgaatgaatcttgggaaggctttggggagcggatgaaacggttaaatcctctgtttgagctgggacgaggcatggaggtaggcgaattgaagccttatttgcagaccattctcatgcaggtacttttgaccattttttatcgtgagttgaatgatgatgatggcagaagaaagagcgatattctccatatggtcgatgagacgatcaaacagatgaaattaaccgctgatacgcgtcagattgaaaggattgcgagcggtcttctataccagggcagggaggaatactccaagccgtttgaatccctgtactttgatgaaattcggcaagcttgggaaacgcagaccttccgctatgtagcaatggacgaactgtacacgaatcttgaactcggcgggtcaattgtctataagctgacagatgtggcacaggaaatgatcttcatgagccgcgagatggcggaggaattctcgataacgattgagcagctgtatagcatgaagcttatcaagaatggaaacttccgcaaggcagcaagaaaccttgatcacttgatttccagagttaatcgcttaatgacaaaggagtacagcttccaaaaggaaatgatgaataacccgaagatactcctgatcgaacaggaaaaaagacgcgaggataatcgctgggaaattgagcagcaattcgaggaagaaaagaatcatttccggacgattacttcgatgatcgagaaggcgaaacgaacggaggaggatgaagtcgtgcaaggcgagcttatgcttctccatgagaagatagagcacactagacagctgcatgaccgattcgcgaaattagtgattcaaaatatctcccatgagatgaagctgaaggcggagaacccttccctcttctgggagaacagtctcgtctccttccgcgaacagatttacgaggattggattctaaaagaaggaatacgggacttcgggcttgtcgagaaattgatcggacctttattctcaccgaaaaacgaattcatcctgccgcttgaatgggtttggggagagcaggagctggcatccattcaggggactgaggatacagagcaggaggaaatggaagaggactggatggagagaagaatcacggattggtcttctgtcgttagagcatggagctatgtgttcgagcatttattacagcatggggaattctcgcttgcagacttaaaggaactcccgcttgaagtgcaggatgagtggtttgaggaaagcgagacccttgatctttggatgatgtttgataaaaagccgctcactgtccaatcgccgaaccgtcaggaagaggcattaagcgatgaacgggagaagctgttacataaattaatgaacggtcatccgcaattcctcgcactcgaaggcagacaaatctatacgaaatttgattcaagtgctgaaccattaatttggtaccggacaaaaatgaccccatttaaaatatgcatacaggaggaaggaatctaa

SEQ ID NO: 52661 - DNA, 747 bp, Bacillus sp. FJAT-27916
atgaatgcagaaatcctgaaaaaggcgtcctccgtatactttactctattaaaagataaagtcatcgatgagactagcgaatattttcaatcctattatgagcctgatgtccgtcaggctgtcatgatcctggcagatgagtcaggaacctttattattgaatcaccaaaaaggattcatctagttgtgcagccgacaggctcggtgtttgcgacaaactttacacatatgaaggatagacaccgtcatatcgaaaataagaagcatttccacttgatgagtgtcatcatcatgagcttcatggccatgattgataagaatcaggcggcaaaaatcagaacaaagcgggaaggcattactttctatgcacttgaacgccatgtgaatgagctaatgaacaaatggaccgtcatgctgaaggaaaacccgtctgttgccctcgatgaaatgattgatatgcaggaaatcgtgacaacatggacccatatggaagtggatacggatgaattcagcctgcgtaaagggaaccgccgtacgagaatcggcttaattgccggagcgatgaagcttcttgaaacagaaggcttgattatcatccttgaccgagaggatataccgaaagctctgccgaagacagagcttttcgagcgaatcgagttcctttatcacgattatgaccgctatgagcaaatgaaacgtttgatggcgagcaaggaggaagagcatgccgaagatccatcgaattag

SEQ ID NO: 52662 - DNA, 4455 bp, Bacillus sp. FJAT-27916
atgccgaagatccatcgaattagaatcgtcggtctccgatacgacggaatgcaaaagcaatacgaagatacaacctttgatttccataatgaagaaacgtccacaaatggcttgattgccatgatgaacggcggcgggaaaggggtgttcctgcaaacaatctttcaggtgttgaagcctggtacatcatggggtaagcagaataaccgcttttaccagcaattcttcttcaacaaaaaagagcagtttgccccgtataccttccatgtgttgattcaatgggagcttgatgggtcagacaagcgccatcttgttacaggaggaatgttctctgctgaacagcgcatgtcgatgaacgaggaggcacaagatgcagatagtatggaacgggaggcgaaaatcgttccaaacatcaccttctatgcccgtgaatttgaccgcaaggaagacgtggccttagagcatatcccgctctttgaaaacggagaggttgctgatacggaggaattgaaggattatttcaagtggaatggctttgacgtttataaggatgttaagaagcattaccgcattctcgatacatacggcatcaaccgtaaagactgggatatcatgaaggaaatcaaccgtgatgaagggggcgtaggcaaattctttgaaggagcagaggacgaccattccctctttcagaagcgtatcattccgacggtgagccaagtcttaaacaagtccgagcatcagaagaatgacttgatcgaaatcttcaaaagccaggcgagcatcgcccgcgacctgccagtattattaaagcgtgaacaggctcacaaggaattcttggaagatgtgattccatttgaggagcatatcgaggcaggtgttaagcaggaagagattgtggtcgagagcaagaaaaagggacaggccttacttggtgcccttgagcatctcatcaagcaggataaagaggagctgacctctcttgccaaagagatggagaaattgacagaggagttgtccttactacggtttgagaaggacaatcttgagtatgcaagagctcacgaggaagccgttacatgggagagaaagcttgccgaagaaaaagaaaaacttgaacagcttcagaagcttgctgtggagaaacaagctgaaaaagatgaagcggccttctcgctattgctcaaggaatggagtgaatttgagaataccattgccaatctaaatcaacaaatgggcagtcttgagcgtaatagcggtttagagcaagtcaatacaaggatggaggaaatcaagcacgccgttcaaagccaatggacagaggtttccgaaaagctgaaggaagaaaatgatcgttaccacgcctttaagctccatttagagaaatccatccgttcgttaacaaaggatgataaacaaaaaacgattgaaattacccaaatcaaaaccgatattcgcactcttaccgaagagctgcagcgctttgaaataaaggctagtgacatggtcaaggcatacggggaccgtgcggcgtatgatttggatggtttagtcggtaagctgaaaaacgatcagactagattagctgatgagatgaatgaccttaaagggaaagaaaagcaatcccagcaatttcaaggggagttatccaatacggttggaaccttgacggagtcattgaaacatatgaaggaaaggttcgatgaatggaagcaagcctatgaaaagcaagaaaagaaagaaacagcacttatcgaaaggatgcatgctttccttgatgatgtgtctgcaccgctttctcatgcgatgctttccaagtatggccatgctctagaggatatactccagaaaaatgaggaagaaactgaacagattaagaaagaactgtgggaagtacaaacagatcaatatttaaatgatgaatcattctggattgccaaccaagatgtaaagcaaatgaaggaatggattgacgagaagaccggcattgatgtcttctacgggtcacaatatgtacaatccctggatgacgaggcgaaaagacagcacttgaaatcctatccccttcttccttttggcctggtcgtcagccaaattcaatgggagaaaatcaatcaccaccttcttcaaggaaagattttccgcagtcctgtacctattttcctcagggaggaaatgaaggatggaggcacggactcctttgtcattattgatggagaggaaagagaccttctgatggaccgtcaaagcttcgccaaatggaaaaccagtatggccaagcagattgaggagaagaaggaagctatccaggaatttgcgaaaacagagcaagctatccgtcgactcacgaaggatatcgatcgaatgaccgatacggatttatgcacggacctcttaaggcagatggaaaagcaggaagccttgattgattccgctcagagggaattgacccatactgtcaagacacttgagaaggagagagaacttcaaaccgggctccaggaacagatgaaccagaaacaaaggcgaatcgatgagacggagaaggatcttgctgaagtctctgcctttgtagaggaaaagcatcagtcagaagacaataaaacggtcttggcagagaaagagaaacgaagagacaaattaacgacagagcagctggaattaggaaaattgctcgatgattataccgtaagattggcacaatggaatcatacgcatcttgagtggaaaatggcgatggagcaagatttgaaggaaattggcgcatttgtcgaagatgccgttttcccaacacttgaaaagaccgagccgagcgaggaggcaccaagtcttccctcccatcttctcgatgccatgattgggcatgtgaccgagcttaagcagctgcagcgttccaaggaggagcaatcacaggaattgaccttgctgaaggcgaaaaaggaagctgaacaggcgcaggctgtgaagcttgagaaaaagcttacaaagcaggatgaaaactggcgtgaaaaaccgaagccggaagaaccgcttagcatccttgagggtctcttccaatcagcgcaaaaggaagcaaaggaagctgataaagaagagcgaaaacaggaaaaggaagtcaccgttgcggaaacgaccttaaagcatgctcttgaccaaaggaagaaagctgagaagaagctgaacaagcatgagaaagagccggagacatgggaaggtcaggacctggatgttaaagagcttgaaatcaaggaccgcacaaagattgccaaagaccggcttaaaaatgccgaaaagggtcaaaaggaaacggatgcccgtatcactgggtatgaaggagatcaattaaccttatccgtcatcttaaaggatgaagcagctccatttgcgaatgaggatcttgagacaatcaagaatcaggggaaatcctgtatcctctcctggtgtgatgagcatcaaggtatgcaggaagagaagcaggtgaagcacgcgaagctggaacaagccttacggaagctgaagctggcaattgaggaaaaggattgggaaatccgcttcaaaaacgaagtcttgacctcacttgaccatatggatacgagacattacgcccatatgctgaccatcatccaaaatatgaaacgcttctctcgcagcggtcttgaacagctagacttggataaagaacgagctgaaaaggcgagggatgtatggacgaaccgcgcaagcatgaaggtgatgagcatgacggatgccatacgttcgatgctcgcaaaaatgaaaatcaagaatgagcgcggcaccttcccgcttgtacaattgaaggaggatattctcccaaggcgtgtggaggacatcgaaccgctcttaaagcagtatttcgtcacagccattgacaaaatcagtgctcagttcgactccattgacgagaataataagcagcttgaccaggaaattaagcagctcatcggggatgaacaaatcctgttcgtagcccttcgtaaccggtatccagaactgcttgtttacaatatgagaaccgataatgcgttcatgtacggcaagccgcaaaaagagcattattctacatggagaaccattaaccaaggctctcgtacgaaatcagatggaagcggcggtcaaaagctatctgcgagaatggtcatgatgatgatgcttctttctgtcaaaacagaagcagataactcatgggtaccgctcgtctgtgacaatccatttggacaggccgcatctgctcatgttctagacccaatctttgccgtagcagaaaagctgaaattccaattgatcattgtcacaccgccagagcttgtcaaaacagaaatcagccagcgctttgacgcgtactataagcttgatttcatacgcagcaaaggaaaagaaattgtaacagataccgttgtaccggcttaccggatttatcagggggaagcggtacaataa

SEQ ID NO: 52663 - DNA, 1041 bp, Bacillus sp. FJAT-27916
atgcgaggatttatagaagatatacagcatccgagacagaaaaagaagctaaacattaatgatttggaataccagctgcgccagcagattgaagattactatgatatggacggctatactttattctatgagacaattcagaagatggcggaggaacaagtgctcagcccgatcatgaataaacagacaaatggccgttcccccggacttcccctcttttattgggtcaatgtgaagaagcaggaaacgaaatgggaccgcctcgagatgctgaagcgtaatgatcttctcgatttcacctactataaccaacatcctgagtggcagacagacgatgaatgggaaagaatcttaaatgtatatgattttttgaaaaaagaagaggaacgggagcttgtctctttagaagagcggagccttgaattattcgggcatgagaaattcctttctgatgagaagctttttcctgaaggaaaaggattcctgcagcgaataggcgtgaataaggagaagctcaagatcgtgaaatatggcgagccctttgtctattggctgaaaaggggctgtgatctcacctccattaagcgaattttaattgttgagaatctctcctttttccatacaagtgtgaaactgcttgaagaggatttattagattatgaacctgaaatgatcatatatggcgaagggaaaaagatagaaagcagcttttcgttcttcttccgcatgttccctgaacagccgtatttattttactatgcaggtgatttggatgcagagggatacagtatttttgtccgccttaaggaacgttttgacgactgctccatccagccggcattgaagatttatcgaaaaatgctcgaatgcagggaattcgctaatgaagagcggaaacaagttcggaatgagctccataagaatgcgttcttttcctggtttactgaggaggagcaggcattattggagagcttatgggtgacgcaaaaacgaataccgcaggaagtattaacgatagaaagctggaggaaatggctatga

SEQ ID NO: 52664 - DNA, 1467 bp, Salmonella enterica subsp. enterica serovar Typhimurium; identical to SEQ ID NO: 52217

SEQ ID NO: 52665 - DNA, 4446 bp, Salmonella enterica subsp. enterica serovar Typhimurium
  modified_base (3439)..(3449): a, c, t, g, unknown or other
atgtggctgattaaacgggtttatatggatggcgcaggccatgaagaagctttctacaaggacctcacactggactatattggcctgtctcaagcggtcggtagccctgttgttgaaggcctgcgctcgcccgtcagaaatgcgaaggtggtgaccagtacttatcagcagcttgtaaatgggggcggtaagtcaacctacatcgcgctgctgttatcgatttttgagccgtccgttagtgacttcacccaatatctggcaaatcatcgccagagtgaataccactaccgcaattacttctataaagaactctctgttgttttggttgagatggtcaatgaatcaggacaaacgttattactgggacatgctcatcagcgtaatggagatgatgttgaccgcacactgtttatttgtgatgcgcccgactccctgatgggcgcgccgtttgatgaagtcccttcttattcccgcgcggaacgcaattctgagctgcgcccctatgccaatagcctgcgcagttttgatagctggcttaatctcaaggccggtagtgaaggcggtatgcattggcgtaaaaccaccagacagaacgagtggcgcgcatttttactggaacaacaaattaacgttgatcttatcaaaacaatggtgaccttcaactccgaagaaggtggcctgacccgttttattgaatacaaaactgaacatgatttccttggcgcgttcttcgcctgcaccatgtctaaagatgcggctgagcggctgcgggaactggtagcgcatgaagttgaacgtcagggagagttagaggggatccgtcgtaacgagtccttcctgaaggatgtgctggctaactggctggcatttcttgatccggctaaacagctggaaagcatccaggcgcagcagcaactgctggatgatggcttccgagaagcaatgcgcgatctcgcagcctttgtcggggatgctcaggttgaacagacgcagcttgaagataacatggatagtttgcaaacgcatattggccaggcgatgtctctgcgtgagcagttaggtaagcgcagagcactgcttgaatatgatctcgtgcagcatcagttcgacaaacaaaaagcgatagtcgatgcgcttcaagacgaagccgataccaatcagcgccagattgagattactcacgctgctatagactacaaagcctatgctaaggccctgaatgagtaccgccaggcagatgaagatctgaaggtattccaaagtgaaacggaaaggccgctacaggtgattttcgagcgtactgctggcgaagccttgggcacattagagtgggcaatcgacagacatcgacagcaggaggctacgcttgagaaagaattagggcagatggatagggaaagcaatacccttaaacaatcatacgacgatctacaaaagatgttgggtggcctggaggcggatcgtgagaggtataaaagagacaaacggcagggtgaatcgcaacggaatgaattatgtgaagcagggttgatccaaaagggtgaaacaccggtagcagcccaataccgactggaattaaccttacgcgatgcacagcagagtgaagaattggctaatacaattcttcatcagaaagagcaggcgctggaagcacagctgaatgttgtgcgggaggcatcaattgagaaaagtgaggcccagcaaaaactcattctggctgaacaaaaacaccagtcagctgtggatagtgccttacttttagcaaaaacctatcaaaaactgccaacgtcaacgcaacatgatctagatattgaagacacgagttggcacagcgagctgtgtggattgcagctcgacaaagtattgaatgcgaacgctcaaacgctgaatggaatgaaagagcgtttactgcaagcccggcacgaactggacgagttaaggatgacgggacatgaactggtcgctaagctggtcaatcaggcacttgaagcgttttatgcggcgggcattgcacgggataagctctggatatttccacattatttggcctctgtttacaacgatgatgcacaaaagattgcagcggtgatcgatcaaaaccctggccgctacctgagcctagtcgcactcgacaatgtaacgtttgaacaggtccataaaattagtgagatcctgccctggaagaaggcacctattgctatttacttgctggatgaagcacaagatctccgccgagaaacgtctgaattagtacaggtcgtcctctcaaaccccgataagcacggatatagtcaggccgcttacgaagcccggctgcaagacctggagaatatcgtagcgttgcaggaagtcagtgtgaaggctgcggagagcgcccttaatgtactgaaatctttcaggaatgactggcgtctgcattacgaacagtatggtaagcattgggcgggactgcttgaccaacgggagctggctctcttaatactggaaaatgctgatgcagcacttaagcaagctgagcatgatgagcaaacactgcgtgacgagaagagagatgtccaggtgcggttaaacaacgcccgacagcagaaaattcaggcagaaaaagcgcatgataaactgagtctttttgtagaaacagaatgggcgaagcgtgaaacggcgataatgaaactggagcagttagctgcacagattcaacgaagcaagggcactctttgcacccagagagagaaactggaacgactgagcgagatcgagaagaacaagctctccgagaaaacccttttaaatatccagatgggcaactggagtaatctgtgtaacgagccgttctattcagagattatggcgactgaaggtatggaaggacgaagccccgaagatgcccatgagatggcagctcaggcgcacaaaaaattgctcgaagcagccaacggtgatcaagtgaccgctctcaagcaacaactgaaagatgctaaacaggcacaacgttacgcctctgagcgtttgaccgctcaacccacctacaatacatatccggacgaggtaaaagcggcggccatcaatgaactaacggtaattaataatcgcatcgtacgcctcaacaaacagcagaagcaattcacgcaaaatctaattaattctcaggtaactctgcaaaatttttcccaaagctgtgaggaggctagtaaagcaattgacgaggattttgtctgggaagagaagcccattgagatagagacaatccaaacgtctctggctgaaatcgtcaacagcctccatgaaattgaataccagctaaaacttcaactggagcaaaagaagctgcagttgcaaaagatggaaaatgtgaaagagcggctgcagaacgccaaaacagctcaagcgatgattcagcccattacgccgacctctgcggcgggtctacctggcaggatcnnnnnnnnnnngagcatcactgaatatactgacgatctggttacacaatgccaaaagtatgccggtctaaatgaaacgctaaaacagcaaaatatacgcgtctctacggtctggggaaaattccgcaaacggatcgaagaagagttggccaaggatccagatgcccgagccagtcaggaatacttacggcagttggactcaatcgcaacttatcatgaagtgctgggcgatttggacagggtcggtacagggatcacgcaggtattcgaagctgtgcaggacagcctggaacaattccagcgttcgattgatctgactgtcacccatctgactgctcatctggagggggcgattaaacttctcaagcgcgcgatgtcggtcaaaattcctgaggattgccccgtactgcctggtcggcccattatcaaaatgaccgatcggctgaatgatgttgccgctgatctcaggggttttgccagcagccgcctgcagcagtggatagccaagggacagataccccgagcgcccaatcgggacgccttgacagctgatttggttcagtcggtatttggcgaaggggagctggaggtgcgtttgctgaagacgaatgccagccgtccacaatggactcctgtcacccgacttgaaggttcgggtggacagcgccttacatctgcctttttactgtttgtgacggttggtaaagtacgagagtacgatacgggtatttcaagtgcaggattcttgttagccgataacccgctgggtaaatcgaatgccgatgatctaatgcgaattcaaacccaaatggccaaagcctataaaatccagctcatctacctgactggtatttcggatgaaaacgcccaatcaatgtttgataaccatctcttcctgaataaatttcaaaaactgaggcggcgcgatttggtaaccgttgataaagaacgccatgccctgtgggcggcttctctggctgctaagccacagttcgctcccgtcatttaa

SEQ ID NO: 52666 - DNA, 1044 bp, Salmonella enterica subsp. enterica serovar Typhimurium; identical to SEQ ID NO: 52219

SEQ ID NO: 52667 - DNA, 1401 bp, Brevibacillus reuszeri
gtggaaaaagtggatcgcccactaatatccatttttcaatttgatgattctgctcccgaggtcatacagtcgatgaaggatatcgcatctttatcgggtgtattgagtgatttagggtcacaatattcttttgaagcgcctactcaaatcctgcgctttttacgtttgatccaactgtttaatgaagaagcacttggtcttgatgagccgattgaaaacgccgagactgtttactatcgttatcaaaatcgatacaaagatccagaaccgccttcgaaaaagagtgttgaacaaactgttaatgttcttgtcaaatataactggctttcaaagcagtcacgtcagttaaagctacgagatgttggaaagcgaatgatggatgctattatacggcttgcgaacgattctttagcctactatatggaagatgatataggtcgctcgcttttccaagctagacgtgatgctgaattaagtgaagcatacgacgaccatgggatatctggaggtaataagattgccagtatgattcgtaatgttgaaaatgcgattcagttaatgcaagaacgcgaattggaaatgctggcagatcgcaacgcactgccgcaactagagcttattcatcagttaatgggagaacttgaagtgaaattgcaagaacggcttcgtcaattccagacattggaggacagcttaattcttgctaatttaatgcaaaaaggaaccgcagttctagcagagggaaccaatttaagtctaggaatgattaataagtatttgaagtttacccatatgcaaaaaactcccttaacctcgtctattcagccggaaaaggtacgagagttcatcagtcagatgtttgatccaccgcttgattcagatattcctaacgtgtatcagttgttaagttttatggaacaggaccaatatgagggtgaggcagtggacgggctgtggatcccgtttaaatttgcttccccgctttccgctgtagctatagaagaggctgtacactatttggaaacttacgaaccattagttgaatcggacgaaatggtcgaagagcttgtttttgtttcagaagagatttcaatggatcaaatggaagaattaatggggcaatcaaactggctattgacgaaatcgatgatagaaacgcaagatattgaattatttttagacaaacacgaagaagcatctattgaacaagtcgtcattgaagccaccactgatcaatggagtgacgcagttaatgcacttacagccatttccgcgttggttgggaataaaaaaattacgatacacaaaacgggacaaacaaatttgccggaatatgaacgaaaatgggagtggatgaatcgtgaagatcgagctaatatcatccgaaaacgaaataagtga

SEQ ID NO: 52668 - DNA, 630 bp, Brevibacillus reuszeri
atgcaatcattgaagggaattttgacggagaatgaagagatcgcatttatgaacattcttttttcgtcctctgcttccatacgatcagggaactttggtctttcaagaaaagaagtggagaagcagcttcagattcagggggatgacgaagggctaacatcgtttattaaacgcgtcaatcaagctgtaagtcgctatttccgagtaatttatgatgaacggcgtgatcaagtagttgcactaatgagggtgcccgctcgagcagcccgtaacactttgacaaaggaaagcttggcgattctcttatatatgttttatcagcaggaagtactacagcatgagtttactctttttgatcaactgcttaacgcatttggacacgaaacaacaaaggcaaaccagcgcattctattgaatattgatccgttaaaaaagatcggtgcaattgaggaatacgagacaaactcacatgaaaaagcttatcaacttacggctatcggtattcacatgttctctgattcttttttacgccgaacagttgaatttagtcaatctcatcaactaaacaaagaagaggttttgaaatttttcagacggtataacctttaccagaaaggagaaaatgaatga

SEQ ID NO: 52669 - DNA, 3204 bp, Brevibacillus reuszeri
atgattccgtggagacttactttttcaggaattcgcgactattctccaactttagttgatttatctgatgctgatcaacatgtgctgattactgggccaaatggagcgggaaaatcgaccattacgttttgtatgggggcggtattgtattcctcgaaggtagatattgagggactcaaatctcgtaacttactggctgatcaaacatggagagcaaaaatctcttttttatttaagaatgatggattcatgaaaattgatgcgccttcgttcattgaatttacgctaagtatgtctcaagaccccggacagcctctgaaaaaagtgttttcgatttcaaagggggaacaaattgattcatgggaagagacaattacgtacacatcaggtgatcgttattacaatttttctgcttacaagaaagatctacagtataaatacaaaatcgatcctgatcttttctatctaatttggtaccagcaagaagttaatcaatttgcgattatgcacccagaggagcgtttccgcatttttagtgagatacatgggatagacaaagtccagcgagattgggaagaaagcattgaaaaaatgaaggagaccgaggaaacactccggtcttcggaattgaacgtaaaattaatgaaagcagacttagcgatgaaaaagtcggcactcgaccgttttctggataatcaaaaaagacttcgagaaggggcggagatgtatattgaatctttgctcgggttagagaagcatttacacagggagaaagagagcatccaggctattattcagcagttggaagaggaactttatgaagtgcaagacgcgatagcattaaaaaaggaggaaaaggaaaaagcaacggaaggcctggaaacagaaaaaggtgaatttgaaatactgaatgcacggattgagaccgtggggaacaaaatggatgaagcggctgtgcaacttcaggaaatcaacacaaagatcgaacaacttgagaaagaattagaatcgattacatcacggaaaggtcaaattactcgaaccgaagacgaggttaaaggtaggctgcatacgttgtcagaagaacaacggcaaacagacgagcagcaccattacacggagtcattactggctgagcaaaatacagcttggcaaaaaaaagtggggaaaatagctggaatcaaagagaaaatagcgcgtgatgacgagttggaaactgttcatcgtgaaagacttcgacaatataagagcagttacgctgtacaagaaaagattgtggctttggaagctggaattgaagaatataaagacagaaaaagaaacgatataagggatttgcaagggttaagagaagaacttgttttactggaagaggaacgtgacttatcagctcgtcaaatcgagtcaatgaaatggtttcgttctaagcaaataaaagcgtatcctttacgtgaactcattgaaatggatgagactgcccggcttaaagatgagctgttgtttcaaacaatcaaatacacgatgttttttaacggtacgcatacgaatccgccaaacgatttgtatcacgtccccctgatgaaaatcgttcctgatcggtctattactcatttaaccaaccttcatattaaggtaaaggaagggctcagtgaagacgaaattccccatgcgatcaaagcactttggtgggtggagcaatttttccgggaaaacatattctccatccaaaatggtgtgttaatcgatccgatcgggattagaggtccgcaagaaaaggacaagtatatattgagtgtgaaggcgctgcgagctcgtaagcatgaagtgcaggtgcagatagatgagctctaccagaggatttccctatatgataagaaaatacaggaagacaccaagacagttcaggagttaaatagcattattcatcaggttcgggaagcggaagcatttatgacgcatgaacatgagcgagtcatactgaaaaataaattgaatgaagaactcgaaaccgaagaaagaattaagcaggacagggtacggctcgaatcagacaggactcgtttcgttcgtctacagctggagcaagctgcattggaaaaggtattgcgtgatgaggaagctttttacgaagaactcggcaagatgaaagacaaatatgaggaattaaatgtgctacaaaagcaagggttgatacagaaagacttggtaagagaacagaagaagacattttctcggttggagaacgaacgagatcagctcgatcgaaagatcaaccagacacagcgagagataagaaggttgtccgatgagctggatcatgtggaggacgatcttcgcatgagaaggaaccaaaaggaaagtaacttgaatcaaatcgagattacaaaagaagagctggttaagaccatacaagaattgaatgagctgcagcatctgatccctgggatttattctgaagtcattgccaatgccgcgctggaaaaaccgacttctattccacaattgaaaatagatcgtgaaagcggacaggtaaagtttaatcaggcccggaccgaagacggaatagatccgactgcaccggaaaattatgagactgcgaaatatgaatatgagcgattagacgatgaattcaaaaggacaaatattttgcttgaacaagataaggaacgtgccgagcaattaagagacaaaatggaaacgacgattaacatgcgggtcctcgaactgcagcagcggtttaagatttatatgagtcactttcaatttgaaggggatattggttgggaatcatatgaaggtcagcgtaagcgaatccatttcaagttgtatattaaagcgcgaaaagaaggtcatcgtggatcattggaagatgtaagcataaaggcacgtggcggaaaagtggggaaaggtgtatcaggtggcgaagaatcgctgagctctctcctctttgccttggcacttctgcaaaatttacaaacgactccgggatttatcgttcttgacgaattcgatagtgctcttgacgaaaatcgaaaatcgaaagtgtttgatttatatgttcaggaattaaaaaggaaattgattatattaacgcccaaatcgcacgaagaaacgtatttgaatcgtttttcgaaagcatttatcgttcaacatgatccgactgtaccgaaaagcaaagtaatcgggatagtaaaagtaggataa

SEQ ID NO: 52670 - DNA, 1323 bp, Brevibacillus reuszeri
atgactgattccttacttataacctatattaataaaaatatactaaagaaattagagtatcttgatctaaagtttactccagctctcgattctccatttattgatgtaaatattatgaagaaaacagaaagaacgtatcggattgtagggatgctcacattagcaatgtatgatcctgacagtgaagaagaaagccctgataatgagttgaaaaaaataaattttacgactaaaaagaaagtgcaactagatgaccacgatccaattacgttggggtggttggaaaaaggctggatcattaaagaattacgatttaaaaaagacgaaaagacggtagactccatgcattatcgccaaggataccgattgtacaaatatgaggaagaacagattcagaaaaagaagcacgccattgatcagcagattcaaaattggaatgagagtgcagcttcgtttgagtataaactcgatcagcaccttttagccaatagtaaaaaaggtgtgttaactttaataaacatgataaatgagggagatatccaggggtatgaggagctagttaactcacccctttttccattcaattggtctatagaaaaacgactgaaatttctccattttgttatggcttttgtgcaattagctggtaataaaacgaattttgactggaaagaaattggagcaaattattatcaagccattggaggatccaaggaattcgatttgtacaaagaggaattcattgcacagttggaagactgggcacaatgcccagcggacacgcttggcctcactagtttaggaaaaattacaccgctctatttttcagggcacatcgctgggcggttttcaacctatcaatttggacctgttcacgctttgacagatttagcgattgttgaagacgagtactgcacaaatacatccatactgtggctggttgaaaatcgatcaatacttacaagaatggctgctgaaaagaattttttgaaggaggcaaattctcttatattatgtgcagatggacatttaagaacatcacatcgaaagtgcattcagcaattagtaaaaaatagttctttgagtcaagttatcatttggagtgattatgaccctgatgggctaataattgcgagggaattgtacgaagctgtgacacaagttaggagtccacatattaaatggattactcctcaactcgatgtcatcacaaactggcaacaatacgaggagcacatggtagcatttttaaagcagcaaatggtggaacaggaacaagtcttagggggtgtgagcgagtggaaaaagtggatcgcccactaa

SEQ ID NO: 52671 - DNA, 1575 bp, Pseudobacteroides cellulosolvens ATCC 35603 = DSM 2933
ttggaagatataaggggttatgaaggtgctgcaggtgactgtcttaaaggcttcaggcaaaggatggagagcctggcaccatttatacatttgtcccggaaattgtcgggtttccagaagtacaaccatattgacatggtttcggtaggcttttcggtgctgctgtttattctggagaacatgcttataggccgtgaagagtgcagtattgaagatatagcaagttttttgcaaaacgtcataaaacgctgttatgatttgaatcttacacaggaagaatcaaaagaaatggctttttatataagggattccatatcaggaagcggtggtgagacagttgagtttaactacatgaaccttgagaatggaacgggagagtcaattcccgttaagcttatagatacttcatattatgaaattaaaaaatccgcaaggtataagcttacagatcagggaatggaaatgctctttaaaacaagggaaatattctcggaattcaggataaacgtaacgcagatgtatcttaaacagcaaatagaaaagggaattttttcaggagcactccagactgttaatgagttaaatttacaggttaggcagctgcgggaaaaacttgaaaacctcctccttaacatacgtcagaatgttcttggtattgattttgaagagcttaagttattgtttatgaagataaaggagcaatttgagtccgagagacgtgaattccataatataagaagaatacttaaagaacaaagacaggcaattgaaaagataaactataatgatattgaggaaaaggagctaaaaagtctcgaacaaataaagattcttagtgaaagacttggtgttacaacatctgagcatgacaggctttttaaggagaagcttgatattgtaggagagtatttaaagactattgaactcaagcttaggcagggtgtgagcgagtatatagattttgaaaagagcatatttgatgtgcttatgatgaaaaatcataatttagatccgctggcaagcattctttctcctatttttacaaatacatcccggaacaaggtctttaatgtattcaaagcccttgatccacaaaggatcaaaagtgatatggaggaagtgaaggagaatattgatattgatgttttggttgaagaaagggaaaaggcggaacgacaagaaagagagaaaagggataagaaagttatgtcatacctggaagctattctaatggaagcatatagccagggtgaatccaagctaagctcagcattaaagaggttggatgatgagttgtacaggtcggcatccttcgattttgatttctatagtctgatagtgatacttcatcagaataaggaaatagattttgatgagcttcaagagattcttacaaaaatggtaagagatacttctgcatataacataaacatttactacctttttgataaattatttaagaaaagacctgaatcaaaagaactaaaacgctttttgctgttgtcttcaactaaaaagatatattttgagaatggaaatgagataactgattttgtaattaagggggttaaatag

SEQ ID NO: 52672 - DNA, 714 bp, Pseudobacteroides cellulosolvens ATCC 35603 = DSM 2933
gtggagagtttatcaccggattcggtaagaaaggctttcagcttgtatatgaatcttattgaaaagtcaaagataacaaaaaaagatgatccggagggatttttagcctttgaagatcctgaaatttcattcatcacaagaatttttgaggaagaagccggaataatgattttaaggtcgggagataccctttattttactccaaggacagacaataaatttttaggttttaccaatgaagagttaagggataagatgggattttccaataattccgagctttatatcagttaccttataatactatctattataattaagttttataatggagaaaactataacaacaaagtacggtcaatgctgaaggttgaggagctcgaagggtttatcaccttgaaacttgagtcgtttaaggccatggaaaatggggagcagaaggacgaggaactgaactttaatttcagtactatttccagactgtggttagagctgcctacctatgatgaaaagataaagagttttagccaatccaaaggtactaaaataagcttcatatataggactctaaagtttttgcaggaacagggtcttataaatatggataatgacagtgagatatataccacagaaaaattagatacaatggttattagctattatccggaaagttcaagaaaaaaggaaattctctcattccttgaaaggatatga

SEQ ID NO: 52673 - DNA, 4422 bp, Pseudobacteroides cellulosolvens ATCC 35603 = DSM 2933
atgcctcagataaacagatttagaattgtaaattttagatatgatgatgataaaaaatacattgcaaatgagatttatgagtttgatggcagaaatgcacttataaatcttgaaaatggaggaggaaagagcgtcatactccagttggcactgcaatcggttatgcccaatacaagcattggaagcagaaacttttccgattattttaaggtcggcacttcacctacacacataatggttgaatggaagcttgacggaaccagggcagagtatcttctcacaggcatatgcatttccaagaatgcagatggtttaagatattatacttacacccaaacctatacattgccccatgatattgatataaaaggtattgaggcagtgagcagggataaacaggttattggcttttcagagtatcacaattatttaaaaaggctttctacagaaatgaggattcctataaatgtttattccagggatcgtcaaagggattatagagaaagacttcatacatttaatctctttcgggaggaatttggtgctattaagataattaaccaggctgagggaggaattgacaaattctttgaagatgccagaaaatcaagaaatgtaatagaaaaattgattattccaaacattcctcaggctgaaggtgaatactcaggtatacttgcagaaacctttaaaaaacatattgaaaacctcaaaaacattccactgtatcagcataatattaagatgtatgatgctttttgcagtaaaacagcatcgttaatcaataatctcgagggatatggcactaaagttgaggaaatcaacaatgccggacgggatatactggcatttgataaccttcttggcattggagtagacaggcttattaatgaatgtgaatcattgatggataatgacaaaggttttgctgcaatgatagaagagcttacctataaaaaggttagcctggattatcaaaaaaagctgatggagcttgaagaaattaaaacaaggcatgagagaaaaacagaagaaatagctctgctggtaaatgaaattcatgaaactgatagaaaaattaaatatattaattcagctattgcctataaagacatgcttgaatgccgattgatactgtcggagcaatatggaaagcttgaaaccttaaccagggaaaaggatgatatatacagggagtatcaaaactgtatctattatgcatacagtttgctttgcgaggagaagaaggaaaaggataaaatattagatgagttgaacctcaagtatatggaacagctcaatgaaaagaaggaacttctgaacaagcttgaaaaaaagaacatagatagggatagtatcagggatagcttgtcgtcaataaatacaagacttcaggaagcgagggaaagatattcaaaaatcacagcatattttgccaaggatatgacattgctggttgaaccctctgaaggtcttcaaaatattaaaaatgaaaaagaaatgctttttaataaaaaggaaacttacattggagaaatagacaggtggaataattccaacaatgactatgtgatcaatgaaacaagaataaaagaagcattggcctcggaaaatgaaaagaaaaataataaggaacaggagttggagaatttccacaaaaggttttccagaattaacagggaattgtcaatgtatgaaatagagggggatgtctatagtatacatggctctgagctgctaaatgcattaaagctaaaggcagataataagcttggtgaaatttcaggaaagtatcatgaactgattaaaaggaaaattctttttgaaggttgtgaatactacgttcctgatattgaggttaaaaaggtgtatgattttctaaagggcaacggggtaaggtgtatacctggaagtctctggctcaataatcagagggaggacttaagagaagcacttttacacaaaaatccccttttgtgctactccattgttgtcgaaaagaatgaaatggaaaaaataaaaggcttcataaaagaattgcttgatatggttgagagttttcctgttacatttattgctgatactgaagaaggcattattacctccggagagtatagtgacaaagaatccaaaggattagacagggttggaacaatggaggcctatgtgctattttcaaaaaacaattcattttctattcagccccagctttttagcagttatttagcaggaatggataaggatattggaaaaataaaagatgagtatgaggctataaaaagggatgttgagaagataaccggacttatggaaagatgcgggcagtttattgaaatgtatccggaaggctaccttaaggaaacggaaaattttattgatgctactttagatggaataaggaaaaacgaggcggcgttaaaggattttgctggaaaaagagaattaattgctaaaaaaactaaggagaaccaggaaaagataaaaaacattgaagagattataaacgaaaaggataaggatatagagaatcttagcttatatattgagcttggcaataaaatagctgaacttgacaaaatttacagggaggaagaaggaaaaaggctcaaaatagagcaggacaaaaattccatatcaagcagcataaatggtatttctaaagaaattgagaatacaaaatacaagatggattccatttctcaaaaaagcagggatagaattaagctgatggatgacatttccatgaagctgacaataaaggaattatcaatggaaataacgggggtcctggatgaagttttaaaaagggctgaggggcttcataagaaaattgatgatagcagcgaagaatcaataagaatgataattgatatgcaaaagaaaaatgtaagtgataaacagaaattcatacagataaatgggttttacgaaacggactttattgatgggattatagattatacagaagaggaattaaaaaacgaaacaaagctttataatgaattatcaatgaagaaagatgcagcatctgaagaggaacgttctctactggttgatgaaaaaactcttgagggaaaagtggatcagatcaggagtgatatagaaaaaaggttcggtcatgttccatatgagttccaacatattgaaggggttgacatatcctcttttaatgcccagatagatgcagttaacaaaaagaagacaagaaatctaaaggctattgatgaaaaggaaaaaagaaggatcagactattggaatataaaggaagactggatgattatatcagtgaaaaggatataaaaatcaatagtgattcaagggagaatatggacagctttacctatggtggggaatcgttttgtatttgggatatactacagcttccggttgagaatattgctgttgccgcgaagggtttgcaaaagcagtacctggatttgaccaggattatatccgatatgcagatggatatcaataggagctatgatgagctatataaggaatcggattgggctgaaaacataaccataagaacaatccttgaaaacattataaaaaaggacatgtacaattataaatacgttaaaagcctgtttgatgatatcattttaagtgttcagaatatgaaaaatgcagcacaatttcaattggaggagtcgttaagggacaaggatgagatcgttgaacgatgctttcaaaaggcggaagcgatatatgatgaggttaggactgttgacggcttttcaaaaatcaaactggatggagccatgagaaaaacaatacttattgaggcacctgctcttcatccggaagaaggaaaagcccttatgacaagatatattgaggtatccataagtgagattgaaaaaatgaaatccgaagggaagtatgatcctgcaaggattgatgatgaaatagcaaaaatcatgtcgccggtgagattgttggatgctgtcacaaatttaaatgagtattctataaaggtttataaaccggaatcaactttgggggcatcacgttatataccttgggaggttgttattaactggtcgggaggagaaaaactagctggattttttgctatgttcatatctattatatcgtatcttagatataaaaagactggttggcagggctcaagtaaggtgatatggattgataatccttttggacaggcaaatgcagattatctgttgtcctatatatttgatctagcgaaggctacaaatacacaaatgatatgtcttacaggacatatgcaggtggatatatacaagcagttcgatgtggtatacagtctcattcacaggatgctggcaggtatgaatatgagtgttatacaatccaagctcgttaaatcacagggagagcttgaatctgcatcctacagggttaagcatgaacagatgacactgttttga

SEQ ID NO: 52674 - DNA, 684 bp, Pseudobacteroides cellulosolvens ATCC 35603 = DSM 2933
atgttgtcaaattacatgattggaaattcagccactgagtctctaaaatatagatgcactatgaatgaaagatcctttgagatatttaataacgaaaagtttttaggggcagaagggaaagtgattttaaaaaggcttggtttgtcactgcaggaacttaattgttacaagactttggaagcctttttttatatacgttttggaattgaagagagtctgaatattttaataattgagaataaggatacattctactcagtgcttaagtatcttgaaaggaatcaagataagagaattggcggagttaaaatcaatatgcttatctatggcgaaggaaagaagatagtgaacagcttcagctttataaacgaagtggccatggggacgcccattgaaaaagtatattattttggtgatctagactttgagggtgttggaatatttaattcactggcatcaaaattcgggaaacaccttgttgttccccatgttgcactgtataaggaattgcttttggtatcaaaggaaccgccccaattaagaaccagacagaatgagctttacatggagctctttttgatgtactttgacagtgagagtaaggatagaattgaaaagatattatactcaggaaaatatattccccaggaggcgttaatatttggaagatataaggggttatga

SEQ ID NO: 52675 - DNA, 1491 bp, Clostridium homopropionicum DSM 5847
atgaatttaagcataaaggatattactaaggactatgatgaaagagtaaaaagaattgcactatttgaaccactatataaattgcaggataaaagattcaaagatggtaatggaaatctagtggattgttttagctttggactaattactcttttatttttctttgaaaatatgcttatgagaaataagaaaaatggagttaaggaactaggaagtttttttgaagctataaataaagaagaagtgaatctaagcagtgagggttttgaagagctggcaaggacaattattgaagcctttagaccaccaagtggaaagagaaatagtaagactttttataattgggatacaaggcgaagtgaagttgttcagtattctattttaaaagccagtatgtgggataatgaaagcaatactcagtattatatgttagatgagcaaggattagatctaatatttgcaactaaagaatacttttctgaattccaaatatcaataaatcagctggttttaagaaaacagctggaaaagggagaatttgtaggagctttaaggcaaattgatgagatgagattaagtgtaagcaacctttatgagagaatatataaaataaagcatgaaatacagagaaatataatttcagatgaaacctacgagagatataagaatacagttgaggatataaatcttagactaaatattgaaagtgaagaatttagagaacttagggaatttgtaagagaaactagagaaaagatgagctatgagtttaagagtgagaaggataggaaaacctatgaacttgttatacaaatagataaagaattaggagaggttcattatgaacacagcacacttttaaaagaaagtatagctttaaaaacaacagcgctgcaatcggcacaagaatctctttattatgcaggtatagaatcttttaattttaatcaagaagttgcagcaagatttactgcttctccattgccccttgaggcatcaagaagaatagtaaacccattcttaagcttagaagtgaacaaaagctggtccccattaagtgttttttctcctcaaagaattaatagtaatgataaaaatattgataaagaggattactttttagatatagatgaggaaaatataaagaaagagttattacatttaaaagaggattttaaaaggcttatggaattaatccttcaggttataggggataaaaataagattgccttaggagaaatagtagattacataaaagataatgaagttaattacatacttaataacagaatattttatagtttttgcatgattcttcaccaaaaatcacctataaatattggagaaatagaggaagaaaatattttaagtcatggattagagcttttaaaaaatagatataggactttagaagctgtagaaagtaacacttacataaaggtaaacaataagtttactataagtaatatgattataaaattggaggagtag

SEQ ID NO: 52676 - DNA, 753 bp, Clostridium homopropionicum DSM 5847
atggaatatagtaatgatgatgtaattggagcctttaaaatatactcagtattagcaaagaatggttatgctgataaggaagatttaagggcatttttagcagaagatcatataggggctttagtagaacaatttgcaagagaagtagattgcactatatttaagtctggagagtatatttacatgatacctcttgctgtagattctccatttcacatatcgaatgaaagcataaaacgaaatcatctacctaatagagctaataatctagatatttatttaatgtatttctctataatagttttatttggagaattttatgatagttatcaaactagagaagcaactagagattttttatctatctctagctggctggatagcatcaatgagaaaatcgaatccttaaaaggtcatgattcagaaaagttgaaaaacatgtgcaaagaacaggaatataattgggttgccattatggaaaaatgggaggctatggatgatataaatgaaaaagtaaaagttcaggatgcaagaactataagcaggaaaagctttttaactattgtaaagcaatttttgattgatcagaagcttatagaggacataggaaatgatgaaatagcacttacagaaaaggctaaggttataattcaaaaatattatatggaagtggattataacagaggaatattagaatttatctatagtatagagaaggataaggagagagatttagatgccagccatatctaa

SEQ ID NO: 52677 - DNA, 4437 bp, Clostridium homopropionicum DSM 5847
atgccagccatatctaaaataagatttacaaatgttatatatgaaggtggagctaaaagatataatgatgatattttcaattatgaagggtataatggagcctttttgctggaaaatggcggaggaaagactgtatttatacaaactgcacttcaagctataattccaaatattgaagtagctgataggaagataaaggacactcttgtgcttacgggtaacgcctctcatatagctattgaatggatacttaataataatccgagaagatatggtgtaactgcagtaaccttatttatgggaagtaatggagtggatttttatagatatacttatgagtacagtgaggatgataaaaattcaatagaaaatattccttttgttaaggaaaatagtaatggcactaaacgagcctctggcaaagaggaaattcatgaatattatcttgatatggttaaaaatcatatgcatgctcagttgttcgattctaacaggaaatatcacaaacacctagaggagaattttaaaatataccatgctgaatggagaagtatagcaagaataaatgctggtgagggtggagttgaagctttttttgacaactgcaagactactacgcagcttgttgataatcttttaataccagttattgaagaagcaatggttggacgtggtgctaaggattttgcagatatatttgaaaatcagagagaacattttaagaactataagcagctaaaagggagaataaatgagagcaagcttattgataaagaaataaataagtatgtagaggtattttctaagtatcataaattaagtgaggaattgaatactgaaaagggaagagttaagtttttgaataattatataaaagaagaaaaaacttctctggaagatgagcttggaaaggcagagaaggatataattgagtgtgaaaaaaataaaagtgaattgcatagaaaagaattgtcctatgatatagctgttttagaggaggagtttaaggatttagagaagctttgtaatcaatataaggatgagcttaatgaaaagaaaaaggtatatgaagaagctgatgagaggcttcaaaatctgcagatatccaggataaagcataacataaatgaaaaaaatcaaaagctgcaatatttagaagaggaattagaaaacctggataaaaattttactgtagaagaaataaaaataaatttaaataaaagctgcagccttttaaaaggagtatttgtaggggagaaggaggccttagaaaagcttaaaggcaatcatgaagaaaagataaatactcttgaaaaagaaaaacaaagtgaagctgaagcattaaaaaggaaaattgaagagaaaaatagcttaaatggagaaattataaaactaaaaactacaataagcaatttagaaaaagatattgagagaataaaaaatagaatactcagcagtcctacaacagatgtgttagaaagagaaatggaaaaatggaaggaaaatatagtaagcctgaatagtggaatctccagttaccagcagcaaattccagagttaagacacaaaagagaagagctaaaagcggaattaaaaacattaagggaaaaagaaaaaacttctcaaggagagttaaataattataatactatatttgatacaatttctaaggaaagaacagaacttacaggaaaactaatttctacaggtatagttctttcagaaaaagatgatatatatttaaaagaatccagcgtattaagcagtttggaagctaaggtagaggctttaaaaagagaaaaagaaaacttaatatttgaggaaagagctgtttacagattcttagacgattataaagaaaactcctattatacagcagatccatttctgtataagatatatgaaaatttaaaaagcagcataactaccttagaaataggagcaatgtatgtaaaaagagcttctgcagtactggaaagagaaattgaggctttatacaaggattacccttattgggtaaatagcttaattgtagatgaagaagaagaaaataagttactagaaaaactaaaagacttaggtgaaaatattgtatttcctatggttattttaaaggaaaaagaagctagggaaatagcttcaggaaatttcagcgaaaaggataagcataaaactatatatcctaatatatggaaaaacaatctttctaaagattactttatatcatggaagcaatctctagagggaaaggctaaaacagttacagagcttagacaaaataaggaaagcgaaatatcctattttgaaaatatattaaacagcacaaaaggattctttaataaatatcctcatgaatattatttagaagtaaaaaactgtatactcaacttaacacagctctacaatgagataataagtaatattagaaataaagaattaaaagtggaagagttagagaaggaagagagagagcttagtctaaagctaaaggaagctgaacaaaatttagacaatatttctggaaagctcatatcagctcaagattgtattcaaaagaaaaaaagtatagataattataatatttccattcaagagctgttaaataaagttaaaaatctagatgaagagatttatagagtaaacaacataataaaggcaaaagaagaggcaataaaagaggaagaaaaaaaggcaacagctgtttcaacagaaataaaagtattagaggcagattcttattataagcagattgaagattttgagcctgagtttggaaataaggctaaaagtatattaaagacagaaatagaaggactaaaagatcagctgcatgaaattcagaaagacagaaaaggaatagaggacagaataaaagaaacccaaagggacataagtaaacttgaaagagatttaaacataaaatcatctgaggctaaatatgacataatagacatagagtacgaagaattctatgaaaaagaaattgaagctttaatagtccacgtgaaaaaactggagaaaagctttaaggctgcaaattcagcatatgatttaaagaatgaagaattaaaaaaactagggtacaaaatagaaaatcaaaagaatgagttctataagagatatgatcggctgtatgactttaatataccattaataactgtaaatcagcagttattagaggaaaagaaaagtcttaaaactttagaagaagagcttttaaagagctcagaaaagctaaaaaatgaattgacaaaggttcgaaattcactatatgagctagaaaagaaaaatgagagatttgactttttaaaagagtctgttaaagaagtagctattttgagagaagaactaaataatttttcatatgagagagaaaaatatgtgaataacttaatagccgatgtagaagctttaagcaataatctcacttcctcagaagaaaatgtcaatagaaatagaaatgattttagaaacttttgcaatagtaaaatagaagatattaaaatgagacagatgagtttaaatggtattgactacaacaagggatatgaagacgtgattaaatggcaaaagaatatgcaagatagaattaatagaactgtacaaatgctagaggaagatataagagaacatgacaaggagttagaacaatttatagagcatcttcatagctatttaactaatatagttgaagagatgaaattaatacctaaaaagacaagaataaaggttgaagaggattggaaagaggtatatatatttaatatacctacgtggaatgaaactgagggaaagagtgaacttagaaagcatatcaattggatattaaatcaactagaacaagataaatttaaaagtgaagatggaagagaaaacactaatttaataagaaaagaaatagaaaagtggtttggaacaaaacagctgctaagaaatgtccttaaaaatgaagaaatcaagataagatgcagaaaggtaagaaatgaaggtacaataagctcaacttccttcacttgggaaacctcaaattcctggtccggaggagaaaagtggagcaaaaatatgacactattcctgggactgcttaattatctagcagaaaaaaggaatcttatttcaaataggggaaagatacatcgtactgtaattttagataacccctttggaaaagcctctagtgaccatgttttagatccagtatttatgatagccgaacaattaggctttcaaataatagcactaacagctcatgcagaaggagccttcataagaaaatatttccctgtagtgtacagctgtaagctaagatatgcggccaatggagaaagtcaaattatttcaaaggaaagagaaataaaacaagccttctttatggacaaagaaccacaaagccttttaagacttaatgccgcagagcaaatgtctttgtttaattaa

SEQ ID NO: 52678 - DNA, 1026 bp, Clostridium homopropionicum DSM 5847
atggatataattatcaattacataaaaaacttaaaaagaaaaacggtgaatttggagaatttagaaaatattattggagggggctgttcctacgaggattttgcaagaggaatattgaatttagtagaagaaggattactaattccaataaattcatcaaataataatggaaaaaagatccccttatgctacaaatataggataaataaagaagccttgcatagagacagtgaagaagagattaaaaaatatttattaaagatggagatagagataaatctaagcttctatctaaataaagatgagcaatattggcgtaaagattttccttatatcattaagataaatgattacataaaagaaaatggtattccaagggaggatgctacttcaccagaacgttcttttcaaataataggtgatgaaaaatggatagatgaaaagggaggaaaagctattttagaaagaatggggttgtggcataagcttagaataaattataatcctgaaccactaatgatagcggttaatcccaagttgtttaatgaaaataagaagtatcacattatagtagagaataaaagtattttttacctgctgttagatttattgagggaaagtgtatttacttcccttacttatggctgcggctggaaaatagtatctaatataaacaacctggaaaaacaattagggatagaagagagcgaaaatgaaattttttactttggtgatctggattttgagggcatagctatctggaacaatttaaaagacaagtatccagtaaagctagctgaaatattttatgagaaattattattacaagagcctctagatggaaaaacaaatcaacaaaaaaatattaaagctttaagcagctttttagataattttcaagatagctataaaaaacagatttcacaggtattaaagcagggaaaatattatccacaggaagcattaaaaaaagaggatttgtgtgaaatactaaattcttataaagatagatttgggggattttaa

SEQ ID NO: 52679 - DNA, 765 bp, Clostridium sp. DMHC 10
atggcatatacaacggaaaatatacaaaaagcatctgcgttatttttcatgcttttaaaagaaaatattgtatctgttaaagagcctcttgcagaagaatattcaaatgataacgaaatgaggcaaatagtaaaaactatggcagcggaggcagatcttatgataatagacaccatggaaaatcttcatttagtttcttctgctaatggatctatttttgcaaattcttatactcaaatgaaggaaaagtataaggatttaaaaaacaaaaagtacttttatttggctaatttgataatatgcgtatttttatctgaagtggacaaagaaaataacataagaattagatgggaagaagaaggtatatcttatgctaagcttgaagacttggtgaatggaatcataaattcctggattgcaagagaaaaaaaggaggaaagctttagtcaagattggggtatagcacttaaggaaattgatgaggtgtggaataaagacttttcaccaatgaaaaacagtaaaactaaaggcagcatagatgtggtaaatactacggataatagatttaattttatttataaggcgttaaaacctttagcggatcaaaagcttatttacaacaatactaaagaacttaagttgattccaaaattagaattatacgaaagattagacaagctgtatcacaatcaagatagatatagagaattcatgaaacttatagaagctgcaaaggaggaaaaaagcaatgccgagactaactaa

SEQ ID NO: 52680 - DNA, 4494 bp, Clostridium sp. DMHC 10
atgccgagactaactaaaattagaatagtaggaaataagtatgataattttaaaaagtgtcacgacaatagtatttttgatttgacaaagatgggagaaccagaccatactttgtttactctaaataacggaagtggtaagggagtactgatgcagcttatatctcagataatgcttccaaatacgagatggggtaaaaatgatggaaataagattgctggcatgtttttaaatagaaacaatcaatttaaaccctacacttttcatgtgcttttagagtggaaactggatacaatgccggatagatggttaatgacaggtatttgcatcactgcggtaaaaaagcttgataataaggaggaggaaaaggaagaagaaaaaataggtgtaaagtattttttatatactcatgagcattatgttgatgacccttatatagtagaaaatattcctctttatttaaaagatgaaagaaaagcagtgagttataaagcattagaagaatttttaggagataataaaagggattttagaaaattttctgagtcggattccagaagtacaaactccgaatactatcagtatttagcgggacttggaatataccgctcagagtggtctattttaaagcttataaataaagtggaaggcggagttggggaatatttttcaaaggcaaaagataataaaggtatttttgatgaatacataattccagctatttctgaaaatttaaacagtcaatttgaagaaaataagaatgtgcttaaagatatgtttaaaagcaatatttctataactaaaaatcttcctatacttataaatagagaagtagattataaaaatatatcttcattattagatccgttaatacgagatgcagagcagggaattatttatgaagataagaaaaatagctgtattataaatggaaataacctttactgtagtttaaacagtattcaaaataatgtgctaaatgaaatagaaacctgggaaaaagaaaaaagtaaggcagaaacaagaaaacgtgagctgctttttgaaaaggacaatctggagtatgcaaaacaaattagagcaaaaaaggattatgaagggaataaggcctttgaacaaaaagaatttgactatataaacagcgaaatagatgatttgaatgaggaaaagaaaaaatatgaaataaataagcttattattcctatggagaaagatgaatataagaaaaaatctactcttgaagaaatagaaaagctcatgaattctttagctttaaaagatgtacatggggaaatgaataaggtagaagaagaaattaaagataaatggaaaattacacaggaaaaatggagcaatataagcagccaatataaagcttatgaagcttttctaaataataaagaagcaaagctaaaagtggaaattaaaagtttaaatgaaaaaaagcagagtatacaggttaatttaaaggcaattgaagataaaaagaaagaatttaataaaaaagaaaaggaacttggcacggagtttgatccttttaggatagtttatccagaattattgcttgaagatattaaaaaggaaaaggaagaagaggataaaaaacttttaactttaaatagcaagtgcgaaaagctggaggaaaaaataaatagcctaaagctaaaaatagctgagtttaaaatgaaacttgaacaatatggggatagtaaaaaagatattacaaaaaagtataatgaaaagaaagaggaggaagaaaaactttttgcaagagttttagaagtttgtaagcttgatcctttgatggaaacttattcggaaaattggcttcaaaataaggcatttgaggtgaagaagcttaaagaagaaaaagaacttcaagaaaagaagctttacaaggaattatgggaaaacagtattgatttaagcttaaatacagaagaatactggatagcaaataacgatgtaaatagtgtgaaagataaaatagaggctttaggaataaaagttatttatggaactcagtttttatatgctcttcatgaagaacaaaaaaagaacatgctttcaaattacccaatgctgccttttggtttagttatatctaatgttaatgaatggaaaaccatagaaagtaacatagataaagaaagttttctaagagctttagttccaatttatgttcgaacagaaatgaataaggttgaaagtgttaactataaattagtagaccacaaagctttaaagtttgtagaggattatgatagttatgtatcttggaaggaaagcttaagtaaaaaagaacttgaagcaaaagaaactattagagtagttgaaggctctatagaaaaaataggagaacttcttaatgctattagtcttgcacttaaaactgaaagctctgcagcgttagaccaaaaacttaaacaaatagagcttaatattaatgaaaatttaagtgagataagtgcagcggagactggcataaataattctacagaaaaacttaatattaataaaaaaaatagagaaaatgtggatgaaaatattaaaaagctttcttatcaaattgaaaaacttgtgaattttatagaatttaaaaataaaatagataaaaaattaaaagaagaaaaagaagcgatgcaggagttaaacaatttagtttctaagcttagtgaaaaagaactagaaaaagagcttttagataaaaatataaatgatgagaatttaaactatgaaagatggaaggttaaacttgttgagccaggacttaaggacataagggaggttgtaaaggaagcggaatttaaggaaataaatcctaaagataatttacagtgcagcacagctccaaattatgaagcttcaaaaaaagatgagatatacagcagtatttcctacagaaagagtttaaatacaaagcttgaaagcaaaaataatagcattgctcttttgaaaaagaatgcagaggatattcaagaaaatatagacaggcagattaaaatgcttaaaaaaattgatttgaattggaaaaactataaggtagaaaacatatccttggaatttgctgaaatggaatttgataatttagctaagaaaataaaattaaaagaaaagttggctaaagagaagtctcaaagcataagcaagcttgaaggtcttatagaagctgtaattaaagacatagaaaagcaagctaataaaatacttgaagaacaccaaaaagcagctaatgtgtgggaaaacttaaatttagaagaaaaggaatttaaaattaaaagtgggatagaggataatagcaaatatttagctagaacagaaaatatattgaaagctttagaggttagaaaggcaaatataaataattgtatttcagaaattaaatactttgaaattgatccgctaaaaggaaagacctcagagtacgatatgaataagataaaagacaatgaaaagaatgaagtagacaaatggatacaagattttaagaatatagatcaaagtataaaaaatcatactacaaatgccgaggagaattttgaagtttttttagaggctttaaaaaatgatataaaagatgaaattttaaaacacaaaatcaaagaaattataggggataagacgaatataggcaattttacaagcaacaaggattcttttaaaagtatgaaggaacacgcagaaagagaaataaatcaaataaaaactgacaaacttgaagcggaagaggcaaaggaacagtgggtttctagagctgcaagacaggcaattaaaatatcagagtgcttaaaggaaatggtaaataaaatggtatatgttaatgaaaataattatgcctttaagcttgtaagacttaagggagaagaacttttgcctaaagaagaaagtgatattaatatacttttaaatgaatactttattgagtgcattgaaaagctagaaaagaaggacgccgactttgataatcttgataacaaggaactaaacgagcttatgagcgataaaaaaatattctcaaaggctctgagggggaaatatcccagcttagaagtatacaaaatgtcagagaagaatgaatttttatacgcaaaaccacaggattatcattacgcaacctggggagcagtgaattcaggagaaggagattcaccagaaggcagcgggggacaaactctatctataaatacctttataattatgatgcttatgaattataaaaagagaaccttaggcaatgaaaatccatggactgtgttaatgctggacaatccttttggcaaggcttcaggagctcatgtattagaccctatatttaccatagcaaacaaacttaatttccaaattatagcctttgcagcaccagaaattataaaaacagaaataagtgaaagatttcctgttttttgggctttaaagattaataatgaagaggaagatggaaatctaggcaatgtagttggtagagtagtgcatggaggtagagttagaggatag

SEQ ID NO: 52681 - DNA, 624 bp, Clostridium sp. DMHC 10
atgaaaaattttttgacagacagtgataatggcaaaaaggataataaagtgctcaaaaggctttctttaagtcttgaggatataaaagctaagcagtatggtgaacagtttatctactggaatagaggagttagtgaaatcaaaactataataattctggaaaatcattctacatttttttcttttaagagggcagtgcaaaagggcataaaagtatttggaatagcgccagatgcacttatttttggatatggaaagaaaattataaagagtttttcttttctagatgaaatagctaagacaagtgaagttacggtatattattttggagacatggacccagatggatattttatatataaagcgttgaaagataagtataatgatgtaaatataagtttactagtacaggcttatgtggagcttataaaggtacataaaaaatataaaagcaaggatcagcagaaaaatgaagaatgtttaaagtgtattttgaaagaatttgaggaaaagaattatggtaggtataaggattatatagtagagctttggaaagaaaattgtagaattcctcaagaatttattacgtatgaatatttgttagggctggaaggaggagtatag

SEQ ID NO: 52682 - DNA, 1512 bp, Streptomyces decoyicus
gtgcgagatgagacctgggagaccgcagtcagggccgacgaaggcctcagccgcagggcaaaggccttggcctgtacggtcccgctccacgagttggacgctcacaaggggagactggagtgggccgacgcaaaggtctatctgatggcggagatcgccctgcacacgatcgaccaggtcgcgatcgccatggacttcgacacaggcgccgaccaccagcacgtcctggagcgggtccagcgctttgtcgcattgcaggcccccgagcggtcttccgcggagcacgcaagggtcgccgagtgggtgctggagagcctggtcaatctcggggacgtggaacggtcgttccaccggccctacggatccctggatctcgacggcgtctatcgcgtgtacaccttcgacttcaagctcatcgaggagcgcagggacgatgagggaaagctgtatctgcgtgcatcggacgaggcgctgaacgtcctggtcggagcgctggacacggacgtcgaatccgcccagatcgccgccgaggtgaaactggagaacctgatcaagcgggggcggctcgcagacgccaagctggtggccgaacaggcccgtatccgcaccatccagtgcggggaaatgatccgagcgcaactggaggccaccgaacgcgacgtgcagacggtggactggcaggagaaggttcccacgctgctcgatgccgcgctggagcacgtcgaggagcgggtcagggccgagcgggcgatctccacgaacatggccgaagcccgtgacgacgccgaggaccctgcgtacaagcgccgcgcggcggaactcgtggatatcgtcgacgactgtgtgcggcgccacatgaaactccattcctttctcatgggcgcacgtgatttcttccgggagcagcaggaccgtcagcagttcacccacgtgctccggcctcaggttccggacctgttcggggaactactcaagcccgtactcgatctggcgatcgccgacgcgggcaggccgacggaccgcttcttcaccgaatcggtggggcccaccgcgcggaacgtgccggacctggcggccctcgtctgtctactgctccggccagcaccggagcgcagccggttcgcgggcgaggttcctgatcccgaactgcaccccttggaggagcaaaaaggcttcaccgaccggcagtgggagttggcggagagcttgctcgatcttccggaccgtgtccgggcgctgtccggcctgctggacgaggccgcggccctcgacccggagctgcccgagcttgtcgcgctccttggactgcacgccttcagcccacagaccggaacggccctgcgccgccgggacgaccatgtcctgctggccgtacgcgacgacaacgagctgaacagccagagctttctgggtgacgacctcctcctcaccaccgcacggctcaagccagccggcgcggaccagccggtaccggaacacaccacatggacccacgggggcgacgaccgatga

SEQ ID NO: 52683 - DNA, 4467 bp, Streptomyces decoyicus
atgtactacgaactgtcccgcatccggctgtgctcggtcggccccgcaggcgcccgtttccaggatgtcaccctggacttcagcggcgtcgggaagccaatcacacacgagcaggacgacttgttcggctccgcgacccagacgctgcgcccgtcaccggcgagcgtggtcttcctggagaacggcggcggcaagtccgtacttctcaaactagtgttctccgttctgctgcccggttggcggccggtgaagggagccaacgacccgcgtcttctcggcgactacgtgctggcccaggacgtttcacatgttgtcctggagtggacgcactcgctgacggggcaggtactcgtcacgggcaaggtgatggcctggaagaaccagacggcttcgcagatcgccgacaacctccaggagggctggtactacttcctgccgcaggaatcgctgtccctggacagccttccgatcacggacgacaaccgctacctgtcgttcgacgcctaccgcaggcagctgcacgacctccatgacgaagacccgcggctggggctgaactggccgaagacccagaccgcctggacagagctcctgggaaagctcgacatcgactccgagctctttcagtaccaacgagtgatgaacagggacgagggcgaggcggtacgggccttcgacctcgactccgacgcgagcttcgtcgacttcctcctggaggcagtggctcagcacgacggtctggccgaactggccggactggtggcgaagcacgtgcacaagctcgcccagcgccagacgctgctgctggagcaggagttcgtggagcgggtattggacatgctcgaaccgctcaccgaggccgcccgtgcagtggacggcgcgcgcgaggacgtcgcacgggcccagggggacctcgagaacttcgcgagccgtgtgaaacgccgagtgcaggacgacgagaatctgctgagggagctggacgagcaggctgtgcggctgaagggggatctggacgccgctgttcatctcgccgaacggtggcggctgacagcggccgaacagcaggtcacccttgcggctatgcacctgaccaacgccgaggccgacgtcgaccggaccatctccgtacggaagaaggcgaacgccgttgtggcgggatggcaggctacggcggttgtcctgcgccatcaggaaaagtccggcgaggagcgcgcgctgcgtgacctggtcaacgccggcgaggaagaggcgcgtccggcccttcgggagagggacgccgctgccagggcattcgccggcggtctcttggcgctggtgcgtacggcgcgttcccaggccctgagcgaagacgccgaggcggaggaacacgagaaggcggaagacaaggctcgtggtgagcgcgaggaagcgctgaaggccgccgccggtgcccaaagcgagacggacaacctcaaccagcttatccagggggccggttccgacgccgagcaggccgtgttggccgggctcgcggggaacgtcgaaggcgtaccgcaggccgcgaaggacgcactccgggctctcgatgacgtccagaccaagatccggaccctccaggaagaggaggacagcctctcgacggaacagagcgcggcgcagggggagctggacaaggccaaagaggacgaagcgacggtgcgcgggcgggcggaaggaattcaggccgatctcgaccaggtcgtaggcctcaaggccgagttggagtccgagtcgcggctcacggaactcctcgacggcgaaaccccggatctgaaacgagacgctcaggctctggcgaaccgcctcggggaggtggtcacggaggtcgaacgggagcagatcacgctgcgggtagaggaagcccgcgaccagcaggcccgcttagccctggccgacggccgtctgctgccgccgcccgacctcgtgaccaaagcctgccagctgctcctggccgagggcatcgacgcctggccggggtgggagcacctcgcggactaccccaaacggaaacgggaggagttcatagcccgggtgccccatctcgtcagcgggattctgctcaacaatcccgaccggctcgccgaggcccgtcaccttcttgcccggacggcgcccggcgccacggcatacgtcgcggtggggaccacgaaggcgttcgaggacctggccacgggccaggaaagcggaaccgacttcttcctccctttccacccggccctgcacgaccccgacgccgcggaggccgagcaccaagccatcgagcaacggcacgccgtgcgtgtcgggcgtctcgatcgactgaccgcctcgaagcgtgctgacgacgtcctccggcagcggatcatcgcgtggcaggagaagtatccggccggtgtactcgctgggctgcgtgaattgctcgccccggcaacggaggaggtcgtcgccgcccagaagctcacgacagaccggcaacggaccgtcaccgctctgatcaggcgccgcaccgagaactcccggaaccagcgcgcagcacacgacgagttcgaacggctgggtgaagcgagccgccggctcaccgccctcgcggagaggatggcgctggtgccgcagtggactgacgcgctgcaagtcggcgaggcgaccctgcgacaccagaacgacctggcggagaaggcgaagaacgacgccgccgagcaccgtcgcctggccgccgaatacaaaggtgcggcaggacaacagcgaaggatcgccgacgaggcacacaaggagtgggcgggaatccctggcgtacaggaacttatcctcgacgagggagttccccatacgccgatccctttgttgcgcagtgccttcactacggcctgcgacaactacgcgaaggcagacgtcccggaggaactgcgccgggaccttggccgagcggagaaggaagcgaccgccgcccgcaccgagtacacagccttggacgacaccacacgggatcacgcccatcggctcctgctgacgccggaggccaccgacgccgtgacccgcgcggaggctcggcagcgtgcggtccgcgcccaggaggcggccgaaaaagctgctgggcaggcgcagttgctacaggggaagtgcgaaagcacgctgcgtgagcgtcagcacgagctgcgcccgctcgcgcgggacgggctgattgccatgccgttgccgtcccagccgcacaacatcatcgccgcccaggaggcggtggcccgtgccatcaccgagcacgcggccgcagcgaccttcgagaaggaatcacgtacccagcacgaaggcgccgagcggagactcggcctcgcgaaggacgcggccaaggaactcgcggtcctcgccaccaccctggagagcatcactccccaggaacccgcgacggaaccatacgggggcgattccgcagccgcgctcggcgagcaccgccgactcgaccaggcgaagaacgccgcccaggagaacctgaccaagcatgagcgaaccctccgcatcgcgaacgaccggttgaccaggcacgcggccaaggacacgtacgaatccctggccactcccgtgcgacgccagatcctgaacctgccctctgagcaggtgaccgcccaagctcctggctggcgtatcgctctcaccgcacggctgcgcagccttgccgacgatctggaccagatcggccgccaccgccaggtgatcatcgaccatctcaagggcgaggtcgaccggacactggccatccttcgctcggcccagcgggtgtccacactgccccgcagccttggcgactgggcggaacaggagttcctccagttctccttcgagcggctcacgaaggaactgctcgcggcgcgcatgggcgaggtcgtcgacgaagccgcagtcggccgtaccggggacgggcgcagagtgcaacgtgacggattgtcgctgctgctgcgcggtgttcatgccgccgtgcccaaggggttcaaggtgttcgtcctcaaacccgacatcgttctccgtacggagcgggtacgggtctccaaggtcaagaagatcttctccggcggtcagcagctcaccgccgccatcctgctgtactgcaccatggcgtcgctgcgggccaacaatcagggccgcaagcgcagccgtcacgccggggtcctcttcctcgacaaccccatcggccgcgccaacgccgactacctcctcgacctgcaacgatccgttgcagaggcgcttggcgtccagctcatctacaccacgggcctcttcgacgagagcgcgctggggcagttccctttgatcatccggctgcgcaacgacgccgacctgagagcctcactcaagtacctgatcgtggacgaacggatccgtaaccgactagaccggctggatccccccgacggcacgggacgcctctcggcagcgagggtcttctcccgcgacgccgaagacccccaggagctcggacgatga

SEQ ID NO: 52684 - DNA, 819 bp, Streptomyces decoyicus
atgcctcgctggcaccacgaactgcactggctagcggaccagtggcgccgagccacccccaagcagcgagccgcctacatagccatcaacctgtggctcaagagcgaccccgatctcttcgctgtgcctatccgcgaacgggtcctagagatcttcgcgaccttcgggtcagagaccgacttccccatgccggagaagacattcgacgagttgaaatccggaatcctcttctccgaccccgaacggctcgacaccgtcctgaggaccttccgtccaccgccgccgctgctcacggagaccttccccttggaggaggccgacggccactaccgccgcgtcggcaccggcgacatcctgctcgtcgtcgagaactcgactacctggtggtccatcgtcgagtgcctgcccgtccaccaccgccttggctacgtcgcctggggcctgggcggcaccttccgggcctcggtccgggccatcactgcagaacaccgcatctccgagatccgctacttcggcgacttggaccttagcggcgtacggatcccgctcagcgcatcgcgcacgtccctgggactgggccttccccccgtacagccgaccaaggtgctgtacgaagcgcttctagcccttggtcgcccccacgcggcaaaggaagcaccagctagcttggcggaggccgccgaactagcagactggctccccacaacgcagcgaggtgaagtcatccgcctcctcgccgagggaaaacggctcgcccaggaatgggtgggataccgcttcttgagccgcagcacggactggtacgtggatatccgctga

SEQ ID NO: 52685 - DNA, 1506 bp, Sporosarcina globispora
gtgaacgaatcatgggaagggtttgcccagcggatgcagcgtttgaacccgctgtttgagctggggagaggaatggaagtcggagagctgaagcctcatatccaaacgattctgatgcaggtgctcctcaccattttttatcgggaattgaatgatgacgatcatcggagaaaatcggatatcaaatatatggtggaagattcgattaaacaaatgaagctcttgggtgatgagaagcagattgaacgaatcacaagcgggcttctgtatcagggaaaagaggagtacagcaagccgtttgaagccctgtattacgatgaaatcaggcagtcatgggagactcaggttttccgctatgtgacgatggatgaattatatacgaacttggaaatgggcggatccatcgtttacaagctcacggatgtctcacaggaaatgatttttatgagcagggaaatggcggaggaattctcgatcaccattgaacagctctacagtatgcagctgattaaaaacggtaatttccgcaaagctactcgaaacctcgatcatctcatttcacgggtcaaccgcttaatggcaaaagaattctcctttcaaaaagaaatgatcaataatcccaaaatcttattgatggaagaagaaatgcaaagggctgataaccgcacggaaattgaaaaacaatttgaagaagagaagaatcacttccgtaccatcagcagcatgatagagaaaacgaaacgaagaaatgaggaagatgatctcattcaaaacgaattgatccttcttcaggaaaagatcggccatacaaggcagttgcatgaccgtttcgccaagcttgtgattcaaaatatctcctatgagatgaaattaaaagcggaaaacccatcgctgttttgggaaacgagccttgtttcattcagagagcatatatatgagaactggttcatgaaggaaggcgtttcttctttcaatcatgttgaaaaggtgttaagtccattattttcgccaaagaatgaatttatattgccattggactggatttggggcgaacaggaatttgatgaaaagcagcttactgagacacttgcagaagaagaggaaaaagaaagcgttacgcaccagcgggttacaaactggaattctgttatcaaggcctggagttatgtttttcaatatttgcagacgtacggagagttttcattggctgatttatcgacactgccgctcgagattcaggatctgtggtttgaagaatcggaaacgattgatttatggatgatgtttgataaaaagccgctgaaggttcaggtgctgcatcggaaagaagagacgttaagcgatgaacgggaaattcttctttataagctcatgcaggagtatccgcaatttcaggtatttgaaggactgaagatttataccgagtttgattatcgggcggaacctttcctctggtatcaaatgaaaatcaccccatttaaaatttgtgtgaaggaggagaaatga

SEQ ID NO: 52686 - DNA, 747 bp, Sporosarcina globispora
atgagtgcagagacgatcaagaaagcatcagcggtatattttacactgttaaaagacaaagtaatcgacgaaaacagcgagcacttccaggcgtatttcgatcccgatgtgagacagacggttcttttattggcagatgaatctggcacctatatcattgagtcgccaaaacggattcagcttgttgtgcagccgaccggttctgtttttgcgacgaattttactcatatgaaggacaggcataagcaggttgaaacaaagaaacatttccacttgatgagcgtcgttattatgtcatttttggcaagcatcgaccgaaaccaggcggctaaaatccgtacgaagcgcgaagggattagcttctacacgctggagcggcaagtcaatgatgtgattatgaattgggatagcattcttaaaacaaagccggatttcggagaagatgaaaaaattgatatgaaggatgtcgtgacaacctggaagtacatggaggtcgacaccgacgactacggagctaagaaagccaatcgccggacgcgtatcggcctgattgcaagtgcaatgcgcttattggaaacagaaggcctaattgtgattctggaccgggaagatatcccaaaggcgattccgaaacaggagctatttgagcggattgaatacctgtatcatgattatgaccgctatgaaatgttcaaggaattaatgaagacagaggaggatctgcatgccgaaaatccatcgaattag

SEQ ID NO: 52687 - DNA, 4461 bp, Sporosarcina globispora
atgccgaaaatccatcgaattagaattgccggcctgaaatatgatggcatgcaaaaacaatacaaggacaccacatttaacttccataatgaagagacctccacaaatggcctcatttccatgatgaatggaggagggaaaggggtgttcctgcaaaccatcttccagattctcaagccaggaacatcgtggggcaaacagaacaaccgctattaccagcaattcttttttaataataaagagcaattcattccttatacctttcatgtgctcatccaatgggaacttgatggttctgaccgcaggcatttggtgacaggcggaatgttttctgctgagcagcggatttccatgaacgaagaaagcggagaaagcaatgcgcttgaacaggaagcgaaaattgtcccgaatatcacgttttatacaagggagtttgagcggaaagaagaagcttctcttgaccatattccgctctatgaagatggggaactggctgatactgaaggattgaaagattatttaaagtggaatgggtatgatgtttaccgggatacaaagaagcactaccgaatccttgatacatacggcattaaccgcaaagactgggatattatgaaagatattaataaggatgaaggcggcgttggaaagttctttgaaggcgctgaggatgatcattccctgtttcagaagcggattattcctactgtcagtcaggttctgcatcggacggagcatcaaaagaacgatctggtggagatttttaagagtcaggcaagtattgcgaaggacctgcccgttctgttaaaaagagagcaggcccataaggagttcctggaagatattcttccttttgaagaaagcctggtaaagggtgccgagcataaaaaaattgttgaggacagcatcaaggttgggagacagctgcttggtgctttggagcatttgaagaaaacggaagaagagaccctgcttgagctggaaaaggagatcgaaaaattaacgggcaagcaagtggatctgcgctttcaaaaagataacctcgagtatgcaaaagcccatcgcgaagtgctggattgggaaaagaaattagcggaagaacaaaagaaacatttaatcctgctggaagcggtgaaggaaaagcaggggcgaaaagacgagctggcttttcagctgttattgaaggaatggcatgaaggggaacaaagcatccgcgcactttcccagcagattgccaaactggagcaaaacagcggcttggaacaagtgaatcaaagaatggacgaaatcaaaagagaagccgtacagcagtgggaaaagtccaacactgctattagggaagccgttcagcattattccggatatcaaaagtttttaaagaaaaaagcaaatgacttgtctaagctggataaacaaaagactcaggagattgcccagcttcggacggaaattgattttctttatacacaattacatgaatttgaatcgaaagaagaaaatctagtcaaagagttcggcgaccgcttaacctatgatttacaaggctttatcgagaatcttaacaaacaaatagaaaccaaaagagttgctctgaatgatttgcaggctaaagaaaaacaatcgaatgaaaagcagaaccagcttgctgcttcacatggtacacttgctcaatccattcagttttccgaagaaaaatgtgaacagttaaagggcaaaactgaagatcagcatggaagagaagcgaggctggccgataaactgcacggactattggatgaagtcccagcccagttcacaaacgctcttttatcaaaatatgcactgcaagtggaagagctacttgttcagaatcgggagcagggggaagaaattaaaaaagcgctctgggaaacgcagctggattatgccttgaatgatgagcacttctggattgcaaacaatgatgtgaaagaactgaaggaatggatcgacgagaagacgggcattgatgtattttacgggtcccaatttctccaatccttaaaaccggacgaaatagcgaaccacttgctggcgcatccgcttcttccatacggtttagttgtcagcagaccgcaatgggaaaaaattaataagcaagtcctggcaggaagaatgtttaagagcccggttccgatttttatgcgggaggaaatgactgatgatcatcagcagggttcctttgtgatgatcaccggtactgagaaggacttgctgacggataaaaatcaatttacgaactggaaaattaagattgctaaacaaatagaagaaaagaaagatacacttgcagaactagaaaaaacggaaacgtctttgcgccgtattttaaaagaaatcgatcgtttactttccaatgaccttgccggtgatatcgaaaaagcactgaaacgggaacaggaagccctgctttccaaaaaaacagaattgcaggccatcatcgtgcaggaggaaaaagaaaaagaactgcagctgggaattagagaacagctggaaaagacgaaggggaaaattgaaaatcttacaaaaaatgtggaaacattagaggattttaaccatgaaaagacgctccagcaggagaataaacgggttaaacaggaaaaagagaaacaaaaggaagctttcaaaggtattcaaaaagagcttggaaacgagcatcaagccatcgttgacctgcaggaaaagtggagccaaacgtatttggaatggaagctatcagccgagcaaaatattaaggaaattagcttcttcatcgaaagtgcggcttttcctgctgctgagaaagcagaagcttctgaagaggttccgcgtttatcactatatatattagaagaaatcactggaagtattggggagctcaaacagctgcaaaaatcaaaagaggaacaagccagtgaactgctagcgattcaggcgacaagagaatccgagcaaaagcagcaaaagaagctggagaaaaaacttcaggcacttaacaacgaatggaaggaagcctcggaaccggatgaaccgatgagtattttagaaaaaatggtgcagacggctgcaaaggaatcaaaggcagcagagaaagaggaacgtgaacaggaaaaggctgtaaccgtagcagatacgtcattaaagcatgcgaaagctcagcgtgataagactgctaaaaaagtggccaagcatgataaacagcctgaagaatgggaagaacttgatctggaagtgaagacagtcgaaatcactgaccagaccaaacagacgaatacagaaataaagaaaacagaagagctcaaaaaagaaagcgaacaaagcattgctgattatgaaaataatcaattgcatctatctgttatcctaaaagaggaagcggcagcttttgcggatgaagatatagaaaaaattaaaagtcatggaaagcaaagcatcatttcctggagtgaaaaacatcagggtatccaggatgaaggccaggagaagcacgcaaaaattgaacaatccctgcgcaatctaaagctcaatattgaaggcaaggattgggaaatccgctttaaaaatgaagtcttaactacgcttgatcatatggatacaaggcattatgagcatattcaaaatgtggtccaaaaaatgaagcacttttcacaaagcggcttggagcagttggaacgcgacaaagagcgggcagagaaagcgcaaaacttctgggccagccgtgcaagcatgaaggtaatgagcatttcagaggcgattcgctcgatgattgccaagatgaaactgaaaaatgaaaggggttctttcccgctcgtccagctcaaagaagacatcctgcctaaaaaagcagaagatgtcgaacctttactgaaacagcatttcgtttcggccattaacaaaattacgaagcgattcgagatgatagatgacaataatctggagctagatcaggaaattaagcagcttatcagtgatgagcagattttatttgtctctctcagaaatcgttacccagagctgttagtttataacatgcgtacagacaatgccttcatgtacggaaaaccgcagcgggagcattattcaacctggcagacgatcaaccagggatcgaagacgaaatctgatggcagcggcggccaaaagctatctgcccgaatggtcatgatgatgatgcttctatccgttaagagtgaaactgaccaaagctgggttccgttagtctgtgataatccgtttggacaagcggcgtctgcccatgtgcttgacccgattttcgctgtagccgataaactgaagttccaatttattgttgtcactccgcctgaattggtgaaaacagagatcagccagaggttcgatgcctattataaattggacttcattcgggaaaaagggaaagagattgtgtcggatacgattgtacctgcgtttcggatttatcagggagaagaggttgttcaatag

SEQ ID NO: 52688 - DNA, 1074 bp, Sporosarcina globispora
gtgaacaaaattaacatcatcgaaacaagggtgagaagttttatagaagatattcagcaccctaagcaaaaaaagaaattaaatataaacgatttagaatttcagctgcggaggctactgaatgattactatgaaatggatggttattcgctgttttatggggccattcaatcattgcagggtgaagggcagctgacccctatacataacaatcaatacaatggcaggacaccgtctctgcctttattctactgggtaaacgtgaaagtccaggcagataagtgggatcggctcgagatgatgaagttaagtgatatgtttgatttttccttctatgaacgtcatccggaatggcagacgaaagaggaatggagccggatccagaatttatatgcttttctccaatctggccaagagcgggaaatcgtttcactcgaggaaagaagcctggagctgtttggtcatgaaaaattcttgcaggatggaattagttttcctgagggaaaaggctttttagcccgaattggcgtatcggaagagcagcttaaagtggtgaaatacggggagccttttgtgttttggatgaagcaagggaaagaaattaatgatgttcagagagtcctgattgtcgagaatctatcattctttcatacttgtattcaattattggaagctaatcagctcgattatgagcctgaactgattatttatggagaaggcactaaaattgaacggagcttttcgtttttctttaaaatttccccagctaaatcgcatctcttttactatgcaggagatcttgatgcggcaggatacgggatcatgactcggctgattgaaaaatatccggattgctgcattcagcctgcattgaagatttatcgtaaaatgctcgagtgtctggaccaaagaaatgaacagaaatcaggccagcttcaaaatcttaaataccgcgaaacgttctttgattggtttacggaagaagagcgggaactattaatgcaattatggcaggaaaataaacggattcctcaggaagtcttaacaattgaaacatggaggagatggatgtga

SEQ ID NO: 52689 - DNA, 1413 bp, Lysinibacillus sp. FJAT-14745
gtggataaaatggatgtaaaagtaccgatttcgatttttacaagcgattatcaaactgcagaatttatgaaatcgatgcgggatttagcatcgttagcaggtgtgttaaaagaattaagtaccgaaaaaatgtacgattccccaatcgaaattattcgttttttaaatgtcattcagttaattaacgaagcatctctcggcattaaagattccatcgataacgaggaaatactgtactatcgatatcagtctacgtattcacaagacaataaaccgccaacattagcgcaaattacaagaatgctcacgattttagagcgcaataattggatcataaaacagagtcgtcaaattaaaatgcgtgaccgtgggaaaaatttaatggatgggttgattcgcatgggtaacgatgcgcttgcctattatttgcaagatgatattggacgctcgctatttcaagcaagacgagatgctgaaataagcgctgcctacgacgatcaagggatttcaggaggcaataaaatcgcatcgatgatttacaacgttgaagaggcgattaagcaattagaggaacgccagcttgaacttcttgctgatcgcaatgccttaccgcagctggaaaaaattaatcaactaatgcttgagcttgaaacaaaattaaatgaacgcttacaacagtttggtaccgtcgaagaaagtacgaaaatgagcgatttaatgcgtcgcggaacggctgccatttcaaaagggacatctcttagcttgagcttactgacaaaatatattcgctttgtcaatatgcagctcacacctactgctgacaccatttcaccagaaaaggtgcgccagtttattttggcgatgcattcacctgaagctaatacgaatatcccaacagcgcatgatattttaagttttatggaacaaaatcaatatgaacaagaagcgatggatggcctgtgggtccctgtaaaatttgccgcaccgattggcccgcaagatattacagatgctgtatattatttacaaacgtatgaaccgaagctagaaaagccgatgtctcatcagcttgagcatgaatatgaagagaccgaaatggatgttcgtcctataaaagaagcattgcaggatgcttcatggaaaatgacgcaatctctgattgataccgaacgaattgaaaattatttaaccgagcatggtgaaacggaaatggaagagctcattgtggaatcgagttcaaacaaatggcatgatgcgattctttcattattagccgtatcggcactaacgagtaacaataaggtagaacaacagcctatcgagcaagcgaaggactatgaaaaacaatgggagtggatagacgatgatgacaaacgatataccgttcgacaatacccttatgatgatgaatag

SEQ ID NO: 52690 - DNA, 672 bp, Lysinibacillus sp. FJAT-14745
atgatgacaaacgatataccgttcgacaatacccttatgatgatgaatagcttaaagggctatctaacgaccgaagaggaattagcgtttatgcagttattattttcttcatctgcatcgattaaaggggcaaattacggtttagcaaagaaggatttagcaaagatgctaggcattaataatggagatgatgaagcttttcattcatttatcaatcgtttaaatgctgcgttaagtcgctatttccgtgtcatttacgatgcacgtcgggaccgcgtcattgtcatgatgcatgtaaccgcaaaacatgcgaaatcaacattaagcagtgaagcgctcgcaattatgctgtatttgttttatcaccaagaggtactcgggcatgaatttacgctcttgcatcaaatcctggttgattttggacatgaatcattgaacgccaaccgcaaattgaaaaataatatcgaccaactgaaaaaaattggcgcggttacagattacgaatccgttactgaagaggcatttatgttaacagctataggagtacatatgttttcggagtcatttttacgacgaacaactgaatttgcccaggaaacacagcttagtaaagaagaagtaatgaagtttttcaatcgttataacttacatattgaggaggaaaacgaatga

SEQ ID NO: 52691 - DNA, 3198 bp, Lysinibacillus sp. FJAT-14745
atgattccgtataaattaaaaattcaaggcgttcgcgactactcaccacgcagcatttattttggggaaccagacgagcatattttaattactggtccaaatggtgtgggaaaatcgacattaacattttgccttggtgccgtgctacattcatcgaaggtagaactagagggacttcgttcaacaaatttaaaagtaaatgacccttggtatgcacgtattacactcgtatttttaaatgatggcaggacgaaaattgatggtccaaaattcattgcctttcagctaacggtcaatcaagatacgaaaaatagcccgattcagcgcgagtacgaggtgttaaatgggccagacgaagcgaacttaacatctcatgcccgctatgcgtctggtgggacagcgggacgtacattcaaggcgtatcgtgaagatttgcgcgtgcgctataaaattgaaccagatgttttttatctaatttggtatcagcaagaagtcaatcaatttgcggcgatgtacccggaagagcgttttcgcaaatttagtgacatgttcgagatttctgatatgcaaaaggaatgggaagcttcattagaaaaaattaaagaagttcgtatggaaattgaatatttaaagggtattcaaaaaggtgcagagctaagtgtgaatgcggctcaaaccgagctcaataaatatttggataacaaaaaacgtattttcacatctggccagaaatattatacgttgctccatcaaatgatcgcgtattatagtacttcgattgaaaaggcgtctgagcaaaaagctaattatcaagtggaaaaggaaaaactagttgtttcgcggcaacaattaaagcataacattagtggactagagcaacaaagatcacaattgtcacaggatgttgcggcattgtcacagcaattaacccaaatagccgatcagctacaacaacagcaaaatgaagatacacaacaacaaaaatcgcagcagcagttagaacagcagcttgaagctattgatgaaaagagaaagcatttacgctttgatgccgaaacggcacaacgtaagctagaagaaacaaaaaatcaattagagatggttacaaatcaattaggtgagctcagtaatcagcaaacgcaactgcgcaagcaagaacgcgagctcgatcatgaaaaagtccttttacaaatgacttcatcgcagctaaaagatcaaatcacaaaggcagaaaagcacaaggcaatctatgtaagcagtgtgcaaatcgagcaaaaaattaataccttatcgctgcaaaatgaacgggattttgaacagatacagcgtcttaaaatggaactaaaaatgatggaacaaaacgttaaacagtatgagcaaaaaaaggttgtatcaaaacgccagcagcaaggactactgcatttaaagcggcagcaactagaagcgtacccgttacgtgagttaatagagctcacgccgtctgctcctttgcagttagaaaagcaacttgaggggattaaatatactattttttatgtagggaaaaactataagccagtcaatgatttatattacgtatcacttcagcaacttgtgccgacagaaagtatctcgaagctaccggagtacggcttacaaattcgtagtgatttaactgaacagcaggggaattatgcaaataaagcgctttggtgggtgaagcaatttttcttagagagtccgaaaatcgagcaaggcttattatatgatacgcgtggtattcgcggtgcacaggaagcggcgcaatatattttaagtgatgtggcgattgaaaggctattgcaggaagtacaacagacatattcaaaaacaaagaacgagcagcaacaattagaacaacaatacgcagaaaatcagcgacagttgaaacagctacaaggccatcttcatacgatgcaattagccgaaagtacactattgaagcaaacggattatgcatcttatattcagcagcttgaactagtcgaacaaaaattgtcagcactttatgatgagcaaacggcaattgaatttcaacaagacaagctaaaaagcgagcatagtgaaggaaagtataatctggatttttatgagcaacaatggaaaattcatgaggagctcggcgcatttgcagagcagcaaatgcaactacaacagattgagcaggcaagaaaatacttgcaacaaaacattcgagcgcttacaacagagcaagagataaaagaaaatgaaattactcaacaaaaacgaaagcaattacgactaggtgaacagcaacaacaattctacagcgatttgaaaatagtcgaaagtcaaataacaggttatgagttaacgattaaaaaggcaaaggaaaagctagaattggatgaaacgatgaaaagtcgctgtgagcttgatatgattgaacttgaacaggtgctgccgcaagaagcacagcaactagacgatcaactcgcaacgaacttgtcactgacgatgctacaggctgaaagcgaacaagcaaaagctgagctacgcaatgcccgcttagaaaaaattaacgaaaatgcccagcaaaattacgatcaacaaaaggctgatttcgataagaaaaatactgatttagcgaaatcagagcaactccttgaaagcaatacaattcgtgcaaatgagttggaagaccgcttagaaaccacgatttcaatgcacttaatcaaaatcaatacacttttccaaaaatatatggatttgttccagtttgaaggacaagtggaaaaggaacgcattgaagaaaaatcaggtcgtgtcaatttccgactgtatattaaagcgcgtaaaattgggcatcagggtgcacttgaagatgtgagtatgaaggctcgtagtggaaaggtggggctaggtgtatcgggtggggaggaatcactaagttcacttcttttcgcactcgcgctactgcaaaacttagctacctcaccaggctatatcgtgctcgatgagtttgatagcgcattagatgatgagcgaaaaaataaggtatttaatctttatgccgaggagctgcaacgtaaactgattattgtgtcgccaaagggacatgatgaaacgtattacaactgtttctcgaaagtattcattgttgagcatgatgcaacgattccgaaaagtacgattcgagggatacagaataagaagtga

SEQ ID NO: 52692 - DNA, 1512 bp, Bacillus sp. FJAT-18017
atggaagttaatgaaattgcagacattacatcgggattcaaagagcgaatgcgtcgtcttgcgctctttgaccctttatatgaactagagcggaaaaaagttaaggaccagctcgatgaacctatcgatatgaaggggcttggactcctttcactgctgtttttctttgaacaaaaaatcataaggagtacgaaagcgggtacgaaggatttggctctcttcctgcaacagttgacagcacggcaatacactctagactttcaggcatgtgaagaaatcgcctcatcaattattttgacattcagaccgacctcaggaaaaaagcgctcctactccttctttgactgggaactttcacgggaagaggatctcgagtactccctactcaaggcaaataactttgattctaaaacaaacactcaatattacacgctagatgaggatggccttgaactcatttttgccacaaaagaattctatagcgagttccagctttcaattaaccagcttatgcttaggaagcaattggagaagggtgaattccggggagcattgcgccagattaatgagatgcggattgacgtggagtcgctgaatgaacgaatggtgaaactccgctatgagattcagcggagtattgtatccgaggatacatatgaacgttataagcagctcctggaagatatccatgcccgcttggagcgggaaaacgaggaatttaccgaattgcgccaatttgtcaaagaaacaaaagaccgcctttacgagaaagactatcacaaaaaagaagcgagaacatatgctttcgtcctggaaatcacgaatcagctagaagaggtccactatgaacattcaaggctgctagagcaaagtattgagcttaagaatcatacgttaaaggctgctcaggaatccctgtattatacgggtattgatgcatttaactttgatcaggacatcaacgcgagactgatatccaccccgctccccttggaggttatgaaggggctcctccatccattcttgcgagttcatcaggagaagtcatggtcccctcttaccctttttgccgagcagaacatccgggaagatcgcgaagagtctgttgaaatgggatttatggaactgggtgaccaaacagaaaacgattatcaagagaaactccgaaaaaattatggcacaatcatgaagcttacactcgaagcgctggatgaaggaattactgaactttccggcatccttggctacattcgtaaaaaggaacagaacttattgaataagcggtttttctacgacttctggctaatactccatcaacgctcaccaatcacaaaagggaaagttgagagtgaagaagaaggttcaaataatagtctggatgatgccatggcggttttgggcagccggacattggttgtattagagcgggatgaaacactgcatgtgacagaacgtttttcaatacaggaaatggaatttgcaatgatggaggggttggaggatgaattatag

SEQ ID NO: 52693 - DNA, 744 bp, Bacillus sp. FJAT-18017
atgaattatagtgaaagcaaagtgatgcagacttttgaactatatatggttctagcgcgtgacggacacgggggcttcgaattcctttctttatacatagcagatgatgatattagggcgcttgtggatggcttcgcacataaagtggattgtgtagttgtccctgccggagaaaaaatgtacatgattccgaagacgaagctgtctccattccatgtgaacaatgactatataaagaggacttacttaagatccggtgcgacaaatgcagatctttatcttctatattttgcttcaattgtcttgtttggtgctttttatgacagttatcagactctggagccgaccagggattttcttcagcttgatgaatgggcaaggctggttcatgagcggattgaaatgctgaaggaactggacatggaaaagttgaaacaacatgaacaagagttttcctataattggggacagattgtagacaaatgggaagatatgaatgatatcaaggaaagtgccaagaagcagagaggaaacacaatcagccgcctaagtttcatggataatgcaaaacgtttcctgcatgcccaggagctgattgaagaaatcggtaacaatgagatggttttgacagaaaaagcaaaagcaattgtgcagcgtttctttatggaagtagaattcaacaaaggaattctagaatttatttatcagtgggaggaggagacggaatatgccgaccatcagtaa

SEQ ID NO: 52694 - DNA, 4413 bp, Bacillus sp. FJAT-18017
atgccgaccatcagtaaaatccgattcacgaatgttatctatgaagatggaatgaagcgctataatgatgaaacctttaagtttgatggatacaacggagccattctactggaaaatggaggcggaaagacagtcttcatccaaacagcgctgcaggcggttatcccgcacacaagcctagctgaccggaaaataaagcagacactgcagctcgataattacccggcgcatattgcaattgaatggatactctcggaatcgccccgacagtaccttgtaacgtgtgtgagcctttatctaacgaaagatgggcttgattcttaccgttatgtgtatgagtacatggctggagacaaacatggtatagacaatatcccgtttgttaggaaagagtccaaccggccttcagatcgaggggagatttccgactattattttagcatggcccaacagtatatgaatgctcacacctttccaacgattaaaggttttcagcagcatattgagaaacagtaccacattattccagttgagtgggaaagcattgtaaaaatcaacagtaccgaaggaggagtcgaagcgttttttgatgaatgcaagcaaacgaatcaactgtttgaccgcctattgattccgacagttgaagaagcaattgcagggcacaattcgacaaccttcgctgatacttttgaaaagcaccgggccagcttcaaactgtataaagaattgaaggagcaaatcgaggaaaataaagcaattggagaacagttaaatcgctatgcctcgacatatgaaggcctattttcaagacagcaggaatacgaacaagtaaagggccgggctaaagcaatccttgagaaaattaaattacaggatgaaaattcaaagcaggaacttcaaaacttaatccataaaatgaagatatgggaagaggaagaaacagagagtaagaaaaagcatctatcccttgaattgtataaagataggctttttttgaaggagattgaggcagagtggaaagaggctaaatatcgactttcacttggcgagggatcattggacgccgctaagaaacaatttcactctcttaagcttgcacaattgaaaaaggaatggaaagaagctggggaagctctggatttccataaagggaaattgacactgctcgaccagaatgaagatattcaggacattaatgatcgactggatgaaaatagtagggaactaaaggggtattttgagcaagaagttgaagaagtgcttaagcaaatacgagacttaaaactggaaatgaagccgatagaggatgcaattgggcagattgataaggacatgctggttcagcaggagatgctggggagaacgaatacaactcttgataaaaatgccggagccatggaaatcatggaatcccagatgaacaagataaagcaacagatactttctaagccaaacgaggaatctgttagagagaacttgccgaaatgggaacagcgtctcgtgtatttggataaagagattgttcagctgaaaaatgagaataagaggattgcagggttgctgatagagcaaagaaacaagcaggaaaggctagagtcggagaaaaataatcttggggaaactcataacttactaaaacaagaagtagagagggctgacttagcccaagagaaaatgaagggtgtactggcagggctttatccacaatggacactaatggattccctttacttgaagcaagaatcaattcttcgccaagtagaagatgagcttgttcggttggagagggagcgggaaacaagccttttcagagagcggattgcctttaggagaatcgatgactacggtgaacagaatgtgttttttgcagaccctttccttgagaagcagctgaggaagtggactggccaatttggttttttgatgactggggtacaatttatccaatcacttgaacagcctgacagagaagtagcagggagatatcctttctggccggcagccttggtgacaagagcagcggatctggacaaagtggtttccaaaattcagtcaatcgaacagcagcttcaggtcccaatccatgtgctgtcaattgagcaggcaggaggcttcattcgtggggaaataccggatatgaatgtagtggaacctgaccattggaggcataatgggcagattgatgtttttcaagagtggaaacgagcaataaggagccatgccgagaatgcaagacaagctcggcttgaaatagaacggcatattcagaaatggaagaatgctgaggacaagctattggcatttctccatgagtattcctatgaacatctgcaaggtcaaaagaaccaattgaacgaattatcccaaatgatacagcacctggaggttcaactaagggaaacccgtgcatttatttccgaaaatgagaaccgtctgaaaacccaggaagagaagattaaggtatacactgatgaattgaatgggctggaagggaagttgagtcaagccagggattaccttcatactgagcaagaacgggataaactcgctagccagcaggagcgactttcagaggaaaagataggatatgaacgcttgcttaatcggtacaaagagcaaagagaaggattaatagaagagctagagattaaacgagatgaagcaaaagaagctgccgggtatcatacccgcttgatagacgatttaatattccaagaagtgaaaactgcacaagctttgtatactggtaagtcaaagaggattttacaagaagaacgggatgaactgaagcttcaactgcgccagatatctagctcacggaatgagattgagcttaaagtcatccaggtagaaaaggatattacacgatgtttaaaaggaatggatgatataaggcttgagaatggcagtctggatgaagaactcgtttttccaccgaatgggaatgaacgaattgttgcattacgcaaccggatcaaggagcttgaactgtctgttaaacaggaaaaagagaattatgacgcccaaaatactcggaaaataaagcaggagacagctgttgagagtgctttaaataaattcgaacaggcctttccgctgggggtgcccctgagttttgaaggaaacgtgaaggaaacggagtcaaaactgaaggaagagaacaggcaattgaaggaacggagggctttcttaaaacaggaagaagtgcgtgttcagggcgaactgacttctcttgagaatgctttccaccaattggatcgatttgaagaggcgcatcatttcaaaggtccttctgtccaagctgcagtattgagtgaaaatgagcttcaagcatttgcgtacgaacgtcctgcgtttataaaagaagcgactgatcagctcgtcaaggtgaagaatcttgtaggaatcgagtgggaaagagttggtaaggcgaaagatgcattcatgacgttttgtaagaacaaaatcagcaacgtcaaattgcgagaaatggctaggcaaggaattgacagcaagaagacctatcaggaagtgcttgaattccaggggcatatgcaaaaacggattcaaacagccataaaatacaatgaagctactatcatcgaccacgatagacagcttgagcaatttgtcactcatatcaacagccatttacttactattgcagaagaactttctatcattcctaaaaagacgaaagtcaaagtggatgacaagtggaaggaagtcttccatttctccattccggaatggacacgagaagagggaaaaagcagaattcgcaagcacgttgaatggattttggagcagcttgattcagatagatatttgaatacggatggagctgaagattatggcaaggtgcgtaaggaaattgaaacatggacccattctaagcaattgttgcggattgtcatgaacaatgaaagcatgaaagtgacgtgccggaaagtaacgaatgataaccaggtcactacccggtcctactcctgggaacagactaatgcatggtcaggcggagagaagtggagtaagaatatgacactgttcctcggcattctcaactatgtatctgaaaagcgccaacactcagtaaccaaagcaaagcgccaccgggtggtcatcatggataatccattcggaaaagcatcaagcgaccatgttctgaatccggtcttctttattgccgagcagctcggatttcagattattgcactcacagcgcacgcagaaggaaaattcctgcgcgactacttcccggtcatctacagctgccgccttcggaaagcagctgactcaaacaaacaaatcatgaccaaagtcaaacagcttcaccaagcctattttcaggaccacgaaccccaggcattggagaggctgggagaaatggagcagatggagttgttttcctaa

SEQ ID NO: 52695 - DNA, 1020 bp, Bacillus sp. FJAT-18017
gtgaagaatgcaataaggaataagctaacaggctatcggaggaagacgattgaattgtccgagttggaagcaatgctagacaatataaatttgccgtatgatcaattcgccagtttgattctctctcttgaagtagatggcgtaatagaaatggtgagggctaaaggaagaaatacaagaaatccttctcttgcctatacataccgaattcacgcccaccgcttgaaacaggacctgcataacgaactaataaaataccggttgctcttgcactcttcgattcaactggatacatatttctcaggagagccctcagtttgggaggatgaccttccgtacataatgaagattcatagatatatagaagaaaatgggtttcccgaatacgaagcgcccgcaccggagcgcagtgttgatcttgtcggggatgagaagtggataaccgacaagcacggggaagaattgttgaagcgtatcgggctctggacacatatgaaagtgattccagtagcagacccattaatgtatgccataaatcccaaagccctttgccgggaaaaacaactgcacttaattgttgaaaataagaccactttccagggcctgttggacgcactgccaatgacaatgtttacaaccctgatttatggaagcggaaacaagataatcaaaagcattgagcaatttgatcggcagctgccattgcctgatgccgagcatattttttattattttggcgacattgaccgttctgggatatttatttggtacatccttaaccaaaaagtcccagtccagctttatatgccattttacacagcttgtatgacaaaaggatctttgctcggaaaaacaaatcaacgttctgacaaggaagcaattgagcaattcttatctttcttttcaaaagaagaggaaatccgcctccaagccatcctggataacggccagtatttcccacaggaagttttaaggaccaacgagttgcaggagatttggaggcagcaccatggaagttaa

SEQ ID NO: 52696 - DNA, 1416 bp, Bacillus decisifrondis
atggatacagtaaagcgtgcgccaatctctatttttaatgttgaatcaaacacagctgagcttaaaacatcaatgcgtgatattgcatcattggctggagtattaaacgagttagggagccagcaaatttatgaatcaccacttgaaattttacggtttctgaatacgattcagcttttatatgaagagtctttagggttagcaggcgtgattgaggatacagaaatgctgtattatcgctatcgcaatacatatattgatgatgccccaccaaccattaaacaacttgaacacttaatttacattttgtcacgtaatagctggctcacaaagcaaacgcgtcaaataaaattattagaccgtggtaaacggatgatggatgcacttattcgacttgcgaacgattcattagcttattatttacaggatgatattgggcgttcactcttccaagcacgacgagatgcggagctcagtgcagcctatgatgataatggcatttcaggaggcaataaaattgcatctatgattcacaatgttgaagatgctattcaaaaactggaacttcgtcaattagaattttttgcagatcgaaatgctttgccacagcttgaaattatccatcagctaatgcaggaacttgaaataaaaatgcaagagcgacttagtcagttccgaacagtagaagagagcttagtaatgagtgaattagtacaacgtgggacagctgttttatcaaagggaacagcgcttagtctaggaatgcttacgaaatatattcgctttgtaacgatgcaggatacgcctctctctgattcgatttcaccagaaaagatacgtacatttatagtaaatatgtataacccaccaatcgattcaaatatcccaaatgcgtatgatttatttagttttatggaacaggcacagtatgaggacgaggaacttgacggtatttggatgccaattaaatttgctgctccaataggtgggcaagatattgatgatgctattcactatttagaaacctatgaaccaaaagtgaatgatccaattgagactgaggcggaaatcgattttgaagaaacaattgttgaaggtgaatctgttcaacaattgtttgatgatgcagcttggcaaatgacgaaggcagttattaatacggatatcatcgaacattacttagacgtacacggtgaaagtgagctagaggaagtgatgattgaatcaagctctgcggaatggggagatgcaattcgttcccttctagctgtatcagctttaacgagtaagcaaaaggtaaatatgaaggaagtattggacacaaaacaattcgataaacgatgggagtgggtagaagatgacgacagacgatttacattacaacgacataaacgcacaactcgcgacaatgagtaa

SEQ ID NO: 52697 - DNA, 681 bp, Bacillus decisifrondis
atgacgacagacgatttacattacaacgacataaacgcacaactcgcgacaatgagtaatttacgtgcctacttatcggcggaggaagagctagcattcatgcagttattattttcatcctctgcaagtgtactaggcagtaattatggtttaagacgcaaggatctggaaaagctattaaacataaaaaatgatgacaaggctttctattcttttattgaacgtgtaaatgcagcagtgcatcgctattttcgtgtaatttatgatgaaaaaagaacacgtgtgatcgttatgatgcgagtttctgcaaaggatgcaaagtcgacattaagcaaagaggcacttgccattttactgtatatgttttatcagcaggaagtactaaatcatgaatatacattagtacagcaaatattaacagattttggacatgagctgttaaatgcgagtgctaaattactgaaaaatatcgaccaactgaaaaaaatcggtgcagtagaagaaaatgaaatttcaaaaaatgaaaaagcttactcgttaacagcgattggtgttcatatattttccgactcgtttttacgaagaacagccgaatttgctcaatccactcagttgaataaagaagaagtattgaaatttttcaaacgctataatctgtatattcgggaggatgcactatga

SEQ ID NO: 52698 - DNA, 3207 bp, Bacillus decisifrondis
atgattccctatcgtctgcagtttagtggtatacgtgactataaaccgacgcgcatcgtgtttggtgaagctgatgatcatattctaatcaccggaccaaatggaacaggaaaatcaactatttcattttgcatgggagcggtactatattcgtcaaaaatcgatttagagggcttgcgttctaataatttaccaagtaatcaaaaatggaaagcgatggcggagctaacctttaaaaatgaagggccttctcggattgacgcagcaccttttgtttcatttcgtttagtgattgagcaggatgcaaatcgaggcgcattacagcgtgaatatcaagtcctaacaggagaaacagaggatgcattgacggtcagtgatatttatcgttcaggtgatgtaaaccaacgtaattttacaacatataaagaagatttacagtttaaatataaaattgattcagatttattttatttaatttggtatcagcaagaagtgaatcagtttgctgtgatggcgcccgaagagcgttttcgtcgatttagtgaaatgcataatattactgaaattcagcaatcgtgggaaacggcaattgaaggtgttaaagagttggaacaagaattggcagctgcaaagacagttgttaagcaggctgaatttaatttgaaattagcaaaagaagaatttgatcgtttgaaaaataataaggctcgtttatatgatgcaggaaaagcacatatcctctataccatgacactagtccaattatacaacaatcaaaagcaagaacttaaagaaaaacaaaagaagcacacagacattcatcaagatacagaagaaaaaataatacaaataaagaaacaaatcgaaaaagcaaagctcctattacaagagcttcataaaaagcaactgaaaatggacgaggaaaagcgttcaaagtcaacattgcttgagcagttattcaagaaacgagagactctgattgcgacagagcaggaattaaaggcgcagcttgttcatacagaagaacagcgtaaacagcttcgttttacagaggatgtaacaaaagcgaatttcaatgatgcacagcaaaaactagctataattgaacggcaatataaacaattacagcagcaattaataaatttgactgtgcaaaaggatgagcttaatgaaaatcgtttaacccttaaatgggagctagaggaaatcgaaaaagcggaacaggaagcaatcgcactcctagcagagcatacgagtgctcaccaagtacaacaaaaaattacacatcttgaacagcaaattcaggattattataagaaaaaagtttcgttagagcaggcacttgaaaatacaacaattgaaattacccaacgtgaaaacaatcaaatatattctgctcgtcaattagcgggcttacaacaattcaagcaacgagatatcccggcttatacattccgagacttagtgacgttagcagaaggtgccacaatagagcatgaaaatcgtttaaattcaattaaatataccattttctatgatgcaaaagtgaaagtagcgttcaatgatgtgtatcatgtgtcattgcgttcaattgtaccagagcgcttcaccactagtttaccagcgcaaaaattagttgttcgacaaggattatcggaaacagaacaaaattttgccgtaaaagcattatggtgggtgcagcaatttttcgacatgcaagcacctaaaatcgaaggcgatttattagtagacgagagtggctatcgaggtgcacaagaaaaaaatacagttattttaaatgataaaatgctgacagagcagttacacaaaatgcgcaagcaaagaacgcagcttgaagtgcagttaacagcagcgacaacacaatttaaagaaaatcaactcaacttgcaaaagctaaatagtattattaaggatgtgcagaaggcagaagcaagtgttgtagatgccgaatttaagcatcataagctacagtacaaagcaaagctggacgagcagtttgtagcgcttcagaagcaagaaatccagatgacaacagctctacaaaacgagcaagagaaaaaaatagccatccaatttgaattagaaaaactaaaagccgagctaggtatttatgaacagcttggggctttaaagaaagtgcaagaacagcttgctaaaacgaaatcagagttaacagaaatgaatcgtactattgatgaatcaaatagcacagttaaccaattgaaggaagagagctacaagcttcatgatgtttgtagacagaaggaaagtgatattcgatcgcttaagcgtgatttaacagatgcggaaaatgatgtgcaaggtacgaaaaagatgcttgtcaaatatcaggaagaattcgaagtggcagaggcctctattttgcaagaacaactttgtttggaagagctagcaacaattattccagatatttttgctgaagtacaagaagtgcctctagtaataaatagcactgtgacaaagctgaaaaatgataataccacagcccgtatcaactttgagaatgcgcgagctgaaaaagtgaatccagaggcggagcgtaattatattgcggtaaaagatgactttgacataaaaaaagagacagtagatcaaacacaggaatacttagaaatccacagaaatcgagcattagaaaatgagaatcgtcttgaaacgaccatcaatatgaatgttcttaaaattaataatttattttcgaaatatatggatgaattccaatttgaaggaaaaattgaatatgaacgttttgaagataaaaaaggtcgtacgatttttaaattgtatattaaagcacggaaaataggtcatagtggccgtttagaagatgttggcacaaaggccagacatggtaagcttggaaaaggtgtgtcaggcggagaagaatcattaagctcactattatttgcactagctttgctacaaaatttaaatacttcaccgagcttcatcgtcctagatgagtttgatagtgcattagatgaggagcggaaagaaaaagtgtttgatttatatgtaaacgaattacaacgcaagcttattattttatctcctaaggcacatgatgaccattattataataaattttcaactgttgtcgtcgtcgagcacgattcagcagttccaattagtcgtacaaaaacgattcgattgctcacgcattag

SEQ ID NO: 52699 - DNA, 1239 bp, Bacillus decisifrondis
atgatagaacaatttttggcttctaattttgtcaaaaatagggagcaccttgaagtacctccaaaatatattaccgatacaattaagcagtatacggtagcgaaacaaactgcacgaacataccgcaatgtatcgtttttaaaggttggtcaactaacaaaaacaatgccgccgcaagggctattgaactataaattcacaaaaaatgcaaagcggaaactgtcagaagatttttctacaattcagagctggattacggaaggctggattatagaggaaattgttttcgcgcaagatggacgtaccgcaaaagcaatccattaccggattggaccaagtttaaagtactattttgatgcacagaacgagcagcagacgcaaaagttagaaaattatgcattgcagttacaaaaaagtgcggacatacagccaatagaagaacttcaacaagttgtacaacaattaaatgaacttgtagcaatgcccattgaaaaattaacacatacgacacagttattgtcccattggtcgattgaaaaacgattacgttttttacatttttcaatcggctttttccaattggcaaataaaggcgtactgtttgattttaaagaaataggtgcaacgctttttgataagattggtggctcaaaagttttcgaccgtgagcaaaaagaatttattgaagagctagaacgtgttttctctattcaaacaagcgattgcggtttaattagtttagggaaaattacaccagtcttttttgcaggtgagttaacggggacatttagccaatatcaacaaggtgttattcatgcattaaccgatgatgctattttaaaggatacatataaaacggaggctagtattatttggcttgttgaaaatagggcaatcctcacacgaatggcgaaggaaactagctttttacagtgtacaaatgcctttattttatgcttagatggtcaaataagatctgcgcataaaatgttgattcgtcaactagtcaccacacaaacagtaattatttggacagattttgatgttgcaggcttaacaatagctaagcatgcagtacaaatgattaatacaccgtataaaatcattgctagggacaatcggactttttctgatatcgaagcctataaaaaatggctacttggcgaacttgaaatagctgagcacgaacaagagcagcaattaggagatgtagaacaatggatgaaatggatacagtaa

SEQ ID NO: 52700 - DNA, 1497 bp, Streptomyces sp. NRRL F-2295
atgaatgatcacgggggcgatcggaaggcgtgggccgacgaagggctcacacgcaggctcaaggccctcgcctgcacggcccccttgcatgacctcgacattcgcaaggcgaaactgccatggctagtcggcgctcaataccagatggcggaggtggctctgcagatcattgatcatgtggcgatcgcgatggactacgacacaggggcgaatcacgaacaggtcctgctccgggccgggggttttgtcggctggcaggagcctgagcgtccggccgacgagcacatacgggtcgccggatgggtgctcgactccttgatcaacgtgcgagaggcggacagaggcttccgccgcttctacggggaagtggacggcgcgggcgcatacgcgttgcggaagtgggacttcaagctgatcgaagagcgttcggacagcaacggggacctgtatctgcgtgcttccaacgaggcgttgaacgttctggtcggtgcgctggacacagatgtggaatcggctcagatagccgccgaagtgaggttgcgcaacctcatcggcagggggcggttggccgacgcgaaggccgtggccgagcaggcccgtatccgcactattcagtatgcggagatcattcgctcccaactcgacgccacaagccgcaatgtgactacggtggactggacggacgagataccggacctcctcaacgaggctctggaccacgtcgaccaccggctccaggaagagtccgcgatcgcccggtccgtttctaccgaacgtgaccagtccgaggacccggtccgcaggagacaggccgccgacctcgtagacattttggatgactgcgttcgccggcacacccggctccagacccgtttgcgcggcgctcgcacgctcttcctcgacgaacaggaccgccaacagttctcaggcaccgccctcagagctccggtggatgtgtacggcgacctccttcaaccggtgctcgggctcacgttggccgatgcttctagtccggtgtcgtccttctatgagcagtctgtggggccgacggttgatgaccagttctgtctggccactttggtacccgcgttgcttgctccgtcacccgaacgagcccggttcacgggcgaggatgaggaaccggagctcgtcccggttgtcgaagtgggcgggtacaccgacgagcagcagcgcgtggccgagtccctgcttgatctgaccgacgaggcacggtcgttgtccgagttgctggaggaagctgcctcaatcgatccggaactcccggacctactcgtcttgttggcgttgcgggccttcagcccgcagttgggggcggcgttgagcgaggaggccgaccgcgtcctactcgccgtatcggtaggaatccccttggatagtcaagggttcgagggcgatgacctgttgctgacgtctgcggcgttcgaccgagcggctctggacgccgaccggctggagaggaacagcggacgatcatga

SEQ ID NO: 52701 - DNA, 4467 bp, Streptomyces sp. NRRL F-2295
atgtacgagctgtcccgcgtccggttgagaacagtcggaccggccggtgcccgctttcacgacgtcatcctggaccttagtggcgcgggtcgcccggtgggcgccgagcaagaagccctcttcgacaccgccgtcacgacccgccgaccctcgcccgccagcctgatcctgctggagaacgggggcggtaagtctgttctcctcaagctcgtcttctccgtcgttcttcccggacgtcgccacaccgtgggcacgactaacacgcgcgtcctagagaagtttgtcatgcccaaggacgtatcccacatcgttctggagtggatgaaccccctcaccggggaactgctgctcaccggcaaggtgctggcctggcgcaaccagatcgcctccgaagtcgccgacaacctgcgcgaacgctggtactgcctgcagcccagtgacgagatccatctgagcaccctcccgatggcggttggtgcgaagtcctgcactctggacacataccgggacgagctccaggaggcatacgcggccgaccagagcctggccctgtactggacacggcatcagcgcgactggacgaaccggcttcagctgctcgagctcgatcccgaactcttccgatatcagcgggagatgaacgtagacgaaggcgaagcagcgaactggctcaagcttgattcggacgtgaagttcgtcgatttcctgctgcgggcgatcgtcaagtccgatgagatggacgacctggcggcactggtcaccgaacatgtggagcggctcgccggccgtggattgcttctcaccgagcaggagtttgtcgcaggcgcgatcgatctcctgagtccgatcgctcagcaggccgaagctgcgcggtggtcgcggcgccgagcggagcaggccgcacgtgacgtcgcggaattgggtcgacgacttcgggtacgtgcgcgaaacgagcacgacgtagtgctcgggcggcgagcaaagcttgccaagtcgcaagaggaacttgatgagctgacccgtgaggctgaacgcgccaaggccgttgccgctgaattgcggcgctacttggccgacttgaagcatcaggcggctcagcgggagcttaggacaagggagcaggcgctgtcccgggcgcgagccctcgtcgaagcatggcgagaaacttcgaccgtgcatgagtacgacgacagcatcgcgcaggtcaaggcgctgaccgatctcatcggcgccgaggaggagaaggcgcgtcccgcactgaaagagcgcgatgacgcggcccgccgccttgcgcgcagcctgtgggcgacggctgacgaggctgcccagaccgcctccgacgagctgaagcaggtttcgacgctggagagggagaagagcgcggcgcaagagcgtgcccgccgtgcgtaccgggacgccacgacggccgaacatgaggccgccaaattcgaccagttggtcacacgtctgcgcgaggacattgaggcagcagtcactgacggtctgctgcatgacgccgccgcgctctcccggaccgtggagaccgtccaggaggaacgcgtcaacgcagcccagcgcgtcacagacctggagcgagaatgggcggagctcgcagacagagaggccctcgcgcaggacgagttgcggaaggccgagtcggaggcgggcgacctgcgtgggcgtcgtaagcagctttccgcccgtctggaagaggtccggacacaaacggcgcgcttggagacgaccccccggcttgtggcgctcctcggcgtgccggatatcgacctcgaacgcgacattgcctcgctcctggaggcattgaacgccgcacgccgtgaggctgaacgcgaacggaccgagctgagggtcgcggagtccatcgacgaacaggcgcgtctcgctctggctgcgggcgacctcctgccgcccgcccaagtggtctccgacgcctgtaaggctcttgaggacgccaaggtggttgcggtcgcgggatggcgctaccttgctgccatccctgatgctgaccggcgacgagacattgtggagcgtctgccgcatctggccgcaggtatcctcctccacgatcctgaagacgtcgatcgggcccgggaagtactcacggcactgcgtccccaaccgactgtcttcgtgtcggttgcgacaaccaggaccttcaccgaccccgaggctgaactgaccgacggcgtcgaggtggtgatcccgccgcaccccgccctatacgacgtggacgcggcggccgtcgagcacgaggccatcgacgctcggcacgccgtacgcactgcccgtgccgaagagctgacggctcgcatcgagcaggacggcaacctgacctacgcactcacggactggcggacacgctatccggagggcagcatcaccgtactgattgaagagcacgcgggtgtggtgcggaggctcatagtggccgatgcgaaggtgaccgaacgccaggaagcgcttgaggcgctccaggaacggcggcagaagatcaaggaggagctgccacctctgcgtgagactcgtgactcactcaccaaacggctcgtacgtctcgaggaactcgccgaccgtcacggccacctggcggaatggaccgagcgggccgcgtccgagaaggagaggatgcgggagcgccaagaagccgccgggaaggcagaggacgaggtcatcgagctgcagaagctcgttactcaccatcaacgcagagccgacgagcaccaacgcaccgtgcgtatcgtcaacgacgaccgggccaaactacccggaagcgaggacgttcgccgttccgatcctgtccctgaactctccacagccttgctgcggagcatgtacgaccaggccgcagcacgatatctccgtgttcaggtcgggagtgacctgttggaagagcgtgagcgagccaacgaacgtgccgcgaaagcgaagcaaggctacttcaagctctccgaggaactccgcaacagttcggccgcgctgctgcggagtcccgagggttccgacgaagcggcacgagcgacggctctgtcgagtgcagtccacgcggcgcgggcagcagagaccgcggcacgcaacgcggcagtggccgcgtcccgctgtgcggacgaactcaccgatgccgaagaccgtgccacgatgcgagttgtgcttcccaagtaccccgccgatatcgattcctgcaccgaagccgtcgatgaggccgaccgacagcaaaattcgagcgctcgtaagttggcgggccaacacgaagtgcatacgcggctcggacatcaactggagggtgtcgaggcgtcagcgaagacgttccagttcatcgtcgacggattcaccaaagacgtgcccgagggcgagggaaacgccgccgatatcgcgccctacgaaggggacgcggacgcggcccaggaccttgtcacccggctgaccaaggaacgtaggacacgcgaaacgaaagctcacactgacgaacaggccctacgcacggcaacggagaggctcacacaccacgccggcgccgaggagttcaaagacctgcacgtccgtgtacagacacagattcgtatcgcgggttgggaaacagtggccacccgtgccacggagtggtccgacgctctcagaccgcgcctgcgcgccttgaccgaggagatcgaccagacggagcggcaccgcacattgatcgtgcgaaacctcaaagcaaaggtcgacaaggcgttggccctgttgcgccaggcacagaggatgtcacggttgccagcgagcctggacgactgggccgctcaggaattcctccgcttccgcttcaccccggcacaggacgacaccgcgcagttgcacatcggggaggtcatcgacgaggcggcgaagggacacaccacggacggacggtctgtgcgcagggacgggatgtcattgctgcttgctggtgtgcgggcggcggtgcccagggggttccggatcgacatgctcaagcccgatgcggtgctgcgcaacgagcgcatcagagtctcggagatcaaggatgtcttctccggcgggcagcaccttacggcggccatcctcctgtactgcactatggccgcccttcgggcgagtaaccgagggagggtgagggacacgcactccggtgtcctgtttctcgacaacccgatcggccgggccaacgcggactatctactcgccctccaacgcaaggtcgccgaggcactgggcgtgcaactcatctacaccacagggctgtccgacgacggcacactgagacgcttcccccttatcctgaggctgcgaaacgacgccgatctccgggcggggcgcaagtatctgactgtgaccgaccggatccaagcgacgctcgacgcgttgcccgagtcggacggtacgggcagcgtcaccaccaccagaatcttcaagcgagagacggaggatgggcacacccgtgaagcacagacagagtga

SEQ ID NO: 52702 - DNA, 1128 bp, Streptomyces sp. NRRL F-2295
atgggcacacccgtgaagcacagacagagtgagttcatccggcacctcagagccggtgccaccgaggcgggctggaagggcgcacgcaggacgagcgtcgtgctcgacgacatctggatcgcattccgaaaggtgaataaccgcaatccggacggagaattcgaacccctgctcatgtcaaggctgttggacgaacttgaagagcatggcctgatcgagcagatgaaacaacgcacccgagacaaagtttccctgcctctcaagatctggctgtgcgccaccgcacccccgcgcccctccgcgcctcccatgccgcactggcaccccgatctctaccagctcgccagggagtggccgtcggctaccctgaagcagcgctctgcgtacgtggccgtcaaccattggctgatgagcgatccagaccccttccctgtgccgctccgggaacgggctctggagatcttcggaacgtacgggagtgaagcggactttcccatgccggagaagaccttcgacaccctccgctcggggccgatcttcggcgactccgaccggctgcacacgacgctgcggacgttcacgacgcacccgccgctgctgacggagacgttcctgaccgaaatcggggacggctactaccaacgtgtcggtggcggagacatcctgctcgtggtcgagaactcggccacctggtggtctctcgtgcacagtctccccggcaaccatcggctggggtacgtcgcctgggggctcggcggcacattccgtgcatcggtcaacacgcttgcggacaggcacggcatcggggagatccgttacttcggtgacctcgatctcagcgggatccgcatcccgtacgcggcgtccaagacggccagcgagcggggccttccaacggtccagcccactgagcgactttacggtgcgctactggaacttggacgcgcacgcggtgcgaaggagaaggccatcgatgcgggggaggctcgtgctctggtcaagtggatgcctgcggcgcatcgggcgaaggtggtcggcctcctggtcgctggtcagcgcctggcacaggagtgggtcggctaccggtacctgacccgcaacacggcttggcacgccgacctcgtttga

SEQ ID NO: 52703 - DNA, 1350 bp, Nocardia sp. NRRL S-836
ttgatcgactacgtcgtgctcaaccaggccagcctcgacggctccgtcagtccggccgccgtggtggaccacctgacgcaggtggcgaggcggatgaacccgtccgacccccgtcgcccgtgggccaaggtggcgaagttggtgctgggcaccgtgctgaacgatggtcgaccgcatcaggcgacgtgggtggagcccgccgccgacgacgagaccggtgagcgggccgaggcgttccgcttccggctgttgcgcctgaccgacggtgatgagggtgctgccatcacggccaccgatcaggcgatcgtgctctacctgcaagcgctcaacaccgacctcgccgaccgtgccctggcgctcaagctgatggtcgagatccagatgaaggcgggcgaattcgccaaggcgctcgcgtcgtcgcggcaggcgaccaggacggcccagggactgtcggcgagcttgcgggaacggctggaggacacccgtcgcgacatccgggctgtggactggcgcggcgagatgccgacatggctgacggacgttttggcccagctgtcgacgcagctcgaacgcgatcgacagcttcgcgacctggccgagcggtccagcgcaaacccggcggcacgggacacgtgccgggagatcgtgcgcgaggtcaggcgcggcgaggacgtgtggttgcggctggagcggtacgtccaacgggcgattccggtgtttctcgccgctcaagaggttcagcggttccagccgcgtggcctcgcggcggcgatcgaccttgcgcgagacgtgctgcggccacttctcaccgcggacgacgactcgttcgcgctttccacgcacgagctggcggcgggcgtcgcaccacctgttgtcccgtcctgctgggggctcgacgaactgtgctccgtgctgctgcgcgctccggcgatccgggaacaacctgacccggaggtcgacgatcccggtgatctcggcgacgccgtcggcgactcggttcccgacgacgtggccaggtgtgcggctgacatcctcgcttcggcggcgcaccgcccgacgcggctgtccgagctgctcgccgtcgcacgttcccgggcggcggaggtcgacgacccgctccggttgctggacgtggtgtggggggcttcgctgtgggtgttcgtcacgggagacgacaccgcgcccgacgaccggccgcgcagtgaagacctcgcagccgctctggctcccttggtcgcactcgaccaaggcatctccctggtggacgaccgctaccgcggtcccgacctcgtgctcgccacatcggtggcgctcgaccggatggacctcgatgcgagtggagccgcatga

SEQ ID NO: 52704 - DNA, 4332 bp, Nocardia sp. NRRL S-836
atgttccggctgcgacggctgtatctggactccatcggcgttcccgagaaccggttctccgacctgttggtcgacctcaccgacgtggccggcgaaccctgcgacgccatcgtgtggctgcgcaacggtgcgggcaagaccacgatgctgtcactgctgctcgcactgatcctgcccgaccggcgcgacttcctcgccactcggacgaagaagcgcacgctggaggatctggtccagtcgaaggacacggcgcacgtggtagccgagtgggcggatccggccggcaacctgctgttgaccggcgccgtctacgagtgggatggccgggtacgcccgcgcgactacaacggccccggcaaggacaagctccggcgcagttggtggtgcgtccaccccgacccgtccgtggaaggctcgaccctcgacgacctgccgttcaccctgcgcagcagcggcaggtacgaccgcgagcgattccggtcgcacatcaacgagctggccgcgctcggcgtgaacgccgtggtggccgaccagaccatcggcgagtggcacaacgcgctgcgcgagcgcaacttcgaccccgacctgttccactacttcaccgaggtgaacgccgccgaaggcggtatcgacgggctgttcgccgagatcgactcccctggtgcgttcgtgcgctacctgctgcgcttcgtcggcgacaaacagcgggtggccccggtgcgcgagctgctcgccgacaccgccgccgagatcgccaaacgcccggtctaccaggctgagaaggagttctgcaccacggccgcacccaaggtcgtagcgctgggtgaggcgcaccaggccgtggtcaacgcctcgaagaaccgcgatggggtatcggtgcgtgccgcaggcttcaagcgcgctctgtaccaggcagaggaagtcgcccagggcaggcgtgacgaggcggcccggttggttgaggatctcagcagcaggctgaccgatctgaaaggcggtgtggacgccgcccgcaggcggcgcgacgaataccgcaggatcgccgtcgacttcctcgtccgctccgcgaagacccggctcgctgaagcgcagggcgaagtgcacgcggctggtcttgaggtacgcgcttgggccgcggtggaggaccatctcgtcctggaaatcgcaaaggccaggttggccacgactaaggaagccctgctcgacgcggccgatcaggtccaaccgctcgtccgcagggcggaggccgcgaaggccctcgtggccggagcgctggagaacgagatcgccaaggcggatcgctcactcaagacgatgagatccgctctcgatgacgcccgcggcgacagggccaaggcacaggaggcactcgacgcggcgaacgagcggctcgctgaactgaagagcgaagaagattcgctccacgaccacatcgcgcgtttccaggccgagaagcagcaactggtgaccgaggggatcatcacccgagacgagagcatcgacgcggccgaagcccggtggcgcgaggaggaacgagccgctcgacaggatgtcgagcggctgcgggccgctcaggtggccgcactggaggagatcagtgccggcgagaaacggttggcactggcccggaccgggacgaccaaggcccgcgacgtgcatcagcccctcgcggaagacctccgccggctgacgcggcgagctgcggagttggctgatgacgcacgcctgcgggaactgctccagatcgacctggtggatctggcacacggtgtcgacgacgtcctggatgcgctcgccggtgccgtcgccgctgccgagctccaagcgatcaccgttcgagaggaactggcacgggacgagcgcgcgattctcggccttgagcaaacagacctgctgccaccgcgccccgaggtcgagaaggtgctccacgagctcaaccggctgggggtcacggcgcactccgggtggcactacctcgccaaacacgtgccggcagacgagcacgccgccgtcatcgcgcaattgcccgacgtggtcgacggtgtggtggtctacggcgaccccagcggtgccgcggccgaggtcaccactgcggtggaggacgtcgtcgtcttggctccggcgacggctttcgttaaccgcgaagcgccacgtgtcgtcctcggcccggcgcgggcccaacacgaccccgacgcggcgtcagcggaactggagcgtcgacgcggtcgccacaccgcggatggcgagctcctggcacggttgagcgagcagcgcggccacgacgccacccgaatcgcgcgaatcgaggcgttcgtcggcgaactgcccgctgacggcattgacggcctgcgcgagcgcaccgtcgccgccgagtcagcactggcacaagccagcgtgcacgaggacaccgtgtcggaggagctgcgaacgacccgggagcgcgcggacgaggcctccggcctgctcgctgaccggagggaacagctcgcgcggatcggggcggtcctgccacgagtggcggtgttggctgctggtgaacgggacgtcgtggaacccgcgaaggccaggctggcggcgattccggatgagcgctctgagactgcggcccaggccggtcgggcccaccagcgccgcgaggacgccgcacagatcatcgagcgactcgtcacggacatccgcgagctggacaggcggcgaaccgagtggacgggacgacgtgaaggactgcctcgaccggccacccccaccgacctggcgctggaggcagccgaggccgtccacgccgaagcccagcgccaattgcgggaggagttcccggaacgagagctccgcagggcggtggaggatgccgaacgggaggtcgtccaggttggcagggcgtggaacacgcacccggaggaggtgcagcgatccgccctcgaactggtcgccagcgaggcatccgcggatcacgacctccgcgcccgcgccgccgcccgcgccgccgagcgccttgaacgtgccaaccaggcggtcggcgccgctcggactgatctcgacaccgccaggcggaaacaggccgaagcacccgtgagcaagctccgcggcactgacgagatcgagcagcccaccgaccaggagcacgccgagcggttggccgcggccgcggaggcggaggcgtcggaggggcagttgaggctgggacagaccgagaaggaccgcgatgccgcggccgacgcggtccgcaaggccgagacccgcgccggtctcctgcgcgaccaggccgacaagctgcgtcaggtcgccgcagccgaccagccgtccgggacgatgcccgacaacgacgaggagacccgggccgtcgtcgggcacctcgtcgcggagctggagaaggtgcaggaggcgtacgtggcagctgatcgcgcccgcgcggtggccgtgcacgacctgcggacctgggccgggcaggaccgcttcgccgcagttgcggaggatgaacacggacaggccgtgcaccgcttgcgtgagatgttccggggcgagcacgtcatcgaacgcgtggcggcgctggccggtgagctggccttcgacctggaaacgagggagaaggccatcgcccagcagctcgagcaggtcgcgacccacaagaacaacgtcgtggtgaggttgagcgacctggtcgccgatgccctcgccctgctcaaccgcgcctccgccctgtccgaactgccggagggcatcggccgctgggagcaccggaagttcctggtggtcgaagcacgcaatcgccccaaccgggaccaggtcgtccttcgggtcggggaactggtggaccgcatggtccggagtggccgtatcgagttggacgccgtggagctgctgtggcgtgcgacggaggcatcagttgtcgagggattcaaggcgaccgtgctcaaaccctcgcccgaccagccgatcgggcgaaccccggtggaggagatgcgcaagtggtccggtggtgagaacctcaccgcctcactggtgctcttctgcgtgctcgcccggctgcgcgccgagcagcgcaccggcgccaaagccggctctgcgggtggtgtggtgcccttggacaatcctctcggcaaggccaactacctgcccttcctcgaactccagcgcaaggtcgcccgagctaacggcgtccagctggtgttctggacgggtatcggcgacctcggtgccgtcacgaccttcccccggatcgcggccatgcacaaacggtcctccacgacgcgcgaaggtcgcgcgtacgtgcaggtcgatgacaacaactcgcaggtcgtcgacgtggtgtcggcggtacggcatgaaccctga

SEQ ID NO: 52705 - DNA, 768 bp, Nocardia sp. NRRL S-836
gtggtctggcatgcggagttggcgtgggcggcccagctcttcgacgagaaccttctgagccccgccgagttgtcgtttctcgaggcggtcaacaactggctgccgaagcgcagagcggtacgggtaccggtgcgcgagcgctccttggaggttctgggcgacgagaaggagctggaagcctggatgctcggttcgttcttcagtccagggaggctcaccctcgaactgctcgaaacctacgcatgctggccgccagtggagcagacaacgcttggtgaccgatcgtggttggtgatcgagaactacaccacgtaccgctcaatcagcgaccgggcggaacagttggggttcgacggtcgggttgtttggggctcaggcaaccaggtcgggacccgcctcgcggctttgagcacgatggcgcctgcgcccacggcctgctggtacttcggcgacatcgacacgggaggtctgcgggtcgccaagctggccgagagccgtgctgaggtactggccctgccaccggtcacacccgcacgtgggctctaccgactgctgctccaccacggaaccccacggtcgtcgaacacagcacgcccgacggccgccctcgtcgcgtgggcgcgagcgtggttcgaagagccactgggggaggccgtgacctgtccagtcgctgatggaaggcgcttggtccaggagcacatcggggtcgaggtgctgtccgggaccacgttggctgactggttcgaccagccggagtcgttggcgtag

SEQ ID NO: 52706 - DNA, 1461 bp, Pseudonocardia sp. HH130629-09
gtgtcgaccatcagcccggacgagggagtggcgcgccggctgaaggccctggcctgcacggcgccgctgcacgacctcgacgcccgcaaggggcggctcgactgggacgcgaccggctaccagatggcggagatcgggctgcaggcgatcgaccaggtcaccctggccatggacttcgaccacggtgcggaccacgccgaggtcgtccggcggctgctgccgttcgtcggcgcgcaggtaccgggggcaccgcggtcggagtacgtccgcgtcgcacagtgggtgatcgacaacctgatcaacgtggggtcgatcgaccgcgggttcgccgtggagtacggcacgaccgacgacaaggggcgctacgtccgtcgccggttcgacttcaagctgctcgtcgaggtcgccgccccggacggcgggatctacctgcgcgcctccgacgaggcgatcaacgtgctggtcggggcactggacaccgacgtcgagtcggcccaggaggcggccgagacgaagctggagacgctgatcgtccgcggccgtctcggcgacgcccggctggcggccgaacaggcccgctaccggaccgtgcagtacgcggagtcgttgcggcgcaagctggaggccacccgccgcgacgtccggtcggtggactggctggacgcggtcccgcagctgctcgacgaggcactgacccacatcgaggcccgctaccgtgccgagacgatgatcaaggcgaacatcgccgacgcccgcgacgaggccaccgagccggggcgccgccggcaggccgcggagctggtgaccgtcgtcgacgactgcatccagcggcacacccagctacaggcgcggttgcaggaggcgggggccgcgttccgcgccgagcaggatcgccagcagttctccgggaagccgaagcgggccgccgtcgacgtgttcgggcagctcctgcggccgtcgctggcgctgaccgtcgaggcggcgcacgacccggtgaccggctacttcgcggccggggccggtgtgcgcaacccgtcggtgccgagcctgggcgggctggtcgagacgttgctgacgccgccgagcgaccgggacccgttcggcgccgaggtgcccgaaccggagctcgccccgcagccgcgcgagcggttcggggtggagacctgggctgccgccgacgccgtgctgcccgacgagatcgagcacccggtgcggctgtccgcggcgctcgcggcggcccgcgccgccggggcggacctgccgcacctggtcgcgctgcgggcggtgcacgccgtcggaacggcggtggccacggcccggacccagggcgacccgtcggtgctggtcgccgtcgacgacgggacggtcctcgacgaccccgagttcggcggcgccgacctgctgctggcgcgggccggtgtccagggtggagagacgaaccgacggacggcgcagacatga

SEQ ID NO: 52707 - DNA, 4512 bp, Pseudonocardia sp. HH130629-09
atgtatgagctgacccgcgtccgcctgttctccgtcgggccgaccgccgcgcgctaccaggacgtcgcgctcgacctgcggggcgtcggcgccccggtgaaggtcgccgtgcaggaggacctgtttgccccggacgcgctggaccgcacgacgccgcggcggccgtcgccggcgtcggtgctgttcctggagaacggtggcggcaagtccgtcctgctcaagctgatcttctcggtgctgctgccggggcggcgtcaggtcgtcggcaccaccagcaccacggtgctggagaacttcgtgctcgccgaggacgtggcgcacgtcgtctgcgagtggatgcacgtcggcaccgggcggctcctggtcaccgggaaggtgtcggagtggcgcgggcacgtcgcctccaccgatccggagaagctggccgacgcgtggtactccttccggccggttcccgggatggggctcgacgacctgccgttcacccacgacggccgccgagtcaccctggccgcgttccgggagcgtctgcagaccgcgcaccgcgagcaccccgacgccgagctcgcctgggagaccgggcaccgggactggacgcgccacctcgtcgacgtcgggctggacccggagctgttccgctaccagcgcgccatgaacgccggtgagggcgaggccgccgaggcgttctcgttctcctccgacgaggggttcgtcgacttcctcctgcgtgcggtgctcgacccggcggagccgcagaacgtcgccgagctcgtcgccgggtacgccgaccggctcgcccagcgcgaggagctggagaccgagcgggagttcgtcgacggcacgctgtcccggctggagccgatggtcgacgccgaggccaccgcgaccgcggcccgcgacaccgagaccgccgcgcgcgccgagctggcggcgaccgcgtcgcggatcgcggcccgccgggtcgccgaggaggcccgctcggtgaccgccgccgaggaggccgccggcgccgtcgaggccgagcagtccgcggcccgtgcggcggagcggctgcaggacaccgtcggcgagctgcgcagactcaccgcggtgctcaccgtcgaggccgcggagcggatcgcggccgaggcgacccgcgagcgcgacgacgcgtcggccgtgtcgatggcccgtgacgccgtcgaaccggtgctggcgcaccgcgtcgccgccgccgaggccgcgcggctgcgtgcccgcgtcgaggaggaggagcagaagtcccggcccgcactcgcggcccggcaggacgcggcccgtgccctcgccgccgcgctggcccgcgtcgccgcggaggccgacgccgccgccgacgccgcggagacccgccgcgccgacgccgaggagcgcgcggcagccgcccgtcgcgagcaggtcacccgcaccgccgacgccgcccgtgccgagagcgcggccggcgccgcccgcgaggccctcgacgagctcgacacccgggtcgcggccgccgtcgacgcggggcacctgaaggcgggctcgaccgccgccgacgtcgaggacgaggcgacggctgcccggatcgacgccgagcggtgcgccgccgcgctcgccgacgccgacaccgccgccgcggcgatccgcgaggagcgccgggccgccgagacccgccgcaccgcggcgcaggacgcggcggccgccgcccgcgccgacgccgcgaccgccgaggccgcacgatccgcggcgcaggccgacgccgtcgcgctcgccggggagacccggcccgcggagctgctcgggctcgacgagatccgcccggacaccgacgcgggcctcgtcgtcgacaccctgaccaccgcgatccgcggcgccgagcgggaacggacgaccctgcacggcgaccagcgccgcgacgaacgcgcgctcgccgcgctcggcgacggcggcctgctgcccgacccgcccgagatcgaggacgtcctcgtggtgctggagtccgccgggatcacggcctggtccgggcgtcgctacctggcgaagctgcccgcccccgaccgggagaccgtgctggcgcggctgccgcacctggccggcggagtactgctcaacgacgcgcgcgacgccgagcgggcccgcacccggctggacgcggcgcggctgctgccggcctgcctggtcgcggtcggcaccaccgccgcgctgcgcgccgacgccgacccggcgcccgggatcgacttcgtcgtgccgcccaacccggccctgcacgacgaggaggccgccgagcaggtccgggtccgcctcgtcgccgagaccaccgagcgcgccgcccggctcgccgagctggagaccgtcctcgacgacgatcgcaggctgcgggaccggttcgccgcgctgcgcggccgtcgccccaccctcgccgacctcaccgaggccgccgagatcgccgaggccgcacgggccgcggccgtcgccgagcacgaggcgacccgcgccgcggtcgaggatctcgacgagcgcgccgaccggctcgccgccgaccggcccggcctggaacggaccgccggggacacgcgtcgccgggcggacgcgctggccgcgctgcgcaccgagctcgcccgccgggcgacgcacgaggagcggatccgcaccggggaggccgacgccgcgcgggcccgtgaggaggccgacgccgccgggaccaccgccgaccgcgccgctcgcgaggcctccgacgcccagcagacccgcgatcggcagcgcggcatcggcaccaccctgcgcgacgaggccgcggccctcccggtctcccccgaggagatcggcgacccggacgcggagccggacgggacccccgagggttcgctggccgagctgcgcgaggagttccagcgggcccgcgacgcctacgccttggccgccgtcgacaccgacctgcacggtgcgctggagcgggccgaggccgacgcgcgggagcgccggatcgccgtcgacgggctgccgcgcaccgtcgtcgaggccgcgaccgcgttcctgcacacccccgacggcgccgacgccgccagccgtcgcgtcgccgcggagcaggccagggccgcctacgacgaggccgaaagccgccgcgccgacgccgcgacggagctggccgtcgcccgtcgcgagctggagcggttcaccggcggcgagcggccgatcgaccacggtgccgaggggcgctccgcgggctgcgcgccctacgacgctccccgcgacgccgagcacggccgtgagctggtcgcccgcgccgcggcggacctggacgtggcgggcacggagctggaacgccgtcgccgggcccggaccgccgccgaggacgcccaccgcaccgccaccgacctcgcccgcgggttcgggctggtcgtgtcctcgttggacgagacgcccgagccgtccggggtgccgttcgacggcgacgtcgaagccgcccaggccgcgctcaagcgccaccagaacgccgtccgggacgcggcgggggagcggacgcgcgccgagaagaaggtccgcgaaggggtcgacgccgtcgcccgcttcgcacaggacccgcggttcgcgaccctcacctccccggtgcaccgccacatcgccggcgtcgaccggtcggagatgccgggcctcgccgtggagtggatcgcggcgctgcgcccgcggctgcgttccctcgacgacgacctcggcaacatcgagcggcaccgctccgggatcgtcacccggctgtccgggatggtcggcgaggcgctgcgcaccgtgcgcctcgcccagcggctgtcccagctgcccgagggcctcggcgactggtcgggccagcagttcctgcggatccggttcgaggagctgcccgacgcggcgttgcgccacgagctcggcgccgtcgtcgaccgcaccgcgaccgggatggcgggcggcaaggccaaggaccggcgcgacggcatgtccatgctgctgcgcggggtcagggcggcgatgccgaagggcgtccgggtcgagatgctcaaacccgacgccgtgctgcgcaccgagcggctgcgcgtctccgcgatcaaggacgtgttctccggcgggcagcagctgaccgcggcgatcgtcctgtactgcacgatggcggcgctgcgggcacaccagcgcgggcagggcaggcgggcgcacgcgggcgtgctgttcctcgacaacccgatcggacgcgcgtcggcgggctacctgctggagctgcagttcggcgtcgcgcaggccctcggcgtgcagctgatctacacgacagggctgttcgacgcgggcgcgctgtcgtcgttcccgctgctcgtgcggctgcgcaacgacgccgacctgcgcgccggacgcaagtacctgtcggtcgacgagcgggtcacccggtcggtgcccgacgccgacgcccccggcggccggatcaccgcggcgcgggtctaccggcgccccgaggccgcggtgcccgccggcgcaggcgacggcgcgggatcggcaggatga

SEQ ID NO: 52708 - DNA, 891 bp, Pseudonocardia sp. HH130629-09
atggtcggcagcgtcgacgcccggcggaacctggccgcggtcctggcggagctgaccgccgccggggtgatcgagccgaccgaccgcgccgacgacggcagcccgccgctgccgaactcggtccggctgctgcgtgccgccccggccccggcgccgcaggaccgcaccccgtggcacgccgagctgtcctgggcggcgggcctgtcccggccgtcgccgacgctgctgcaggtcaacgagtggctgttccggcacgcggcgcgggcggtcgaggtcccgttgcgggagcgcgcactggagatcaccggcgacgagaaggcgttcgacggccgcctgcccggcgagctctccctggcgaccctgcgggcgcgccgggtcgtcccgccgctgcaccgcgagccgctgcccgggggcgggccggtgctgctcgtcgtcgagaacgccgacaccatggactcgctgctccgggcgctgcgacccgagccgggggcggtcggcggagtcgcctggggcgccgggaacgcgttcaccgcgtcggtgctcacgctgcgggaggccccgccgtcggaggtccggtactccgcgatccggtacttcggcgacctcgacgcggcggggctgcggatcccgcgccgcgcgggtgagctggccgtcgccgaggggctgccgccggtgcggcccgcgaccgggctgtaccgggccttgctggagcacggccgtccggcggccgcgtcgagcgtcgaccacgccgacgtcgagtggctcgatcccgcgctgcgcggccccgtccgcgacctgttcgcgtcaggggcacgcctcgcccaggaagccatcggcgccacacacctggccgacgacccgacctggcgcgccgggctcgcccccgactga

SEQ ID NO: 52709 - DNA, 1452 bp, Rhodopseudomonas sp. AAP120
atgtccgaccagcgtttcatgtccgccgatgctgcaccgcgcctgaccagccatctgcgcgcgctgtctttgattgcgcccctgcagcgggccgaagacaacaagggaatgctgcacgtctccgccaaggcggcggagcgcgtagacatgcgctatctggcgcttgccgccatcgaattgctgatcgaccggatgggcgccggcggcacggcgggccgcgcagaactgattgaatatcttgcggatttggcgcggcttcagtcgcgaaatctctctgactcggatgccaccgcgctggcagagcatgtgttcgacggcttgaccaacgctcgcgaccgccgcgcgcgcttcaaggtccgtttgtttgatccagatcagcctgatgggttttttttcgaattcgcattgctgcgggctgagccgctcccggacgggacggtgggttaccggctgacccaggaagcgattgaaatccatctcagcttgttggcgcacgatccactgaccgcgacgcaggtcagcgagatcatcgttggagagtttctcaagcggggcctctacgatcatgcggtgtccgcagccgaacggaccagaaccaacagcattcgtcttgccgaagcgatccggttgcttatggcggaagcacgccgcgccatcctcaaggtgatgtggcacgaggaacttggcccgaagatggaggaggcgcgcagtctgctggatgcgtccatcatgcgcgagggcgccatgctcgcccaactgagtgacacggtggctgacgtgacggacgagacggatcgccgccacctctcgcgtatccgcacgctattgctcgatgtgcaaacgcgtcaccgcaagctcatcgtcgtggtgcagaagacggccgaagaatatttgcacctccaggctgacaccctcaagctgcggcccttggcgcgattgccagatctcgaaaatgagattctcgatcctttgttgcgggctccggcgaacttcttgattgagaatacatccggtgtctttggcgcgatttccgggacgctgccgccgcttgtcctcgacatcgcagccgcgatcgccgcattcgagccggacgttgaagaggcggacgtcttcgatccgaccgttgaatttgatgatcccaccgtggggctggaattgccattcgacgaggcaaccatcgcgcgagctgagcaatttgcacgcgcgaccattctcgcaacgggagctatcactctcggtgagattttgtcgcaggcgtcgttggaccgccctgatgatgcggcctttcaacgctgtctttttcttatcctggaacaggcaatcgatccgcgcacgacagacgttgccggcggcgcgtcgattctgagcacgcgtttcgatgcggggttcgttgagggcaccgatgtgagattctcgcgcgccacgggcggaggagtccatgcttccgaatga

SEQ ID NO: 52710 - DNA, 4353 bp, Rhodopseudomonas sp. AAP120
atgctcatgcttaagatcagtcgcgcatatctggacgcctgcggttatgtcgatggcgtgtttgaggagcttctgatcaagccgacagatgccaccggttcggcactgcatcacgttattcacgcgcccaacggcgtcggaaaaaccaccatcctcgcgctcctgttcagtatttttgagccggatcgtcgcaagtttctgcgcacggaaatcaaccgccaacacaggatcgagcattatttcatgccgggacgacttggcgtggtcgcgctcgagctgatcaaacccggcgtgaacaacaaaccggtgcgtcatgtcatcggccaggtattttggctcacgcccgcctccaagggggatgacggagaaccgggacaccggcggttcttcgctttacaagccgacgctgacacctcattggatacgttgcctttccgcgggctgtcgggtgatacgccattgcgctcgctcgatgacttcacgcgttgggcgcgcgacatgcgcagcaagccgacattcttctccaccgactcgctcactgcgtggcgcaagcatttgacctccgaactcggggtggagctgaaagtcatcgaagtgcaacgtcgcttctgtggcactgagggcggcatcggcgcggcattcctcgatttcaagtccgagcagcagtttctcgaaaagatttttgctttcatgattccggcggatgctgccgacagtgtcgtgcaggccttggagaccggactcgcgaaaatccgcggcctgccgcagcgaaaggaccagctcaaggttctcacgcagcttgcagacggcttcacgccgttcatttccgccgccggggctctggaaaccgccgaagccgaacgtgccgacgacttcaagcggctaggccgtctgttctcccgcttcaagatcgatcagaccaagctggaagtggaatgggagatcgtcggcggtgaattggctatcaaggggcagggtgttgaagacgctcgcgcccgcgagcgcaaactccaaggggaggttctctttctggagagggcggctgccgaccggcgatttagcgatgccaaggcggcagtggaacgggcaaaagacagctcagcagctgcaggtcgtaaactccaatcggcgcgcgccaccgatatcggtcgcaaattatcgtcggcgcagggacagcgggaagccttcgaggcggagttggaccgcatcgatcgggatcttgctcctgaccgcgcactccttgcgcgcgccggagcgaatcttcacgccttgctggatcagctggctgccgaagccgagcgcgatgccgatatctacgaacagcgctcccgtgacgcaaatcagctggctgaagcgcacgccgaggaggatcgtgcggcgagcggccgcgcacaggagctgaaggccgaagtcgaacgcctcgccgcgagggtggcggagcatgaccgcgagcgcaaggagcttgagcgccagggtgccattcgcgcggcagaaagtcctgccgcagcggtggcgcgcatcgatagcgagttaaaggttcaaggcgatgctgtcgccgataccgaattgcaagacgagcagcgagaaaaggaagcgcgcgatctcgaaggcgtccgcactgcggcgcttgcggactcgcgccgttgtgcagaggaggctgtgcgtctcgcaaagctcggcgaggccggccggagcttggagcaggccattcttggcagcgcggcgcttgccgcaatattggctggcgaatccaaagacccgtatcgaccggatttgccggagcgtgcgcgcgccgcgcgggcgttatccgaagaaatgcaccgcaagcttgcgaccgagcgcgaggcgatcgcaggcgagcttagttttctcgacgccgaaggggtatcgtccgtgccggccgatgtcgctctggtggcccgagctcttaaggaggccggtatttccgatgcgcagccggcagaacactatctggcgcagttcaagccggatgccgatgaagcattggcgctgttacgcgatgatccggcatgctttggcggcgtgttcgttgcgcgccttgaccgcaagcgcctgtcgacgctggcaagtgatagccgtctgaagctcaagggcccggtggtcgtctcagaggcgacgctgcagaccacggccacgtctgccacggaaacgggaatcgtctttggtcccttcagcgccgcgcgcgttaacaaacaggcggctgcagaagaaaagtctcggcttgcagatgctttgtcagccaaggaagcggagcttgtgtcctgtgtggcacagatcgaggcgattggcacgctcgtcgatcagctccgcgagcttcacaagaactaccgcgatgaccgccctgacgacatattgcgccgctgcgagcagtttaagtccgataaggagcgtgcggatcagcaggtcaaggatgccatcgcccggcaaaaggcgattgcgcaggagcgtgcgcaattccgcgaccgtctgcatgagcttgccgatgtaatcagccggctgaaaatggcgaaacaggctgtcgatcagttcaaacgccggtatgtcgatatctccgaaatgtctgcgcgcattccggtggcaactgctgaacagcagcaagaacaggatgccgcgctgaaatctcgcgccgctgccgtgaaagcgcgtgcggcggcgaccgactacggggggcgtgcggtagcgcttcgcgccgatgcaaacgcacgacgatccgacaaggcacactacccggaaacggacggtgcggccgccgatcgaatgggcacgtttgacgatttgcgcagccaatacaaaacggctgaacatgccctcgccagcaagcgggacgcgcaacaggcgacggtttcgctccagctctcggcagtgaaagagagcattttcaaacttgaacaggaatacgcgcaggccagccaaggattggagcccgctgatcttgagccgtttagcgccgttgccgatcttgcgcgtgcgatcaaggaagcggatcagaatgagcaggaatgccgtgcggctgtcgtccaggtagacgcggcgctaacgtcggcgcaatcggcgcttggtcctgtcagcgggaagatcgagcgtgctgaaaagaaaagcggtctgaaacccattccggttccggaattcgcgcaagcgccagccgaaacgtgcgccaatgaagctgctctgcgtgagcaacagggagaggcgctcgaaatcgaaattcgcaacatggaacgcgagcattcgggtttgcgcacgcgccatgctgacatcaagggcaagctgagcggcatccaggcgctcgccaaacgggctgagggacacctccctgaagcgagccgggaagaattgccagacctaagcctgaatcatgatgagctcgagcctgcgctcgatcaggttatcagccggatcggggaggcccgtgccacaatcagccggctggacgacgaggccgaagcatgtttcgagcaaattcgccaactgatcgaaggcgaaagcttccgccgccttgaacctcaagtggccgatcacctgcgccgttactcgcaccgttcggccggaacggagcgcgagacgcttcaagcgcgtattatcgagcgcatcggaattgtccgcagcgaaatagaaaaccagatgcgggatcaaaatgcgtgtctggaacagcttcggctccatgtcatccacgccgatgatctcctgctgcgcgccgctcgctgttcgaagattcccgaccacattgccttctacggcggcgagcgcattttgaagatcaagcggcgcctgcgtgacgtgccagtcgaaatggtacgcaaccagctctcgatctggttggacgagcaggtacagaccggacgtgttccctcagatggtgccgttctggctgccgaattgctgaaccgtgtacacgctggtcgcgcgcttgagatcgaaatcctcaagcccaagcgggatgcaatccagccgtatatgcgcgtggaccgtatgggcctgtcgggcggtgagggcgtaaccgttgcgatgatgctctataccgtgatccagaagctggcgatggatgagcgtacagacggaaagaacgcagcctcgggcggtttcttgatgctcgacaatacgtacggcatgtccaacatgatggagcacattgttctgcagaaaacgatggcggacctgttggacattcagctattcgtgacgacgtgcagcgaggacaagcacgtcctcaacatgtttcccgcgattacgcgcttggtgcagggcgagcgcgtcctgttggatgggcagccgaaatacatccgcgtgcgctccggcgactatctgctgaaggggggcgaacgtgccgcctga

SEQ ID NO: 52711 - DNA, 648 bp, Rhodopseudomonas sp. AAP120
ttgagcctcatcgtgccgatcaaggaacgttcgttagagattttcggcgacgaaaagcggctcgatcaactacgcggcggtacaaccaatcttttcgggcaagtcagtctcagttcactcggttgccgtctatgccccattcctttgccattcgaggcgggacccgcagctgcacgcggccagccgatcctcattgttgagaacaacgacacatgggcctcgttttccgcctggaaccgcggtgtgggacgctacgccgccgttgcctatgccggcggcggtcacggcaagagtctggcctacgatgaaatgtttatcgacgaattgatcagtcggttccagtccgaaggacttttctactttggcgatctcgaccccgcggggctgcgcattgcgagccgggcagcggagcgccgtgcgcttcggggcagcctggcgcttcaacctgctgcggcgctctacgcttggcttctcgaccgcggtacgcgaacaagtctacagcgcactgaaaaggcaacagtagccgacctcgtttggcttccggaatacttgcgcgatcccgtcgaagctctcttcgccaaaggacaccgtattcctcaagaatccctgggtacgcgcgcgctcgcagtcggcgacattcatttttga

SEQ ID NO: 52712 - DNA, 1425 bp, Oceanobacillus caeni
ttggaagaattggataaagccttaatttccatttttgatacagatggagataagccagagcttcttcagtccatgcgtgatattgcggcattatctggcgtgttgagtgaactaagtgataaggaatattttcaatcgccgattcacgtcctacgttttttgcgagtgttaaatattattaatcaagaggcgcttgggattacggatccaatcgagaatgaggaaacacttttttatcgttaccgtcatacgttcggttatggcgaagagatgacaatcggcttcataaaacacttgacgtttgtgttgggaaaatacaactggattgcaaaaacggggaagcgaatcaagatgcgtgatgttggtaagcgaatgatggatgtcttgattcggcttgctaatgattcccttgcgtattatttgaatgatgatgttcaacgatcgcttttccaagcaaaaagagatgcggagctaagtgaggcttatgatgataagggcatttctggtgggaacaaactaatgagtatgattaaaaatgtggaggaagcggtctcgctattaaccgaaagagagttagagtatttgtccgatcgcaacgcattgaaccaggtagaggttatccatcaattgatgaaagaattggaagtaaaaatggttgaaaggcttgctaaatttgaaacgctagaccaggaacttgtttttgctactgtgaagcaaaggggaacaacagcgataagtgaaggaacaaagataagtcttgggacgataaacaagattcttaagtttgcccatctgcaagagacagattttatcaagacaatccatcctgaactcttccggaattttattgtgaagtcatttgatccaccaataggttcggatatacctaatgctcatcaaatccttagttttatggaacagggacaatatgaggatgaggaattggatggtatgtgggtaccggtcaaatttgctagtcccttgccgccggtggcaattgatgaggggatcgagtatgtggagaactatgaaccaatcacggaggaaatcgaagaaacggtggaagaggattttccagaattagaagaagtgatggaggatcaactagaagagcttatgggagactcaagatggcaaatgacgaaacaaatgattcataccgagcagattgaaaaatacctcgataacgtagacgaagcaggactagatgaattagtagttcaggctggatctgataaatggagtgacgtcttaaatggtctaattggtgtgtctgcactcattgctaataaaaaggcagatatcgatgagaaagcaaatcgaaaattagatgacaataagacggagagagattggaggtggatagaggatgaacaaggaacctatggaattagaaaacgaggaagaagagattcaaaatattaa

SEQ ID NO: 52713 - DNA, 711 bp, Oceanobacillus caeni; identical to SEQ ID NO: 52515

SEQ ID NO: 52714 - DNA, 1311 bp, Oceanobacillus caeni; identical to SEQ ID NO: 52516

SEQ ID NO: 52715 - DNA, 1485 bp, Frankia sp. R43
gtggaagaggggctgctgcacgacgagggcttgatccgccgggcgaaggcgctggcgtgcacggcgcccctgcacgacctggacgcgaacaaaggcaaggtggaatgggccgacgccaaggtctaccagatggcggagataggcctgcacaccatcgaccaggtcgccatcgcgatggacttcgacaccggagccagccgccgccacgtccttgaccgggttcagcggttcgtcgcccgccaggcgcccaaccgcacgcaggaagagcacgcccgggtggcacggtgggtcctggacagcctgatcaatcacggcgacgtcgagaaggcgttccaccgaccctacggcgcggtggacgcggacggcgtctaccgggtgctgacgttccccttcaagctgatcgtggagcgccgcgacagcgccggcgtgctgtacctgcacgcctcacatgaggcgttgaacgtcctggtcggcgctttggacacggacgtggagtccgcccaggaggccgcggaggtcaaactcgccaacctgatcaggcgggggcggctcgcggacgcgaagcaggtggcggagcaggcaaggatccggaccatccagtacggggagttgatccacgtccagttggaggcgacccggcgcaacatcgcgtcggtcgactggctggagaaggtcccagacctgctgaccgaggcattggcgcacgtccaggagcgggtgcgggcggagcgggcgatcgccaagaacatggccgaggcccgggacgaggcccagaacctggtccgtaagcggcaagccgccgagctcgtcgtcatcgtcgaggactgcatccgccgacacacccgcctacagcagcgcctgctggaggcgcgggaggtgttccgcgcggagcaggaccgccagcagttctccttgaagccgcagcggtcgacgttcgatctattcgggcaactgctgcgtcccgcactgggcctcaccgtcgcggacgcggtcgtaccggtggactgcttcttcgcccgggcaaccgggcccgggacgcagaacattccgcgcctggccacgctcgtgcccgcgttgctgcgtccggcgccgcagccggcccggttcgccgggccggtggaggatccgcaggtggagccgctggaggacgccgctcggttcaccagcgagcagtgtgagatggccgagcaactgctgcgcctgcccgggagcgtgcgctcactgtcgagcctgctccaggaggcggcacagctcgacgcggacctgcccgctctcgtcgcgttgcttgccgtgtacgcctacaaccccgacgccggcgccgcccagcgtcgcggggacgagcacgtgcggttggccgtccgggcggacaccgtcttggacagcgccggctttcacggggacgacctgtggctgaccacggcgcaggtgctcccggacaccgtgggcggaacgaaccagacgagggatgggggacccgggaagtga

SEQ ID NO: 52716 - DNA, 4488 bp, Frankia sp. R43
atgtacgaactgtcccgcattcgcgtgtgctcggccgggccggccggcgcccgcttccaggacgtgatcttggacttctccggcgccgggcagccggtcgtcgccgctcagggagacctgttcggggccggggcccaggggctgcgtccgtcgccggcgagcgtggtcttcctggagaacgggggcggcaagtcggtcctgctgaaactggccttctcggtcctcctgccgggccggcagcgcgtgaaggacgcaccggatccgcggctgctggaggactacgtcctggcgaaggacgtgtcccacatcgcgttggagtggatgcacgccatcacgggaaagctactggtcaccgccaaagcgctgtactggaaggaccaggtcgtctcgacggttgccgagaacctcatcgagcggtggtacgcgttcttccccaccgagaccctcggcctggacacgcttcccgtcgtcgaggaaggccaatacgtggccttgccgacgtaccgcgaccgtgtaaacgagctgtatgcgcaggaccagcggctggcggtgaactggcccaagtcccagggcgactggaccgagctgctgggccagctcgggctggaccccgagctgtttcgctaccagcgggcgatgaacagggacgagggagaggctgtccacgcgttcgccctcgaatccgacgggggcttcgtcgacttcctcctcgaggccgtgttcgaccaccagggcctgaacgatctggctgccctggtctccaagtacgcccacaagctcgccgggcgcaaggacctggcgcttgagctggcgttcgtggaacaagccatggtgctgctcgagccgctgatcgacgcggcagacgcggtgcacgaggcccaggggcaggttcagcgggccggtacggagctggcggccttccacgggcaggtcaaggcccgcgtccgcgatgaccaggaccgcgtgtcgatgcttgacaggcagttggagggcctggcaggtgagttcaagcgtgcatcaaggctgacgcgtcgctgggcggcgacggtcgcgggccggcgggagaggctcgctcagttacaggtcgagcgggccaaggctgacgcagaggaggcctcccgccgccagcgggaggccaagaccgtggcggacggctggagagcaaccgctgccgtggagcggcatctgacccggtcgaacgcgctccggtcgctggcgttgctggtcaagaagggtgagctggcggccgcgcctgcgctcgcagcacgtgaacgggccgctggggccttcgcccaggggttgctggcgctcaggcaagcggcggcgagtgcacaggagaaggaattcgaacaagcaggcgtggaggcggcggccgagaaacaggcacgaggcgagcgggaggccgcgctgaagaaggcaggccaggccgaggcgaaagccagcggcctgctggaacaggtcgctgcggcacggaccgacgccgaggaggctgtcgcagcagggctggcacccgccactgatcttgttcccgccgctgcggcggatgcccgacgcgccgtcgacctggcgtcagagcagatcaaggcactggagttggagcgggagggcctcgaccaacgtcagatcgctgtccaggagaccttgtccgcggcgatccgcgaggaggaggccgcacgcggccgccgcacgcaggcgcagcgggccctggacacggcccgctcccgcgcccgggcgatcgaggccacaccaaggctcactgatctgctgggcaccgaggtgcgcctggacctggacgcgcacgctctgctggaccgcctggagacgacgatcgcagaaacggaacgtgagcgggtcgccgtgcagatcgagcaggcccgtgacgagttcgcccggctggccttggccgacggccgcatgctgcccccacccgaggtcgtgcgggatgcctgccggctcctggagcagtccgagccccgcatcgacgcctggccgggctgggagtacctcacggagtttcccctccagcagcgcgaggagatgctcgcgcgcgccccgcatctgatcagcggcgtgctgctgaactcgccagacgacctggagcgcgcccgggagatcctcgggcgggcggcaccgacggcctactacgtcaccgtgggcgcggtcgcgggactgctggaatcggcggacgccccgacccgagagccctggttcacgctgccgttcaacgtcgcgctctaccaggagaaggccgcccagaccgaacagaaggtcatcgaggagcgctgggcccgctcggaggaacgcctgaagcagttggactttgctcatcggcacgacggccaactgcggcaacagatcagccagtggcgccaggactaccccgagggcgccctggccggcctgcaggaggcgttgacgaccgcgggaacggtcttggaggaggcggagaaggacgccgccgaacaacagctgatcatgaacgcgctggtggcgcgccgggacggtatccgcgacgaactgcacgatgcccagaaggatttcgaccactggcagaaggtgagccggcggctgaccgagctcagtgagcggctgacgcagataccgtcgtggctccagcaggctgcggccgccgaaacacagcagggcgcatggcagaagcaggctgacgaggccgaagccaccgcggatgagcaccgccgtctcgccgagggccaccgcgctgccggcgatgagcagcgccgagccgccgccgcggccggccgggagtgggctgcgctgcccggagccaacgacatgcgactggacgccgaaccgccgagcgacccggtgccggtgctgcgggacgcttacgagaaagccgaggccaacttcaacaacgcggatgtcccgggcaagctgcgcgaacggctcgcccaggccgaggcgagggccgcggaggcggcggcagaatactcggcgctggacgagacggaccgggccacagcgtgccgtctgctgcaaacgcccgaatcgctggacgagcgcagccgcgccgaggcgcaggagcgagcggaccggacgctggaggcagctgaagccgcgatcacacaggccgtactggagcagggcaagcacgaaaacgccctgagcgagcggcacagggagttccatgagctgaccgctgacggcaccgccaccatgccggccgctggcctgccggacacgatcgagggctgccttcagtcggtggcggcagcggagacggagcacgccgcggcgcaggcagcacagaccgggatcggcgaacagcagagcgccgtggcacaggaggcggcgcaggccaaggacgcggcgggggccttcgcaaatctcgcacaggcgttggcggatacggcagcggaaccggacgccgccccctatgccggcgacggtaagaccggctggagtgactatggacgtctgcgcggtgcggccgaggaagggaagaaggaactgagccgcaccgagaaggtgctgcgcagcgcgacggagaagatcaagcagcacgccgccgccgaacgatacgcgggactgagcatcccggtgcgccagcagatcacgaacctgtcgcccgagaagacagccgagcacgcggcggactggcttgccgcgctccagccgcggaaaaggaacctggccgacgagatccacgaggtggacctgcaccggcagaccatcgtcgaccatctcaagggcgagagcgacaaggccctgtccttgctgcgtttggcccagcggctatcccggctgccacgaaccctcggcgactgggcggggcaggagttcatccacttctccttccaaccgcagcccgacgaactgctcctgccacgcctgggcgagctcgccgaagaggccgcggcaggtcgcaccactgacggccgcaaggtggcacgcgatggcctgtcgctgctgctgcgcgccgtgcacaccgctgtacccggcgggttcaaagtccaggtactcaagccggacacggtccttcgcgcggaacaggtgcgggtgtcgaaggtcaaggacgtcttctccggggggcagcagctgacggcggcgatcctgctgtactgcacgatggcggcgcttcgggccaaccagcagggccgcgagcgctcgcgccacgcaggggtgctgttcttggacaatccgatcggccgggcaaacgccgactacctgctggacctgcagcgcgaggtcgcgcaggcgctgggtgtgcagctcgtgtacaccaccggcctgtacgacgagaaggcgctggggaagttcccgctgatcgtccggctgcgcaacgacgccgacctgcgggcagcccgcaagtacctggtcgtcgacgacatgatccgtcggcacctggatgcgctggcgcctgaggacggcaccgggcagatcgacagtgccagaatcttccgccgtgaggaaccgccgcacgaaggccccgaggggaacgatggcactgccacgccgcgagagtga

SEQ ID NO: 52717 - DNA, 1125 bp, Frankia sp. R43
atggcactgccacgccgcgagagtgaactgatcgcaggacttcgggagtgggccgcggcgcacggccgcagcccctacaaggatgccttcatcccccttgacgccgtgtgggaggtcttccgccgggtgccgcaccgcaacgtggccggggcgttcgaacccgcggtcttggccagcctgttgaacgcgctggacagcgccggcctgatccggcaggtccagcgacgaacaccggacaaggtctccctgcccgtcaaggtccggctcctgccgcaggcgcagccaccggcagtgccgcccatgcccagatggcatcccgccctgacctggcttgccgaggagtgggccacagcgaccgtgaagcaacggcccgcctacgcggtgatcgaccggtggctcaagagcggaccggacctgttccggatcccgttgcgggagcgcgccctggagatcttcgggacgttcggcagcgcggaggacttcctcatgccggagaagactctcgacgacctcaagtccgggccgctgttctcggaccagggccggctcgaccaactgctgcacgccttcaggccacccccaccgttgatcaccgagacgttcccgctggaggatgaggacggacgctactgccgcgtcgggaccggtgatgtgctgttcgtggtggagaacgccaccacctggtggtccctggtggaaagcctccccagtgatcaccgcctggggtatgtggcctggggcctgggcggtaccttccgggcgtcgatccgcgcgatcaaggccaagcaccgcattacgcagatccggtacttcggcgatctggacaccagcggcctgcgaatccccttgcgggcctgcgacaccgcagcggagctcgggcttcccccggtccagccggccgagcacctctatcgggcgctccagttgctgggacgcccccgccctgccacggccaaggaagcgtccatcagcgccgcaaccgccggcgagctggcccagtggctcccggcgccatgccaggagagcgggcgccaactgctgctggagggacagcgcctggcacaggaatgggtgacctaccgctacctgcgccagaactgcgactggcacgacgacgtgcgctga

SEQ ID NO: 52718 - DNA, 1422 bp, Paraliobacillus sp. PM-2
gtggaaaaagtggatcaatcattaatttcgatctttgacgttacagatgataaacctgagctactacaatcgatgcgtgatattgcccaactatcaggtgtgttaacagaattaagtgataaggagtattttcagtcaccaatccacgtactacgtttcctccgagtgttacatattattaatcaagaagcactcggtattgcagaacctattgaaagtgaggagacgttattttatcgctatcgtaatatgtatggctatgacgaagtaattacgcaaagttatatgaaacacctcgtgttcgttttggggaaatttaattgggtggcaaaaacaacaaaaagaataaaaatgcgtgatgtaggaaaacgaatgatggatgtacttattcgtttagctaatgattcgcttgcatattatcttaatgatgatgtggcaaggtccctgtttcaagcaaaaagagatgcagaattaagtgaagcttatgatgataaaggcatctctggtggtaataagcttgctagtatgattaaaaatgtagaagaagctgtattgctcctccatgaaagacagcttgagtatttagcagaccgaaatgcattaacacaagtagaagtgattcatcatcttatgacagaacttgaaggtaagatggcagaacgtatggataagtttgaaacagttgatcaagagcttgtgttttccgacattaaacaacgagggacagcagctattagtgatggaacaaaaatcagccttgggacaattaataaaattcttaagtttgctcacctgcaagaaacggattttaaccatagaattcaaccggaagcgtttcgaacgttcatcgtaaaatcatttgatcctccccttggttctgaaattccgaatgcacatcaaattttaagttttatggaacaagggcaatacaaggacgaagaaatagatggtctatgggcaccagtgaaattcgctagtccgatatcaccgatggcaattgatgaggggattaactatattgaaaactatgaacctattacagaagagatagaggaaaaagtggatgaagaaattccggatacagaagaaataatggaagaacagttggaagaaataatgggcgattcaaaatggcaaataacgaaacaaatgatacacacagagcgtattgaagcctatctagaggaagtagaagaagcgggacttgatgagctaattattcgttctggatcatctagatggagtgacatagccaacggattaattggcgtttcagcattggtagctaataaaaaagcagccattgatgaacatgcgaacaaggaaatgtacgataacaaagatcagcgcgactggaggtggagtgaggatgaacaaggaacatatggaattagaaaacgaggaagaaagcgcgaacgttaa

SEQ ID NO: 52719 - DNA, 708 bp, Paraliobacillus sp. PM-2
atgaacaaggaacatatggaattagaaaacgaggaagaaagcgcgaacgttaatccactagcagccctacaatcaatcaaaggttttttgactacagaggaagagcttgcatttatgcaaatccttttttcatcatcagctaccattcgaagtgggaattttggcctttcacgtaaggaagtagaaaaaatagttggaatttcagatgatgaacaagcttttttctcttttctcaaacgggtaaaccaagcgattagtcgttacatgaaagtgatttatgatgagcgaagaaaccaagtaatagcactcatgcgcgtacccgccaaacaagcgaaaacattattaaacaaagaaagtttagctattctcatgtttattttttatcatcaagaagtactgcagaatgagtatacactcttttcccaattaattaatagttttggccatgaatcattacaagtaacaagaaaaattcaagctaacttggatccactgaaaaagattggggcaattgaagtgtatgatacaaattctgaggaagaagcctatcaacttacatcgatcggagctaatttgttttcagattctttcttaagaagatacaccgagtttagtcaatcaaatcagttgcacatggatgatgtcctgcggttctttaaacgttacaacatgaatgggagtgcaaataatgattccatggagacttaa

SEQ ID NO: 52720 - DNA, 3201 bp, Paraliobacillus sp. PM-2
atgattccatggagacttaaattttcaggtgtacgggattacacgccgacagttatggatttttctgataaagatgaccatattctaatatctggaccaaatggtgctgggaaatcaacggttacattttgtatgggtggtgttctttattcaagtaaggttgatcttgaaggattaaagtcaaacaaccttccaaaagaccaaacgtggcgagcaaagattgaattgctttttaaaaatgatgggaaaatcaaggttgatgcgccagagtttgttcagtttcggttagatctggaacagaagccgggtgacccagtaaaaaaagaattttatatacaagagggagagaacatagatagatgggagcgggagacaaagtatacttctggcgatcgtaattttaactttactgaatataaaaatcagattcactctaaatatgctattgacccggatgaattctatttaatttggtatcaaaaagaggtaaaccagtttgcagtgatgcatccagaagaacgattccgtatattcagtgaaatgaatggcattgataaaatccagaaaaactgggaagaaagcaaagaactcgttagagatacggaacagaccttgcaagtggcagagagtaaacaaagtcttaacaaacttcatttaaatcagaagaaaacagagttagacaggtattatagtcgaaacaggcgattagaagaaggatttaaacagtatatttcagctttgaaatggttggagaagcatcaccttaataaaataaatactttaagagatcaaataaaaacactaaaatcagacaaagaagagaaaattacagcgaaacagcaagatgtaatctcacaagcggaacatagagaaaagcttgaacagtttcagacggcaatctctcaaatggaatcacgcgaacgcacgttggacgatgagttaacacgtttgcaggaggagataactagccataaagacaaaatggaagctatctccaaagaaatagaggaaattacgaataaagtagaacggattggcatgaccgaagaagaagtaaatgaagctttaattcatgcggaggaaaaatgtgtttccattaatgtttcaatggaagaacagcaacaatcgttagaaagtaataaacaaaaattagatgaattaactcaacaaattgctgaactaaaaataaagattgaccaggacagtgctagggaacaagaagtgcgtaaacttattaaagcatatagtagtagtcaagttgtgcaaagagagatgaagctaaatgaacaacgattagaagctgcaaaagatgaaaaagggagtcttgaaaataaaaaagaaagtttagataaggaatatgacaatctaagaaacaatcgagtttatagtcctcgtcaagaagtggctattcagtattttaaaaagcgaaatatagaagtctatcctttgcgtgagcttgtagaactagatgacacagctaagccgaatgacgaagagttgtttgatacgataaaatacacgttgtttgttaacaaaaaagatttctttgcaccaaatgatttataccatattccattaccaaatgttgttccagaaaaaacgattacaaaccttccagataaacatgtaaagataaaagataatttaagcaataatctttatccatttgcggtaaaagcactttggtggattaagagcttttttgaaactgaaaaaccattgatacaaaatggtgtgcttattgatacaaaaggcataagaggtccacaagaggaaaaacgtgttatattaagtgaaaaagttttgaaaaattatcaaacacaagtagaaaatgagcttaaaagcgttggggataaaattagcaatctatcaaatgaaataattgaattaacaggtagaaacagtacgttgtttcgcagacatgagtcattaaaagatgcagaagcctttttgataaaagaaaatgagagagagtggcaaaaaagtaagtatgacaatctaattaatgaaaagatggaacttgaagaaaaaagggacaagattcagttggattggaatctgttgaatgaagaacgtgctgattggaagcaaaaggtcgaaacttttagaaattatcaagaaacctttactcagtatgaaaaagaaaaggaaaaaattattgaggcaactcaattgaagcattatttaactgagctaaaagaagagaaaaagaataaaaattcacagttagaagaactaggttctctcttggatgaaaagcggcgtgaagaaaagaaattaaaccgagttatagaggatttgggagatgctattcaatataaagatcgagaaattgattcacaagaaagacagattaaaaatcgatctgaagaatatataacaagtgaagaaaactatgcaacaattaaacatgacatccaaaggttagtagatgctgtaaaacaggaattaaaagattttgcattagagcttaccgaattaccacaagtaactaaaccagaagcagatgatatgcgcgagagtggaaaaattcaatatacccatgcagtaaatgaaacagggattgatgaagctgcaccagaaaattatcaaaaaatgaaagaagagtatgatcgttccgcaacagaagtgaagaaatccaaattattgttagatgaatatacggagcgaatggagcgactaaaagaggatttagaaagcacaattaatagtaaagttattggtcttaatcaaaaatttgttcattatatgtctttgtttggttttcaaggtgaaatagattgggatatgagaatagaccgccgtaatcaaattcactatgcattatatattaaagcacgtaaggaaggacatcgaggaaagttggaggatgttagtgtcaaagcaagaggaggtaaagtaggaaaaggggtttctggtggggaagagtctcttagttctttactgtttgctttggcattattacaaacgattcaagcatcacctggctatatcgtactcgatgagtttgatagtgcgctagatgaaggacgtaaagataaagtattcgagttatatgaacatgaactaaaccgaaaaatgataatcttaacccccaagtctcatgaagcagaatacttataccgtttttctaaagtatatgtcgtttatcacaatcccaacattccacagagtaaaatttttaaggtgagaagaaagtga

SEQ ID NO: 52721 - DNA, 1329 bp, Paraliobacillus sp. PM-2
ttggtttctgaagcgttacattattacttgcagcaccatatcgcattaaaaaatgaaagcatacatgtcaatgatgcgtatgagcagaatgacattatccatataccaataataaagcgaacgacacgaacaagaaagatagtagcaaggctaatggtaggaaaagctacggatccggatctacaccatatagataccattccaaccaaactaactaatggtttcaatagtccaaaaacgaagaagcagatagatctttccgatgaaacttatgaatggattcgttatggctggattattcgtgaaattcgtttagaaaaagatgaaagaactgtaaaaacagaacgatatcgtatgggcttcgtgctttatcagctaagtttaaagatacaagcagaagcagcaaaagaaaccagaaattggatacttgattggaaaaagtgttgggatgttgcgaagcacagcactattttacgcattaaacaagaccagcgtgcagacgttgtttcgttattagcaatccaattagataaaatagcaagtgagacagataaagtcttaactggagaaactaaattaatagaacgtattcatccgacttggcgtttgaggaaacaagtagtattcctccattttttgattgctttatatcaactagcatgcacggaaaaatattttgattggaaacagattggtgctacctattatcggacaatcggtgggtcaaaaaaatttgatgcttataaaaaggattttattgaagaaacagaaaaacaacttcatcgtccaatacagttgttaggtctagcaagtatggggacaattacaccactatttttcactggaccaatgaaagggaatcacgtggagtatagttatggtactgttcacgcaacgactgatctagctgtttttttagaaaagtttactacgaaagcagatgtgttatggttagtggaaaacagaggtgtgttaacacgggtggcttacgaagaaaagtttttaagagatacgaaaagtttcgtattaggtgtggatggacaagtacggtctgcacataggcaattaatttcgcaactaacaacctgtgtcagtcaagttattatttggacggatgttgatgaagcaggttacacgatcgcagagcaattatatgagctaatacaagatgaacaagtcttaataaaatggattgtaccgccattaaccgtggaaactgaatggggaacttttgcaagcaaataccaacaatcgatacaaaggagtaaagaagagcaagaacaagaaattggaggagtagagctgtggaaaaagtggatcaatcattaa

SEQ ID NO: 52722 - DNA, 1614 bp, Lachnospiraceae bacterium TF01-11
atggaatacgattttttgaaacagttttcaaagagaatgaagattgttggtatgttctcaacattgataaaaaacagttggcagaagactacctggaaacagttcggttttgagaccatggacgagcaggtgaatatgatatatgcggttcttttgttcattatggagtattcactcagggagcagccttgtacgattgatgatatatcagtctttgttgatgatgtatgtaacaggtatctgaaaaaaagtctttcttacgaaaaaagcagggagcttgctgagtttattataaatattgttttgtgtgatgaaggtcatgcgatgtattttgactgttttgagtttgaaaagcgtgaatataaaaagaaaaatataagttatctgtcaaatgaggtggtctatcttgatggtgatataaaaagaacaagctacaaacttactgataacggatataatctggtattatcgacactcgaagtcgaaaacaatatgaagcttacgatacatgagatgatatttaagatgcacttagaacgggctacatatgatcaggcacttgatgaggttaaaaatatttttaatatgctacgcatacagcttcagaaaatacaggaggcgatggataagataaggcgaaatgcacttaattattctattgaggattacgagcagattttaaatgaaaatatgactgccataagtgatacaaagcacaagtttatggagtacaggcgtgtggttagaaaccgtgttaaagaactagaagatgaaaatataaatattaaggctttgagtgatgaggatatggaaaaacttcataatcttcaggatattgagagatatttgagcaggtcgatagatgaacatcagaagatattaaataaacattttgaccttaaagatctttattctcatgagcttgagcagatgtcaaagatgacgcttattaaaaggttttctatcagaaatgatctgtatgacaaaattattgagcatccgggcagtcttgtaaatataaatcagtttttaaatccgctttttagaaataacccggagaaagtttacaatctgaataagtgtattcagtatcagaagccgctcagagagaaaaatgatgatgaagaagaagaaaaacttgattttgatgctatggactatgaggagcaaaaggagagaaaactcagggaaaagttaaaaaaatatcagtccagtatggaatttcttgttgaaatgacaatggagaatgatggcgagattgatttagcttcaatgagtagtctgtcagaggaacagaagaaagtgtttattccgaatgctgaaatgtttaaggagataatggtcgagtttattaaagccggaagtatcgatattgatgaacttagaaaagagagaagaaatatagttgcggaggaaagctgtagttttcagttaaatgaaatgatattaaaaattgctgatgagagaaaagattcacagattaaacggataaccgtaagaagatgtgatgacggacagacagtttgttttaatgatgtttacaatgaatttggtgacagacgaaatatatattgttctaatgttcaatttagatttgagaaagaaatggagtag

SEQ ID NO: 52723 - DNA, 735 bp, Lachnospiraceae bacterium TF01-11
atggcatacgaggcagaagaagtaaagataagtcaggaaatattttgtacgcttatttcaaaacatgaattaagagaggaagataataaggagctgtttgaaggttacacacaaaatccaagaataatgaatcttgtgaaaagtcagggtgaaattgcggattgtacagtagaaagatatggaagtgtgatatatcttatacctgctgaagacaacgattttctcgggttttcaaagcaggaattaaaagcgaaactctgtaagtcaggagctacggacaaggattattatctgtcacagtttgttatccttacaatgcttacagaattttatgacggtcaggggagcagcagtaaatcaagagaatatattaaggtcggtgaacttataaatctggtttcagacagacttatacaggctggaaataatatgaccgaggaggaagaggaaaagacagggcttgcattttcaaatatgcttgaagcatacacggcacttagaagtgacgaaaagggaagaaagacaaagacgacaaaagagggttttgtccacaggatactgacctttttacaggaacagggacttatagagtatatagagagagatgatatgataaacacaacaaaaaaacttgacagttttatggactggaatttgttaaatcagaacaactatataagagtgagcaaagttttgggaatcagtgatgaaaaggagaaggtaaaaggtgagtaa

SEQ ID NO: 52724 - DNA, 4431 bp, Lachnospiraceae bacterium TF01-11
gtgagtaagataaatacacttcgtatcgtaaacttaaattataacaataattctatcaagataagtgatgaagcatttcagtttaatggtgaaagtacgcttatgtcacttagaaatggtggcggaaagacagtgctggtgcagatgatgacggcaccatttgtgcataaaagatacagggatacaaaggatagaaagtttgagagttattttacgacaaacagaccgactttcattatggtcgagtgggtgcttgacggggaagccggttatgtgcttaccggaatgatggtaagaaaaaatcaggaagtttcggatggagaggctcatgatgaacttgagatgataaattttgtatatgaatatactgccagatgtgaaaatgacatatatcatatacctataataaatgagactgaatcaggtatgacattaaaaaactggggttcatgtaaaaaggtatttgaaaagcttaaaagagaagatggtatgcattttaattactatgatatggatatgcctgcccagtcaagaatgtattttgaaaagcttaagcagtaccagataaattataaagaatgggaaactattataaaaaagataaatttaaaagaatctggactttcagagttgtttacggattgccgtgatgaaaaaggtcttgttgaaaagtggtttttagaagcaatagagagtaaactcaataaagatggaaaccgcattttagaatttgagactataataaaaaaatacgcaaaacagtacagggacaatcagacaaaaattcagagaatgaaaaatctcagaggttttttagaagaagcatcgggcataagagtatatgcggatgaatatgtcgattacactgagaaaagaaaaaataaagaaaatgatattgcatggtttaatgtgatattaaatgagttaaatgcagaagctgaggaaagaaaaagacttcttgacgaagatataagaaaaaaacagatagagatttcagatataaaatatgaagaagtatcatataatattcattcattagaggcaaaaaaggaaagactcatacatgaatacgagcagataacacttgaaaaaggtcaggttgcaaaagaaaaagacaggcttgagaataagagggcaaagcttctttgtgcgagagaaaatgaagaaaaaaatgctgctcttgcagaatgtagaaagattgagagccgtcttgaagcatcaaaaaagagtgaggaacagaaagaacctgaaagacaggaactcggaaaaacactttttaaacattacagcagggcagtttcggagtgcgaggctgaaatcgcaaatacaagagaaaatataaaaaagcaggaaaagcaggaaaaagagtacaaccaaagtaagtccgactgttttaaacaaaaggatgacaattcattacagataggaaagtgtcaggcaaaaatttcaaattatgatgtgattgaagaacagtttaataaaaaatacgaagaaaagctttgcagaaatattttaggtgtttatgagacggggacattagaattaagagatgatgagtataaaaaagaaatgtcgaagatacaaaaagatatagtttctcttaaacaggaaaaggtgaaaaatgatgatgattttgtaaaatatgtaagaaagcaggatgatctcagaaatgagattatggagaaaaagagcaagctggcatcagagagagaaatatgtcttgattttgaggagcagttaaaaataagacaggatattatgaaacattttcttgtaagtgaaaatgatgtttataacaaggaagtgatacttaagggtgcagacagaaagcttaaggagataagtgctgcaaaaaggttgttagagcgtgagagcgagcagacaaacacagagataaaacttcttgagaatggaagattattggaggtttcaaaagagtttgatgaatatctgtcatctatggagattgaatatatatatggtatggagtggctttcaaataatggaagaagtatggatgaaaataaaaagatagctgccaataatccatttattccatatgcggtaataatctccggtgaggattttaaaaagctgttggcagataaaaataaggtatttacttcaaatccggtgccaattgtaaagagagaggagcttgaagatagttttataaatgatgaaacaggtgttgtagaacttgaaaagataagcttttatctgaaatttcaagaggaacttctcaatgatagcaaacgatatgaaatcatagaacaaaaaaaggaaaaaagcaggaaaatacaggaaaacattgagagaagagatgaagaatataaggagtatttttctaaacaggaatgtataaaaaatcagacgatagaaagtgacagtatagaaagcagcaggggacttattgatacactcgagagtgaaactgttaagatgcaggctgaacttgaaaatctggaaagtttgaaaagaaagattaccttagtaaacgaacagataaatcagaatgtaacagcactgaatgagaaaaaaaatcttgcagggataagattgcaggatttcgagatgcttagagagagttataatgattactgcgatgcgaaagaggaaaaaatacgacttgacaagaaaaatgaagatattgacaataagctgaacattattacagaaaaacttaataaccttatcgaggacatcaaagcggatgaaaaaactgagatgaagaagaaacaggagcttcttggacttcaggaaagatatgagtattttgaaaaatttaagggaaaatcagaaaatgttgataaggcgtcttatactttgcttgacgaagaggaaaggatttcaaaagaggcagcttacaatgcccttttaaatgattattcaaatgaagtgaaacttcttacggagcagtataacagtgccaacaggagatttcttaagagtaagcaggagttagcagaactacttgcaaaataccgtattaaaaaaacagacattgaaaagacaaggtatgataaagacgataaggcagaattagatgaacgcatatctgctaacaatatggagttacagttgtatgatgaaaaacttaataaagtcaatacgcagataaccaaaaaagagtcagacattgagcatgcttacaaggatatgtataggattgctgaaaagaaagagccaattagcaaggataaaatatctgacacaaactttaaagacaggataattataatccaaaatgagataagagacaccagacttgaccttgacggagttacaagtctttgcagaggatatgaagcaaatatttctgcacttgccgaatatagtgatttaaaggttgaggaaaccgatgagcatataaagaaagaggatatttttggaaagtcggtaaaagaaattgataagttcaggggcatgatgataagagattacagagaacttattgaaaatgagagaaagcagagtaatgttatcacaagacttttaaacgagatggcaagaaaaaatatctttaaggatgaatttttccagaagccaatcgaagtattattatcacttacggataatgcagtcaatttcatgaaacagcttgatatactggtttcatcttacgaaagtatgatagaaaaacttgaggtagatgttgccatcgttgaaaaggagcgtgtaaggatagttgaacttcttgaggaatatgtaagggatgtccatgacgagcttggcaagatagatggaaattcaacgataaaagtgcatggagagagtaagaaaatgcttaagataactctgcctgagtggtatgagaatgaggagatatatcatcttaagatacaggatattcttgaagaggttactgcaaagacgataaaggcattagaggaaaataaaaatcctgatgatataacagggctttatatcaacacgaagtatctatacgatacggtggcaggtacgggtaatgtccgcataaagctttacaagatagaggagcagaaaggaagagaaatttcatggtcagatgttgcgaaaaattcaggtggtgagggatttttgtcggcatttatagttctgtcaagtctgctctactatatgagaaaagatgtgtcagatgtatttaccaattataatgagggaaaagtgcttgttatggacaatccttttgcacagacaaacgcttcacatcttttgaaaccgcttatggatatggcaaaaaagacaaatacgcagcttatctgcctttcaggtcttggtggtgattcaatatatgacagatttgacaatatttatgtgttaaatcttgtggcggcgagcttgagaaacggaatgcagtatcttaaaggggagcacacaagaggagatgaacaggaaacaatgatagcaacgcagatacaggttacacagcaggagcttatgttctaa

SEQ ID NO: 52725 - DNA, 1566 bp, Bacillus sp. FJAT-18043
atggaattgaaaaaactgtttgaagggatgaatgaacgctaccagaacttagtacttttcttgccggtctatgagttaaaccaaggcaaaaatccaaagtttaaagatttagacctaatggaaatagggtttggtgtcttactgtttatgttagagaagatgctaaccgaacgtggaaatgtaacgaacgaacagttgaatcagtttttaagtcaattaatgaacgagatgtatcaggaagcctatactcatgaggaaattaatgaactgagaaactatattgtggatgaaaagctgcggaataacggccaagactttatctacgactatatggactatcagaaaaaagaaatccaatatgttcggtttaaattaattgaatatgacaactggacctatgccgaccacaccaataaagaagtaaaactttgcctatccgataaaggaattgaattactgtttaaaacgaaagagtacttttctgagatgcaaatctctattactttattatattttaaacaacagttggaaaagggtgcttactcacaagttttaagcattgcgaaagagttgttgttccaaattgacacccaaatccgggcgatggatgagtacggggaaaggattaagcgaaacgtgctatctgcctttaaccaaaaggaaatgaaggcacgacttcagcgatcctatgaacaaacaaaaaacgaaagagaacaaatcgccgacctgcaggaaaacgtcgatcgggtcaaaatgaactatatcaacggtgtattggataaaaagggaaccaaaaactatgatattgttctagaaatagacaggctattgcagcaggctgcaccgagacacgaaaggttgttcgcaaaaaaattcaggctgcttactacgttgactaactccattcaaagattaatagaaaatgccttttcgagacattttcattttgaacaggaggttttggaaaactgggttgagaaaaaaatcacggaagaaaaaatccggaaaattttaaaacctataatgcccatcaaagtgccaaaggcatataatcctctcctctcttttgctccacaatcgattcggaggaagactgaagatctggaggaagaaatcattgaactagatgaagaagaggcgcaaaaacaaaaccaactcgttgaattgagggaaaaacaagaatttgtactggataaagaacttcttaaattcatacttcttcccttggtcgataaggagttttattttgtatctgatggtttagtaagtctaaggaaaaccaattttatggcgtatgtcgacttggaggaaaaacatcaacaacgttttttggagctcagcattgccttgcatcaaagcgattacaaaaaattcgaactcataagcgaagaggaattgatatgggatacccgggaaacccggttattgtgtgaaatgacaagaggacatcgagggttgctcaaaatacaggaatttgagatgtatgaaaccaacaaaacctatacctttttggacggcaccatcatcacagattatgtcatacgacggaaggatgaaatggaatga

SEQ ID NO: 52726 - DNA, 756 bp, Bacillus sp. FJAT-18043
atgatttatgaagaagatgtgctgatcaaagcctatcaactgcaccaacagttaatgaccaaaggggaaatacagaaaaagaaggatgccgatctgttccgtctgtattcagacccggatattcgcgaagtcctgcaacgtgtgtttttgccgattgaccaggcgatcattgtgaaagtggaggaaacgctctattttgttccggaagtgcacaataatgctttcagttataccaacgaggaactcagagaaaaagggaagtttcgtgacaataaagaactgtacttggcacagtttatctggatacttgtcatttcggagttttacggcgaccaatttttgctgacaggggagacccgttcctttgtgaaagtggacgatattttaaacaaagccaaagaatggatgggcaaattcagccaaattccggaagaggaacagctggaattagcttatcgatatgaattgaatatcccttatttactgaatgaatggcacaacctttcggaagtaactaataaagtcaaagaattgaggaaagcacggacgatggattatggttttctattaaaagcgctcggctttctggagaaagaaaaaatgcttgtggtgaaggaagaacaagaaattgtaatgatggaaaaaatgaaacacattatcgaccactattatcatcaagagagccggatcaatgagattaaaagtctgttgaatgaagtgaatgagagggtgcctgattatgccgagagtcaataa

SEQ ID NO: 52727 - DNA, 4344 bp, Bacillus sp. FJAT-18043
atgccgagagtcaataaagtgcgattgtccaatatccgattagatgacaagaataagattatcaccgataagacctttcacatatacggggggagcagtctctttttattagaaaatggcggaggaaaatcaagcatcatccagtttatccaccagttgattttacctaatcatcagatgggtgaaagaagtatgaaagaaatggttccggttggccaaaccattcacattgcggcagaatgggtacacgaagatgaacagcgctttccctttgtgaccggcttttgcttcgaaaatactgggaagaaaactgccgattcaaaggatgaataccaatatttcaattacatcattgaatatgactttgaagggtcataccggatagaagacttgccttttatcattgaccgtaaagtggccaattacaacgtgctaagagaaaaactgaaaaagtcgaaaggggtcaatctgcctcccaccaacacccgttatcaagaggaattggaatcctataacatcctttctaccgaatggaaaaatatctcattggtcaacagttcggagggcggggtaacggacttctttggtaaggccaatacgacccaacggctattggaaaagctcataataccgtccgtactggagagcttgtatccggatgaaaaggaaaggtattccttcaaagaatctttccgcgaatataaggatagtttaatggaacttcctaaaatgaaaaaaaatctgcaggattatggagtgattaataataacgccggcggtattatacaggtttgcaaagattacaatgcactcaaacaatccctgattgagtcccaaacgctattatccagactgtatttcacgcttttggaaagttccaaagccaatgccttggaattagagggtattgcctccgaattaataaggctggcagatacgaaaaaggagctggattggaaaattcgttcgtatgatgtgttccttcttgaaaagaaatataaggaagctaaagaaaaagcggcactggatgaggaaacgttcactaaaactgtggtgaatctggaaagtgaaaagcgtagggaaaaagaacagctggcggcaagagcctaccaggattatcagacgaaccaaaccaagcttgccaaaaagacaagtgaattggaggcagcgcggctcgagggaggagaacggcaaaaggaattaggaaacattcgaaacaccttatcccgccaattctattatttgtatcagcaaaatcaaaaggcggaacgggacttgaaagaggaacaaaatcgcattaaaagggaatgggaaaaagttcaagatatcttgaccgagactaatcaggaaatggaaaagctggggaaacgccaggcagttcttcaacatcaggtggaaacctatgataaagaccttatagggttgaaacagggattgattgaggattggaaagaggacgaacatgccacacaccaccatttaaaggaaaagctaagcgctgttgttaaggaagaggagttatataaggcacaagcggaacagtgcaggaatcggattaatgaccttgaccagctattggaacaatgcaacacgaaagaaaaactgacgcgaagagacttggatgaagcggaagctgcttatgacaaattttctgaaagagaaagactcttaattgatagcacctataagtatgtcacggtacgagtaggcaatagcttgtttgaggacagggctctgattgcaatcaggttagaacgcttgaagagtcagtacgatgatgaagcgactcagttatccattcaaatggatgagataggacaaatccgtgccattattgaaaacaaaggataccatattcaccaagagttagagagggtcaaagattacctggttcagagagacaacgaggtactactcggagtggagtggattacaaaatcaacaatggatgatacctcgaaaaaagaactcttgaagaagaacccgttgcttccattttctatcctggttgaggacgtgcagctaacgaaagtgaaaaccactcttggccattataaagaagagttgaccatcccagtcattttaataaacaagtcacagatggaaatagaaccggaaaaggactctaccttccagctaagtgaatccgcccacatcttccaccatttcaatacgcgcttaaaggccgaagactgggaatcctatttggttgagttggaacaaaagtggggcgatcttgacctcaaacggaaagaaataaaggggaaattacaggaactgcaattgtttgaacatacccttaaagacttttggaaggaatatacccctcattcccgcaaggaccttttaggtcgggtaacagagttgcgagatgccctccgaaaaataggggaagaaaaaacggagcacaacaaagaaaatgaagctcaatctacttcttattcagaagctgaatcccaaagaaacgaaaaagagcaactccgaataaagttggctggggatacaataaggctatcggattttatcaaaaggtatcaatccattcccactgctcggaaagaattggaacagctaacaaaacaactcgaggaattagggcgaattaaaaatgctcttaaccaaacttcccaagaatgggaatcagcagggggagcggttcaagagaaaattacccagcttcaaaaaagtttcatgcttctaaagagggacctggaggattatgaaatagcggaggccgaggaaacaacgcctgcgacagaagtggagtataaggatacacttgaaaggtataaagcgtttcgagaacaatatagttcagaaagtagacaactggaaattctggaatcgacccaaaaccattacagcgaattggtcaaacgggcaaaggaagacattcataaaaacggatttacagtggaatcaatggagagattgattctcgaatatgacccatacttgttggagcagattgaatataacatctctggattggaagaacagcttgaaaaggatagggatcgcaaggaaggttcaggaaaagaactagccagtgcaaaaactgagtatcatacacgtgtggagctattaggggagaagggcatttacccatacgggacggaagccaaagcggaaaaagaattgtatgaaagcgagttgactatggccaaatcaaacgaaggtcggtctatggaacggcaggcggcattactgaagcaacaattcggtaaccaggctgcaattgaggatttggagacgacgaaggatatgctgattgcttctgcctcccaaaatttattggaggaaggacattggaatcggcagaaaccgattcagtatgtcagaaccattcggtatgatatgggtgttcacaagtcaggaatggagcttaagagaacggaattactgaaaaaaatcgacgaactcaaagaagatgtccgtgaaaccaacaatacccagttgttacagttaacctttgatttgtccaaaatactcgacagttccattgaagattatcaagaaatcatccgcacctttgaaaatctaatgaactatgttcaagagttagaagcaggcattgaactgcaaaaagctgaattggatcagcggagcgaagagttggtggaacagatgtatgaccgggccgtaacggtttataaaaacattatggaaattgcaaagagttctcaaattgaggagaaaggagaaattacttctctgttccaaatcagttggcataaaaaatccattgaggacgcgaagatggaaatagaccggtttatccaacggttactcgaggacctcgtagcaatgaatgagcggaatgcccctgtaaaagaaatggatgaactgtttgaaaagcgggtcaatatggtggatattctcaactgctatgcagaaacatcccgttgtatcatcaaaacgctgaagcatcggaatgagttgctcaataaaaatgattattatacctgggacgaggtatgcaagtggagcggtggggaaaaacacgccacccagatttccttgtttatcgctttgattaaccacttgcggagaaaacgatatgcaaaggaaaatgcttggaaatttatcatcttggataatccatttggtaaggccagtgctgactttgtggtaaaaccgatggtatcccttgcgaacaaaaccaacactcaattattctgttttaccggcattaaagagaaagccatccaaagggaatttgagacggtcataagcaaccaatatgtcgagcaaagaggtcgactgctgctacgtacagaagagaaacataaggatccttcaatggccgaacttgataccattttttttgtgaaacaatattag

SEQ ID NO: 52728 - DNA, 1044 bp, Bacillus sp. FJAT-18043
atgaaaacaaccatcgaacaatatatagcaaattttaaaaaactacgatttgaagtaatggagctcgaattatatttgaaaaatgaggggttaagaacacccctgttttataaagaaatggctaatatcattctggaacttgtggatgaaggaaaagtaaaaccaataaaatcatcccaatcctattcaatggatagccgtattctaaatcgatatgaaaaaataaaacaaagggcaaaaaatgactatctgaaagacgaaatgttgaccaattatcataccattatatcaatgacttattatttaaataggccggatcaatataaaaaggaaaagagtcaattattggctattagccaattcctgacgaataaaaggaaaagtgaaccggtattgtctgtaaatgaacggtcctaccaattgtttggagatgaaaagttgttattcagcaaaaaaggaaaaaagattctagctaatatcggcatcacataccagcacttatgctgctattttacgtatgaaccctttttttactacagcgtaacacaggctgaaaacaacgccattttaatcgtggaaaacaaggacaccttttttagcttgaaaaagttattacaagaagggaattattcgtggaatggaattcgattttctatgttggtgtacggagaagggaataagattacccgctccatagactatatggatgaattgcaagttccggtggaaacaccgatctattatttcggggattttgacccaacaggcatcagtattttctgccgagtgcagtcatcgtgtgatagggaaattaatttaatgacctcattttacagggaaatgtggaaacggagaaaagacggcaaggtccagaaggagcaggaatggaacgaggaggccatcacccgttttttgagcaactttgataaagaggaacaacagttctatctacggtacctgaaagaggatcaatatataccgcaagagtcattaagtatagaggtgttaagggggctttcggatggaattgaaaaaactgtttga

SEQ ID NO: 52729 - DNA, 1410 bp, Bacillus shackletonii
gtggaaaaaatggataagtccttaatctctatttttaacatggatgtggacaaaccagagcttctccaaacgatgcgcgacatggctgcattagcaggtgttttaaatgatttaagtgataaagaatcatttcatgctccaaggaatgtattacgcttcatacgaatacttaatctcattaatcaagaagcgcttggtatgacggatccgattgaaaatgaggacacactcttttatcggtatcgccacacgtatggctatgacgaagagatgactattgaatatgtgaaacatttaacctatgtattagggaagtttaattggataacgaagactgcaaagcgaataaagatgcgagatctaggaaaaagaatgatggatgttttaattcgattggccaatgattcgcttgcttattatatgaatgacgatgttgctagatccttgttccaagcaaagagagatgcagaaattagtgaagcctatgatgacaagggtatttcaggtggaaataaattagcaagtatgattaaaaatgtagaagaagccattttgctgcttactgaaagggagttagaatatttagctgatcgaaatgcattgtcccaagtagaagtaattcatcaattgatgaaagaattggaaacgaaaatggtcgaacgtctggccaaatttgaaacatttgatcaggaattagtgtttgcttctattaaacaaagaggtatgactgcaattagtgaaggaacaaagattagccttggcaccattaacaaaattctgaagttcgcacatctacaagagacagattttattgaaacgattcaaccagatttacttagaaactttatcgtgcaatcgtttgatccgccaattggttcagaaattccaaatgcccatcaaatccttagttttatggaacaaggtcagtatgagggcgaagagttggatggcctttgggcaccagttaaattcgctagccccttatctccgaacgccattgatgagggaatagactatatcgagaattatgaacctgttacagatgcaattgaggaagaggtggaggaggattttcaagaaatagatgaaatcatggaggatcaattagaagaaataatgggtgattcaaaatggcaaatgacgaaacaaatgattcatacggagcacattgaaaaataccttgatgaggtagaagaagcgggattagatgagttagttattcaagctgggtctgacaagtggagtgatgtattaaacgggttaataggagtgtctgcgctagttgcgaataaaaaggcagatattgatgaaaaagcaaaccgaaaaataaaaggtcatatggaagaaagagattggaggtgggcagatgataaacaaggaagctatgcaattagaaaacgaagaaaatga

SEQ ID NO: 52730 - DNA, 693 bp, Bacillus shackletonii
atgcaattagaaaacgaagaaaatgaatacatgaacgataatcccttgagtgcattacagtcgattcaaggatttttaacgaaggaagaagagcttacttttatgcaaattttattttcctcttctgctacgattcgaatgggaaactttgggctttcccgcaaagaagtggagaaattactaggtgtaaataatgaggaggcatttttctcttttttaaagcgagtgaatcaagctgttagccgttattttaaagtgatttatgatgaacggaggaatcaagtagtggcactgatgcgtgttcccgcaaaacaggccagaaatgtgttaaataaggaaagcttggccattcttatgtttattttttatcatcaagaagtgctgcagaatgagtatacattgttctcacaattgatcaatagttttggtcatgaatccctacaggtaacaaggaaaattcaagtgaatcttgaccccttgaaaaaaataggtgccattgaagtctatgacaccaactcagatgaagaggcgtatcagttaaccgcgattggcacccatcttttttctgattcgtttttacggaggtatgccgagttcagtcaatcgaatcagcttcatatggaggatgttctacgattctttaaacgctacaacatgaatggaggggtgacggatgattccttggaggcttag

SEQ ID NO: 52731 - DNA, 1278 bp, Bacillus shackletonii
ttgataaataatgcatggaaagattatttgtatgaatatattttattgaaaaatgaggaacttaacttactagatattagagagaataatggaattatggatattcctgttgtaaaaaagactgcccgaactagaaggacggttgcgatgttgacggtgggggttcataaccaaaatgttccaccagataatttggttaaaaattttacaagcccaaagacaaagaaaccattcgaacttacaaatgaaacgtatgagtggattcgaaacgggtggatcattagagagtatcgcttggcaaaagacgaacgaactgttaaaagtgaacattatcgaatggggttatctttattccagtataaaaagcaaatcgagcatgaccaagaaacagagaaaatggaatccatcctcgaatggaaaaatcaatggaataaaataaagaaatccccttcttcatttaaccttagacgtaaagaaatactcaatagattaaaagatattttagatgaaatggtaacagcagatagaataaaccacagtaattctacttggaggtttcaaaaacaactgttatttttacactttttagttgccttttatcaaatttcaatggtcgaacatcattttgattggaagcagattggagcaaggtattatcggaaaattgggggctcaaaggaattcgattcctataaaaaggaattcattgagggtgctgaagaactgcttgagtatccactgcatttactcgggctaagcagtttaggtacgattaccccgatttattttactggaccaatgcatggggaaagcgtctcatacgactatggaccaattcatgcaacaacagatatagcggtttttaccgaggaatttcaaacagacgcgcaagttttgtggttggttgaaaatcgagggattttaacacggatggcatatgaaaaggactttttattagattcaaagagtcttgtattaggaatcgatggccagttaaggtctgcacaccgaagattgattgaacagcttgtttccaatgtgaaacaagtgattatttggacggatgttgatgaagcaggactcactattgcgaaaaatgtaggagaaaccgtagaaaaatgtcaggtaataattaaatggattgttcctccattagaagtagttgtaaatgttgaagagtttaaatcacggtatgaaaaagcaatacaggttcaaaaggaagaacaggagcaagagattgggggagtagaacagtggaaaaaatggataagtccttaa

SEQ ID NO: 52732 - DNA, 1557 bp, Streptomyces sp. Root369
gtgatctttgaagagccgtccgcaatctacgaaagcatcacgtcgcggatgcgagccctagcggtggtctatccggtgctggccttggatgccagcaaggccaagaaggagcgcgggtgggacccgtaccgcatggctgaactggccttggccgcgattgacttcgtaacgctgcgcaccgacatgcggacagccgtgcggcaggagacggtcgtggaacacgtggccgagttcgccgcactgcagcagccaggccggcctggggaggagcaccgggcagtcgcccgctgggtgaccgagcggctgatcaacaccgaagaacgcgaccgcgctttccgtcacgacgtcgggtacgtgacagacaacaagttcgagacgcgcgaggcatctttccagatcctcaaggaagtccctgatcacgtggggcaggcagctctcatcgccacggacgcggcgatcaccgtgctggtgcatgcgatcgacgtcgatattgcctcggaacagatcgccgccgaagccaagctggaagctctgctcaagcgttcacggatcagcgaggcgtggcaggccgcgcacaacgcacggatccagagcgtccggtacgccaaggacatccatgggcgcatcgaagccatgaagcgcaatgtgcgggctttggactgggacacggaagtcagggacacggtcgatgaggctttggagcacgtgcgcagccggtccgcggccgagacgaagcacaaggagcgggtcaaccaactactggaagccaccgccgatgaacgcaagcgcagacagctgcaagacctggaggcgctcatccacgagtgctggcaacgtcacgcggtactgattgacatgctgatgacggtcggtccggagttccggcgccaacaggaccgtcaggtgttcgtggctccggcgattcacacccgcgtacatctacatgagcagctccttcagccggtgctggaactctcacttaacgcgtgcttgggccccttggaggcgttcactcgtgccgtcatggggcccgtgcgtcctcgtgtgatgtacctgcccgactttctggaagggctcaccagggtcgccgaggaggccggcggggagctggtgccggttcagaacgagtacgactggtcggagatcgacgcccgtcccgctttcagcgaagagcaacactacgcggtggacgcgctgctggctgccatcacggaccagggcgtgcggctctcgaccctgctggcggccacacgccaaccaggcccgggaacgggaccggaatcaggcaccgacgagttactcacgcttcgcacccagcagctcttccggctcattccggtgcgccaactcgtcgatggtgaagctgccgtggtggccgtcgacgacggcacagtcctggatgacgtcctctttggcggcagcgacttcctcctggtccgcaccgggggcatcggtacctcgcaggaggcacagacgaacgcgccactgcccgttttcccagcaccacgccccccgcaaggtcctgacgcccaccagcttgatcaggagagtgcatga

SEQ ID NO: 52733 - DNA, 4458 bp, Streptomyces sp. Root369
atgtatgagctcaatcgcatcctgctgcgaaacttcgggccgcgagatgcccgctacgaagacgtacccctggacttctccggcgccggcgccgaagtggagaccgcctcgctgatccccgacgccggacatgtcgcccagcgcccggcacccgccagcctggtgattctgcagaacggcggcggcaaaggcgtcttactgaccggcatcacctgcaccaccatcccctaccgtcacagcgatctggagacactacgcaacttcaccgtttcgatggcccagccgtcgcacgtggtactcgaatgggccgacgcccgcaccggacgcctgctggtcaccgcacaggtcctggcccccgaacacgacggcaaactgcaccgctgcttctacagcttccacccttccgcagccctggacgccgaccggctccccttccaccgtgaagggcactggaccccgtacgaggactactgcaccgaactgcgcgactgggaaaaacgagtggaagcgctcgaactgcacatcgtcgaaggccaggagaagtgggagaaacaccagcgcggcctcggcctgcagcccgaactctttgacgtgcagcgcaggatgaacgccaaggagagcgacgccgccgcagccttcaccaccaacaccgccgacgccttcgtcgaatggctgctgcgcaaggccacagacgatgaccggtacaccgaactgggcacggccttccacggttatgccgctgcacatgacgaacgcgccctctgggaaagggagcggcagttcgcggtggagatgcagcacgcatgcgaggacgtcgccagcctccacgacacgctcaaccggcacgccgatgccgccaagaacgccgaaaaggacctcgttcacctcacctccgcgatccgggcacgtcacaccgccctcaccgccaccgaggccgagagaaacaccaccctcaaggacacgcaccgcgcgctggaagccgcgaagcgcaccagcgaactcgcccactcccgcctccagcacgtacaggcgtgttcccacaccctcgaactggacgagatcaccgcccaagagcaggaaacccagaagaacaggcaacaggcgcaagatgagaggacggcgtgggcgagcgtcccgatcgcgctgcgtcacacacaggcactggacaacaacaaccgtgcccagcgggccctcgtccaggccgaactaaccgccgcccccttcgtccaagccctcgacgccgcagcggcagcgctgcgcgcgggctatacccgggccgagaaagaggcccgcgacacgatccgcacgcacaaagacaccacagccgagacgcagaagcagatcgaacaatggcgtacccgcagcaacaagctactcaccgcggtaggcgctgcccaggaggaaacccgcaccctacagaagcagaccgacgccttcgcattacgcctgaacgccgcccaggaacatgatctccttgccccgcaagaaagcgccgccgatgccgccgcccgcacccaggatcacgcacaccacagcaagcagctgctgcgtgaagccgaccaggtccgcaagagcgtccgaaccgaacgggaccgcgcccacaccgcactggcggagcaacaagcactggcctggtccgcgcgtgcggccgcgacggcagcggacgaggagagcagccaactgcgagctcaggctgtagccatccgcagcaacccgctgtgtgccgagctattggaagccaacagcgacgagcttggcgccgacgacgcattgcgctggctgggtgaccatgccggcgccctgcaccagctcgccgagcgtcgcaccggcggcctcgagaccgcactgacacgcaagcacatcgacctgcagaacgatcaggatctcctctccctcctcgataccagcgagggcctgctgcctgccgccgaagaggtacgcgacctgtgcggccaactgtcggaccacgggatccacgcggtgcccggctggcagtggatgcgcgacaacgtcccgaccacggagcgccagcaggtcatcagtacacaccccgacctggtcggcgggatcatcgtgggcggtctcgacggcttggacacagcccagagcattgtggagcgccttcgccccctgccctccgcggccgtcaccgtcggcaccggagaacggatgctgagcacccaggcagcgtccgacggcggacgattcgtggtcgaacctacccccgccctccacgacgaagaagccgccgcacacgagcgcgctgcggtcgacgcccgcatcaccgaggtcacccgcgagttgaacttgctcggacagcgcatcaccgctgtacgagaccttctgcgccagatcgcgaactggcgtgatgcctgcggtatgcggactgtgtccgacctgcttggccagctggaactcctggagacctctgctgaagaggccgagaccgcactggccgcagcccgcaccgcagcaggtgagcaggagactgcgctggaggtcgcggaggacgaatgcgaacgccgtaccgaaggtcttaaggcagcgcagacgatcgccgaggatctggctcgcctggcggaggaggagaccgctaccgaccaagcacgggcccggatcaagacccttgccggcgagagggtcgcccgcaccaacgaactcgagttactggcgggccagatcgaccaggcggttgaggagatcctgtatctcgcgcgcgccatcgaatcagctgagcaggccgcagaccgatacgcgcgggcgcgcgaagagatcaccagcacgtcccaagcgcaacaggcacacgacgcctccaacgcaaccctgttgcccctcccctctctccaacatcgctatctgcaagcgcaggacgagctgaggggcgttgaggtcggcgaggaccagcaagtgcgcgccacggccgcgcagaaggctctgctcgcgagccaggaagaatggaacaaagtccccgaacaggtacgaggtctggccatggcccacagtcgcgatggacgggccggtgaccccgttcaacgcgacgccattctgcgcgccctcgctgccaagatcgactcctgcgacgtggcccttcagcgactgcgggatcagtcgagccgtcttgcggagcgctccaagcatctcacctcggcagtctcgctgaacgacgaagacgccgcagcctggacaccgaccaccgttactgaggcccgcgagctggaggcccgggccacgggcgaactcgacacggctcaggacaaggaacgtcttgccgctgcagcgttcaacaccgcccgccgcgatcaggccagttccaccaaggagcttgcggcattcgaccgtatcctcccggtgctggaaaccgctgtccacggcctagccgttcctccggaccgggagccctacgacagcactgcggaagcagccgcagtcgccgctcgacaggtgacagccgcacacaccacgtgccgggacgcagcccgccagacagagcgaagcctggaaggaagcgtcagccggctcaaagaagtacccgccgatgtccgattcgaaggactcgacatcccgctgcgtacgcagatctccgccctggacagccgccacatcccagcaatggctgccacctggaccgatgcactgacctctcgcatcgcagccctgaactcagatctcgaaggcatggccaaggcccgcgaggccctcgcctcacaacttagcggccacgtcaccgaccttttgcagcgcctcgaccaggccagtcgcttctccgccttccctgagggggacgctccctggtccggacagaaattcctcaacatccgctacaagaaaccggatctcactgccctagccgcccagatgcacgaatccgtcgatgcactggccggcaatcaacgcactcgcaagctcaagggcatcgacgtcgtcatgcgctgcctcgtagcagccgtcccccgcggattcaccgccgaggtcatgaagcccaacgcctcccaacgcctggaccgcgtccccgtcgaggaaatgagccgcgtcttctccggtggccaggaactgaccggggccatcctcctgtactgcgcactcgccgcactccgtacttcacccggacctcgcagccgcacccgcaacggcggactgctcctgctcgacaaccccatcggccgggccaacgccgggtacctcgtcgacatccagatggagatggccgccgccctcggaatccagctgatctacaccaccggactgagtgacgaggacgtcatctcgcggttccccatgcgcatccagctccgcaacgacgccgaggcccgaagcggcctctccctcatccggctcgatgaacaggtacgcaacgctctcatccccgccccccgtatcactccagaccaagacgtgcccgaacccgtcggtgtcctcacctctgcccggctgtacaggaagcagggcgacgctaaatga

SEQ ID NO: 52734 - DNA, 951 bp, Streptomyces sp. Root369
atcgaggcattccgtgatgctctaccgggcgccgccagcggcgagaacgcacgcagcacgctcgccacactcctgtacgaaatcgccgaacacggcatcatcgccctgcccacctcccgcaccaaatgggacgccggccgcccggcccttccggaacaggtccggatccccaccgcgccgccagcgaaatcctccaccccacgacagcatgtgtcatggcggccagagctcaactgggcctacggcacccggttgaccgcgtcccaaaccgaggacctcttcgcctgcaaccgctggttccgggatacccacaaccaaccagcccgccgtgctcccctccccctacgcgagcgctcacacgagatcttccgccacgaaaagcgcctcgacaccctgatcaccggagcactctttgcccccggcagactgaccctcgaacagctctccacctaccgcgaaccgccaccgctggcccaccgcaggctcggcgacggcgacaccatgctcgtagtggaaaacagcgacacctacgccaccttgcacaacctgctcaaggccgcccccggccccatcggatacatcgccttcggctccggaagagccttcgaagcatccgtagaaaacatcgctgagctccctggcatccaccgcatcgtctactacggcgacctcgacgccgaaggcatcgccatcccagccagagcctcaatcaacggcgtccagcacggactgccacctatcgaaccggcgacggggctgtaccgcctgttgctcgctcgcgaacccaacgccggcgacatcatcgccaacgaccgggcccacagcctgacggcatggctccccgaggaactccggcaggcagcgcacatcctgctgaccaaagggcaacgcatcgcgcaggaagcaaccaaccggaacgaactcagcgtcgatccagactggcgatggtga

SEQ ID NO: 52735 - DNA, 1527 bp, Paenibacillus sp. Root444D2
atggattacatagaaattggtcaggttgtttccgggtttcgggaacgtatgaccaagctggcactttttgatcctctctatgagcttcagagaaagcggcaaaccgatcggcaaaataaaccgatagatttcatggagcttgggctgttgacgctgctttacttttttgagcagaagttgatgcgaaacaataaggcgggtgtcaaagacttagccgagtttcttttgaaagtgactgggattttcatcgatttggatgaagctgaatttgaggatctggcaaggcagattacgcaagtttttcgtccaacgacagggaaaaaacgggatttcacctttatgaattgggaatccggccagtcggagcatatttatatatcgattctgaaagcgaatgccttcgacctaaaaacgaatacgcagtactacacgctcgacgaagatgggttggagcttatttttgcgaccaaggaattttataccgaatttcaattatctattcatcagttggtactgcgcaagcaattggaaaaaggcgagttcgaaggagccctgcggcaaattaatgaaatgcggattgatgtggaagctttgcaggagcggatggtcaagctggagcatgagttgaaaagaaatatcgtgtcggaagagacgttcggacgttataaaggtctgctggaagatatctatttgcgcttgcagatggagaatgaagaattcgaagaactgcggcaattcgtgaaggagacgaaggatcgcgttcaggcacaaacggttagacaagcagatcaacggccttatgagttaattttacgtatatccaatgagctggagaaggttcatggcgagcattcggatctatttcatcaaagtatggtgttaaaatcacatgcacttggcgcagcgcaagaatccttatattacaccgggttggattcctttaattttgatcaggatattgcttctcttatctttagtacaccactgcctttggagacgatgaaaggtgtgctggccccgttcttaccggttcaagagacgaaggcgtggtcgcttttgacggtgtgggctgagcaaaatatgctagaagacggcagtggacaagaacgggatgacaagttcctggaacttggcggagacagcgacgaaaaccgttaccaaacgatgcagaaaaagttgtacaaacttctgatggagcagctgctgcaaatgatggaagagcagggccaagttgaattgaaactgtttattcagctgttcaaagagagcgagcttgcaagattgctgggcgaaagagcgttctatgatttctggatctatttgcatcaaagaagtccacttcgggcggatgatagggataagcagcaaaatgaagagcaggggacgttgctggaagatatgtatatgcttctgggaagccgctgtctggtcatcatagagcaagaagatattattaaggtaaacgatagatttagcattcagaatatgttgatttcgtggggagaacaggatgacaattggacttga

SEQ ID NO: 52736 - DNA, 762 bp, Paenibacillus sp. Root444D2
atgacaattggacttgaaaatgggacagtaatgagagcttttcgcatctataccttgttagctcgcgataacgcagttggcaaagagcggctccaagaatacatggccgacgatgtggtgcgagggctagtggatcaattcgcgcgagaagtcgattgcgtaacggttattgccggtgagcagctgtatatgattccggagacacggctatcgccttttcatatgaacaacgaagtgattaaacgtacctatctgcgggcgaatgccgtgaatgcggatctttatctgatgtatgtcagcatcatcgtgttgattggcgccttttatgacagctaccaaacgatggagccgacgagaagttttatcggaattgaagagtggacggaacttgtgaatgagcgaatagcattattgaagacgcatcctgaagctgaactaagagagatggagcaggagttttcctataactggacggccttgattgaaaaatggagtgccatggacgatatcaaggaaacagctgcgaggcaaagcgggaatacgattagccgtgttagcttcatggattctgtccgcaagtttctggttgcgcaagagttagtgatcgatattggcaaccaggaaattacgttaaccgaaaaggcgaaagtggtcgtgcagcgttattttatggagctggaatataaccgtggcattttggagtttttatatcaaagcaatgcgtttgaggaggagggaagcgaacatgccagccatctctaa

SEQ ID NO: 52737 - DNA, 4431 bp, Paenibacillus sp. Root444D2
atgccagccatctctaaaatacgttttaccaatgtggtctatgaggatggaaataagcgctacaacgatgaattgtttcatttcgatgggcataatggcgcgattcttctggaaaatggagggggcaagacggtttttatccagtctgccattcaagccatactgccgcatgcggaacttgccggacgtaaaatgaaggatacgttaagtctcgaaaacggccctgcgcatatcgcgatcgagtggattctgagtgaacggccacggagatatgtggtcacttgcattagtttgtttctaacagcaacagggatagattcctatcggtatgtctatgattatccggagcttgatgccgatgccattgatcggataccttttgtcaaggaaagtgcaggcagccttcgagcagccgataagggcgaaatccatgattattaccatcaaatgacgtcgaaacggatgaacgcgaagctgccgtcatcgattaaagaatacaaaaaagtattggaaaacgattaccacattatcgcatcggagtgggatcgcattgcgaagatcaatagctcagagggcggtgtagagagcttttttgatgaatgtaaaacgacgagtcaattgttcgatcgcttgttgatcccaacggtagaggatgcgatggccgggtatgaacaaggcgagttcgcgaataattttgaaatgcacagggacagcttcaaaaaatataaagaattaaaagaaaaaatcgaagaaaataagaagatcctcgttgaattggatggctatgtgcttcattttgccaaaatggatgccaaacagatggcttatgcagctgcccaggccgaaacgaaggcctattggttattagtgaatgagcataaaaatgaggaagcctctaagctttcacaatggcaccggcaaatggcagaatgcgatcagcagctgctgttattggctcggaagaaagaatcccttcagattgccaagcaaaaacaagagcaatccgctttggaaacaaagctgagattggtcgaggaagacgttgagcggaaagaggcgcaagtacgaagtgctaagcagcactactactctctgcgtttggcagattacaagcagcagtggacctctgcagaagagcgcatgaactacttgcagcgcgaactagatcagttcggtaatacccaagaagagggggatcttcgcgaagcatggaacaataatagcgggcaaattcgcagtatttacagcaagatggagcaagagtggcaggtggaagaagagaaactcaggcaggaattagatgctcatcagaataggacggctttagaggaaacgattctgagagatctgtcgagcgaacttgagggattgaacaagcagctcattgaacatagatccattgtgcaggcccgcgagaaagataaagaagtgcttagagctaatgttttggcaaatccagcagtcgagagcatggaaggcagtatgacggattggattcagcgttatcagaagttggatgacagcaatgtgctgcttgtgcagaataacaaggatttggcattcggtaaagaggaaagcatgagagagctggaacgagtgagtgaaagccttaagatcgcctatgtgggacgcgccagctcggagcaaaatctcgaagcatttaaaaaagagcatcaatccatgcttaccgaaatttctgcgtacaggtcatcatgggggagactctcatccgtatatgagaagcagagttcgattgaagagcggcttagggaggatttggaaaagctgcacctgcagaaagaagcatatttgctgaaagaacgtctcgctttccggtatatcgatgattacagctaccagcatacattttttgcggatacctatgtggcaggcttggtagacaagtggagaaatcaattcgcgttattggagacaggcattcaatatttgcagggcttagacctaagcgagcgggcaatgacacatcctctgtggtcagtgactttgattacgacagaagaagaggttgggttattaacgagcaagcttgggcagtatgcggaggatatgcagtttccgattcaagtcatctcatcgcaggaagcatcacgtctagccaatatggatacgccgatagctgtgcaagacaaagcttgggttgaaccgcagcattggcgtgaaaatgccgatgtcgctgaatttgcgagctggaaacgagcgatatctcaaaaaggtgaagaggtcctgacagcacgtaaagtaaaggaaagcgaattgcagcgtacttctgatttacaaacctctttcagtcgattcactgcttcatacccgcttgaggtcgtacaagaaatggaaaggcaagttggacttaagcgcgaacaagtgcgtgaattagaaagccaggaggattccattaggaaatccgttcgtcaggctgagcaaacgattcagcagcacaataacatcatggacgagcaaaaaggtgaaatggttcagctccaacagtggattgaaaaaggacggacatatgtcgagctggggaaagaaatcgctgcattgaacgtggcgattgatcagcttgttgaacaggcagaagatcagcaaagcaagttggatagcaggcagcgctctatggagcaagtgaagctgcagatcgaatcagtgaaaagcagtatgaactatttgaggaccgagaaagcgagtcttcaaagtcaagatacgtatatagagactctcgatgtacagccgattgaaacgaatcatagtttagattggttgaaaacagaaagaaaagatttgcatctcaagttaaatcgcatatctcaaggacgtcagcagcttgaaacggagtggaatcatgccaagaccagcagaacaacgctggagaaggagatgaacaagcttcgactggaacaatcggacttggatttgaatgaggatcttgcgttttctgtgaccggtgaagaccagatgtcgcagctgttatcggagctcaaggattttgaatctcggttgtctcgtgacaaagaagaatttacgcgagttgagaagcaatttgatgcactagcgacgacaattaaactactcattgagcagtatggcgctgcgcattcgggtgggctgcctgtaacctttacagagtcgctgacagtggtggatgatcaagttcaaagcgaagaaacacgcctgcatcagcagaagacgggattacagcagcagcatacacaaattcatgcccaattaggtaaaatcgaagacgttatccaatacttaaatcaatataaaatcatgcatgggtttgaaaatccgctcattcaggcgtcattaatcacgcaagaactgaaagccgagtttctgaataacaggatgaaaatggtccgaaaatccgtgactttgttatccgccgttatgaaagaactggaagccgaagagtcttctgtgaaaaaagccagagttcatttcgttgaattttgccggaaacaaatcaaagatatcaaaatgagagatatggccgagcaaggtgtcgagaaaaaagacaactatcaggagctaatgcaatttcaacagaaaatgcacagccggattgaacgtgtcaatcatgtcgcagaagaaacgatgcgtacacacaatcaacagctggaacagtatattattcatgtgcatagccatatcaagctaattgcttctgagcttcgagatattcctaacaaaacgagagtcaaggtcgaggatcagtggaagcacatttactcgtttcaaattccggaatgggatgagcttgaagccaaggaccatctgcgcaagcatctggagtggattttggccgaactggacaaaggtcattaccttgatgacaacggtcaagaagtgaaatcgacggttcgcaaggagatcgaaaaatggttggataccaagcagctactgcacattgttttgcaagaaaggccgatgaaagtatcctgccgcaaagtaaccaatgagaataacgtgacgaaggcctccttctcttgggagcagtctaataattggtccggcggggaaaaatggagcaagaatatgaccttattcttgggattacttaactatgtcgccgagaaacgtcagcatattcaagcgaatatgaaaagacatcggaccgtgatcctggataatcccttcggaaaagcatcgagcgaccatgtattaagtcctgtattttttatagccgaacagcttgggttccaaattatcgcgctcaccgcgcatgcggaagggaaatttcttaaagactatttccctgtcgtctttagctgcaggcttagacaagcggctaatggaagcaaactagtcatgaccaaagaaaaggaaattaatcaggcctatttccgtgattatgcgccgatttcactggaaagattaggggatgtcaagcagatggagttatttatatag

SEQ ID NO: 52738 - DNA, 1026 bp, Paenibacillus sp. Root444D2
atacgcacttatttacaatcctacaagaaaagtaaagtttcactcaaagaactagaagacatatttccagtacagccaaccgatgaacaatttgctggtgcaatattggaacttgaagctgcaggaattcttcagatggttccgagtctaggcagaacggggaaacgactttctcttgcctatcaatataacgtacagaagaatcgtttaatgcaagatacgcataaggaaatcaatcgagccagactgaatctgcatctcttgataaacctcgatacctactattcattgaaatctagcatttgggaggaagataggccttttattgaacgaatagatgcttatttgaagaagaatatgctcccaagtactccagctccggaaccggagagaagctttgagcttgttgctgatgagaaatggataacggagaagcaagggaaagagatgctgatccgaatcggtttgtgggataagttgcttattctacctgtggatgatcccttaatgttcgctgttaatccttatgttcttaccaattcggttcacaagcatctcatcgttgaaaataaaacaacctatcaagcgctgctgcaagttttgccggatgtcccgttcgcgacgctaatttttggcggcggttatcgtgtaacgaagagcattgagctgctgccgatgcagcttccgctcagggatgctgcgcatgagttttactattttggagatatcgataaagaaggaatccacatatggcatctattcaataagcgggtgcttactcttttcggcagacccgctagtctggcccttcccttttacagagcatgtctgagcagggagtttgcttctggcaaagaaaaccaacgtaattttgagcaggctttacaggcatttgtgtctcattttacagaggaggaacaaattaaaatcgaccgttgtttcgcagccggcggttacttcccgcaagaaatattacctacacacgagctttgtacgatttggaggcacacagcatggattacatag

SEQ ID NO: 52739 - DNA, 1527 bp, Paenibacillus sp. Soil724D2
atggattacatagaaattggtcaggttgtttccgggtttcgggaacgtatgaccaagctggcactttttgatcctctctatgagcttcagagaaagcggcaaaccgatcggcaaaataaaccgatagatttcatggagcttgggctgttgacgctgctttacttttttgagcagaagttgatgcgaaacaataaggtgggtgtcaaagacttagccgagtttcttttgaaggtgacagggattttcatcgatttggatgaagccgaatttgaggatctggcaaggcagatcacgcaagtttttcgtccaacgacagggaaaaaacgggatttcacctttatgaattgggaatccggccagtcggagcatatttatatatcgattctgaaagcgaatgccttcgacttaaaaacgaatacgcagtactacacgctcgacgaagatgggttggagcttatttttgcgaccaaggaattttataccgaatttcaattatcaattcatcagttggtactgcgcaagcaattggaaaagggcgagttcgaaggagccctgcggcagattaatgaaatgcggattgatgtggaagctttgcaggagcggatggtcaagctggagcatgagttgaaaagaaatatcgtgtcggaagagacgttcggacgttataaaggtctgctcgacgatatttatttgcgcttgcagatggagaacgaagaattcgaagaactgcggcaattcgtgaaggagacgaaggatcgcgttcaggcacaaacggttagacaagcagatcaacggccttatgagttaattttacgtatatccaatgagctggagaaggttcatggcgagcattcggatctatttcatgaaagtatggttttaaaatcacatgcacttggcgcagcgcaagaatctttatattataccgggttggattcctttaattttgatcaggatattgcttctcttatctttagtacgccactgcctttggagacgatgaaaggggtgctggccccgttcttaccagttcaagagacgaaggcgtggtcgcttttgacggtgtgggctgagcaaaatatgctagaagatggcagtggacaagaacgggatgataagttcctggaacttggcggagacagcgacgaataccgttaccaaacgatgcagaaaaagttgtacaagcttctgatggagcagctgctgcaaatgatggaagagcagggccaagttgaattaaaactgtttattcagctgttcaaagagagcgagcttgcaagattgctgggcgaaagagctttctatgatttctggatctatctgcatcaaagaagcccccttcgggcggatgatagggataagcagcagaatgaagagcaggggacgttgctggaagatatgtatatgcttctgggaagccgctgtctggtcatcattgagcaagaaaatattattaaggtaaacgatagatttagcattcagaatatgttgatttcgtggggagaacaggatgacaattggacttga

SEQ ID NO: 52740 - DNA, 762 bp, Paenibacillus sp. Soil724D2
atgacaattggacttgaaaatgggacagtaatgagagcttttcgcatctataccttgttagctcgcgataacgcagttggcaaagagcggctccaagaatacatggccgacgatgtggtgcgagggctagtggatcaattcgcgcgagaagtcgattgcgtaacggttattgccggcgaacagctgtatatgattccagagacacggttatcgccttttcatatgaacaacgaagtgattaaacgtacctatctgcgagcgaatgccgtgaatgcggatctttatctgatgtatgtcagcattattgtgttgattggcggcttttatgacagctaccaaacgatggagccgacgagaagttttatcggaattgaagagtggacggaacttgtgaatgagcgaatagcgttattgaagacgcatcctgaagctgaactaagagagatggagcaagagttttcctataactggacggccttgattgaaaaatggagtgccatggacgatatcaaggaaacagctgcgaggcaaagcgggaatacgattagccgggttagctttatggattctgtccgcaagtttctcgtcgcgcaagagttagtgatcgatattggcaaccaggaaattacgttaaccgaaaaggcgaaagtggtcgtgcagcgttattttatggagctggaatataaccgtggcattttggagtttttatatcaaagcaatacgtttgaggaggagggaagcgaacatgccagccatctctaa

SEQ ID NO: 52741 - DNA, 4431 bp, Paenibacillus sp. Soil724D2
atgccagccatctctaaaatacgttttaccaatgtggtctatgaggatggaaataagcgctacaacgatgaattgtttcatttcgatgggcataatggcgcgattcttctggaaaatggagggggcaagacggtttttatccagtctgccattcaagccatactgccgcatgcggaacttgccggacgtaaaatgaaggatacgttaagtctcgaaaacggccctgcgcatatcgcgatcgagtggattctgagtgaacggccacggagatatgtggtcacttgcgttagtttgtttctaacagcaacgggggtagattcctatcggtatgtctatgattatccggagcttgatgccgatgccattgatcggataccttttgtcaaggaaagtgcaggcagcctccgagcagccgataagggcgaaatccatgattattaccaccaaatgacgtcgaaacggatgaacgcgaagctgccgtcatcgattaaagaatacaaaaaagtattggaaaacgattaccacattatcgcatcagagtgggatcgaattgcgaagatcaatagctcagagggcggtgtagagagcttttttgatgaatgtaaaacgacgagtcaattgttcgatcgcttgttgatcccaacggtagaggatgcgatggccgggtatgaacaaggcgagttcgcgaataattttgaaatgcacagggacagcttcaaaaaatataaagaattaaaagaaaaaatcgaagaaaataagaagatcctcgttgaattggatggctatgtgcttcattttgccaaaatggatgccaaacagatggcttatgcagctgcccaggctgaaacgaaggcctattggttattagtgaatgagcataaaaatgaggaagcctctaagctttcacaatggcaccggcaaatggcagaatgcgatcagcagctgctgttattggctcggaggaaagaatcccttcagattgccaagcaaaaacaagatcaatccgctttggaaacaaagctgagattggtcgaggaagacgttgagcggaaagaggcgcaagtacgaagtgctaagcagcactactattctctgcgtttggctgactacaagcagcagtggacctctgcagaagagcgcatgaattatttgcagcgcgaacttgatcagttcggtaatacccaagaagagggggatcttcgcgaagcatggaacaataatagcgggcaaattcgcagtatttacagcaagatggagcaagagtggcaggtggaagaagagaaactcaggcaggaattagatgctcatcagaataggacggctttagaggaaacgattctgagagatctgtcgagcgaacttgagggattgaacaagcagctcattgaacatagatccattgtgcaggcccgcgagaaagataaagaagtgcttagagctaatgttttggcaaatccagcagtcgagagcatggaaggcagtatgacggattggattcagcgttatcagaagttggatgacagcaatgtgctgcttgtgcagaataacaaggatttggcattcggtaaagaggaaagcatgagagagctggaacgagtgagtgaaagccttaagatcgcctatgtgggacgcgccagctcggagcaaaatctcgaagcatttaaaaaagagcatcaatccatgcttaccgaaatttctgcgtacaggtcatcatgggggagactctcatccgtatatgagaagcagagttcgattgaagagcggcttagggaggatttggaaaagctgcacctgcagaaagaagcatatttgctgaaagaacgtctcgctttccggtatatcgatgattacagctaccagcatacattttttgcggatacctatgtggcaggcttggtagacaagtggagaaatcaattcgcgttattggagacaggcattcaatatttgcagggcttagacctaagcgagcgggcaatgacacatcctctgtggtcagtgactttgattacgacagaagaagaggttgggttattaacgagcaagcttgggcagtatgcggaggatatgcagtttccgattcaagtcatctcatcgcaggaagcatcacgtctagccaatatggatacgccgatagctgtgcaagacaaagcttgggttgaaccgcagcattggcgtgaaaatgccgatgtcgctgaatttgcgagctggaaacgagcgatatctcaaaaaggtgaagaggtcctgacagcacgtaaagtaaaggaaagcgaattgcagcgtacttctgatttacaaacctctttcagtcgattcactgcttcataccctctagaggtcgtacaagaaatggaaaggcaagttggacttaagcgcgaacaagtgcgtgaattagaaagccaggaggattccatcaggaaatccgttcgtcaggctgagcaaacgattcagcagcacaataacatcatggacgagcaaaaaggtgaaatggttcagctccaacagtggattgaaaaaggacggacatatgtcgagctggggaaagaaatcgctgcattgaacgtggcgattgatcagcttgttgaacaggcagaagatcagcaaagcaagttggatagcaggcagcgctctatggagcaagtgaagctgcagatcgaatcagtgaaaagcagcatgaactatttgaggaccgagaaagcgagtcttcaaagtcaagatacgtatatagagactctcgatgtacagccgattgaaacgaatcatagtttagattggttgaaaacagaaagaaaagatttgcatctcaagttaaatcgcatatctcaaggacgtcagcagcttgaaacggagtggaatcatgccaagaccagcagaacaacgctggagaaggagatgaacaagcttcgactggaacaagcggacttggatttgaatgaggatcttgcgttttctgtgaccggtgaagaccagatgtcgcagctgttatcggagctcaaggaccttgaatctcggttgtctcgtgacaaagaagaatttacgcgagttgagaagcaatttgatgcactagcgacgacaattaaactactcattgagcagtatggcgctgcgcattcgggggggctgcctgtaacctttacagagtcgctgacagtggtggatgatcaagttcaaagcgaagaaacacgcctgcatcagcagaagacgggattacagcagcagcatacacaaattcaggcccaattaggtaaaatcgaagacgttatccaatacttaaatcaatataaaatcatgcatgggtttgaaaattcactcattcaggcgtcattaatcacgcaagaattgaaagccgagtttctgaatgacaggatgaaaatggtccgaaaatccgtgactttgttatccgccgttatgaaagaactggaagccgaagagtcttctgtgaaaaaagccagagttcatttcgttgatttttgccggaaacaaatcaaagatatcaaaatgagagatatggccgagcaaggtgtcgagaaaaaagacaactatcaggagttaatgcaatttcaacagaaaatgcacagccggattgaacgtgtcaatcatgtcgcagaagaaacgatgcgtacacacaatcaacagctggaacagtatattattcatgtgcatagccatatcaagctgattgcttctgagcttcgagatattcctaataaaacgagagtcaaggtcgaggatcagtggaagcacatttactcgtttcaaattccggaatgggatgagcttgaagccaaggaccatctgcgcaagcatctggagtggattttggccgaactggacaaaggtcattaccttgatgacaacggtcaagaagtgaaatcgacggttcgcaaggagatcgaaaaatggttggataccaagcagctactgcacattgttttgcaagaaaggccgatgaaagtatcctgccgcaaagtaaccaatgagaataacgtgacgaaggcctccttctcttgggagcagtctaataattggtccggcggggaaaaatggagcaagaatatgaccttattcttgggattacttaactatgtcgccgagaaacgacagcatattcaagcgaatatgaaaagacatcggaccgtgatcctggataatcccttcggaaaagcatcgagcgaccatgtattaagtcctgtattttttatagccgaacagcttgggttccaaattatcgcgctcaccgcgcatgcggaagggaaatttcttaaagactatttccctgtcgtctttagctgcaggcttagacaagcggctaatggaagcaaactagtcatgaccaaagaaaaggaaattaatcaggcctatttccgtgattatgcgccgatttcactggaaagattaggggatgtcaagcagatggagttatttatatag

SEQ ID NO: 52742 - DNA, 1527 bp, Paenibacillus sp. Soil750
atggactacctagaaattggtcaggtgatttccgggtttcgggaacgaatgaccaagctggcactttttgatccgctctatgagctgcagagaaaacgtcaaacagatcgacagaacaaacccattgattttatggaactcgggctgctaacgctgctttactttttcgagcagaagttgatgcgaaacaataaggcaggtgtcaaggacttagccgagtttctactcaaagtgacgggaatcttcattgatttagatgaagcgggatttgaggatctagctagacagatcacgcaagtgtttcgcccgacgacagggaagaagcgggattttacgtttatgaactgggaatctggggtgcaggaacatatttacatatcgattctgaaagcgaatgctttcgatttaaaaacgaatacgcagtactacacgctcgacgaggatgggttggagcttatttttgcgaccaaggaattttacaccgaatttcaattgtccattcatcagttggtattgcgcaaacagttggaaaagggtgagtttgaaggcgctctgcgacaaattaacgaaatgcggatcgacgtggaagctttgcaggaacggatgattaagctcgagcacgagttgaaaagaaacattgtgtcggaggaaacattcggacgttataaaggtctgttagaagatatttatttgcgattacaaatggagaatgaggagtttgaggaattacgccaatttgtcaaagagaccaaggatcgcgttcaggcacagaccgttagacaggtggatcaacgaccttatgagttaattttacggatatccaatgagctggagaaggtacatggcgagcattccgttcttttccatcagagtatggtgttgaaatcacatgccttgggcgcagcgcaagaatctttgtattatacgggactcgattcctttaatttcgatcaggatattgcatctcttatctttagtacgccactgcctccggagacgatgaaaggtgtgatagccccgttcttacctgtgcaagagacgaagatgtggtcgctgttgacggtgtgggctgagcaaaatttactagaagacagcactggacaggagcgtgaggatacgtttcttgaaattggcggagacagcgatgaataccgataccagacgatgcagaaaaagttgtacaagcatctgatggagctccttctgcagatgatggaagagcagggccaagttgaagtgaaacttttcatcgaacagttcgaaatacgtgaagatgccagattgctgagcgagagagcattctatgatttttggatttatctgcatcagagaagccccttgcgggcggtggatatggatcagcagcagaatgaggagcaggcgacattaatggaagatatgtatgcgcttctgggaagccgctgtttggtcgtaattgaacaacaggacatcattcaggtgaatgacaggtttagcatacagaatatgttgatttcatggggagaacaggatgacaatcggacttga

SEQ ID NO: 52743 - DNA, 762 bp, Paenibacillus sp. Soil750
atgacaatcggacttgaaaatggaacagtaatgaaagcttttcggatctatacgttgctcgctcgcgataacgaggtggggaaagagtggcttcaagcctacatggcggacgacgtggtacgcggacttgtggatcaatttgcgcgagaagtcgattgcgtaacgatcattgctggcgaacaactgtatatgattccggagacaaggctatcgccttttcatatgaataacgaagtgattaaacgcacttatctacgggcgaatgctgtgaatgcggatctttatttgatgtatgtcagcattattgtgcttattggcgctttctatgatagctatcaaacgatggagcctacgagaagttttatcgggattgaagaatggacagcgcttgtgaatgagcgaattgccttattgaagactcatccggaagcggaattaaaagagatggagaaggaattctcctataactggacagccttgatcgaaaaatggagtgccatggacgatatcaaggagacggccgcgaggcaaagcgggaatacgatcagccgggttagtttcatggattctgtccgcaagtttctcatcgcgcaagaattggtgatcgatattggcaatcaggaaatttcgttgaccgaaaaggctaaagtggttgtgcagcgctattttatggaactagagtataaccgtggtattttggagtttttatatcaaagccatgcatttgagggggagggaagcgaacatgccagcgatctctag

SEQ ID NO: 52744 - DNA, 4431 bp, Paenibacillus sp. Soil750
atgccagcgatctctagaatacgatttacgaatgtcgtctatgaggacggaaataagcgttacaacgacgagttgtttcatttcgatgggcataatggcgcgattctgttggaaaatggaggaggcaagacggttttcatccagtctgctattcaagccattttgcctcatgaggaactagctgggcgtaaaatcaaagatacattaagtctcgaaaatggtcctgcgcacatcgcgatcgagtggattttaagtgaacggcctcgacgatatgtagtgacctgcatcagcttatttctgacggctacagggattgattcgtatcggtatgtgtatgactatccagtgcttgatcccgacgcgattgatcggattccttttgttaaggaaagtgtcggtcatctgcgagcagcggataaaggtgaaattcatgattattaccaccaaatgacggtgaagagaatgaatgcgaagctgccagcgacgatgaaagaatacagaaaaatattggaaaatgattaccatataatagcttcagaatgggaacggattgctaagatcaatagctcggagggcggggttgagagcttctttgacgaatgcaaaacgactggccagttgtttgatcgtttgttgatcccgacggtagaagatgcgatggctggctatgaacaaggcgagttcgcgaataattttgaaatgcatagggacagcttcaaaaaatataaagaattaaaagaaaaaatcgaagaaaacaaaaaaatcctcgtggaattggaccagtatgtgcatcgttatgccacgatggatacgaagcaggtggcttatgcggctgcacaagctgaaacaaaggcctattggctgctcgtcaatgagcagaagaatgaggaaaccgccaagctctcggggtggcatcagatgatgtcgacttgtgatgagcaattgcttgtattggctcggaagaaggaatcgctgcatattgcaaagcagatgcaggagcaatccgtgttggaaacaaagcttagattagttgaagacgacgttgagttcaaagaaaagcttgtccgaagtgcaagagagagctactattcgttgcgtttggccgattacaagcagcaatggacttctgccgaggagcgtatgaactatgtgcagcgggaacttgaacaattcggtcacacccaagaagaggatgttttacggaacgcgtggagccagaatggcgggcaaattcgcggtattttcagcaagatggagcacgagtggcaggtagaacaagagaagctcagtcaggaagaagctgctcatcagaataggttgaacctagaggaaacgattctgcgtgatctctcaagtgaactagagctattaaacaagcaactcattgaacatagatcccttgtacaagcccgcgagaaagatagagatgagctgagggctaatattttggtcaatccggcagtcgagagcatggaaggcagcatggcggactggagtcaacgttatcagaagttggatgacagtaacgttcagctggtggagaagaacaaggatttggcattgagtaaagaggaaagtgagagacaactggcaagcgtgagtgaaagcctcaagactgccttcgtggagcgtgccaatatagagcataagctcgaatcatttaaaaaagagcagcaatccatgcttgaagaaatcgctttgtacaggtcttcatggggaagactctcgtctgtatatgagaagcagagttcgattgaagaacgacttagcgaggatacggcaaagctcctgctcgagaaagaagcttacttgctgaaagagcgtcttgcttttcgctatattgatgattatagctctcaacccatattttttgccgatgtctatgtggctggcttggtggacaagtggagaaaccagttcacgttactagagacaggtattcaatatttgcagagtttgaagttaaccgagcgggcgatgacgcaaccgctatggtccatcacgttgattacgacagaaggcgaagttgggttagttacaagcaagctgcagcagtatgcagaagatatgcagtacccgatccaggtaatctcttctcaggaagcggcgcgtctagcgggtagtgatacaccggcagcagcggagggtagcgcgtgggttgaaccgcagcattggcgtgataatgcggaggcggcggaattcatcaactggaaacatgcgatcacacaaaaaggagaagaagttcgaacagcgcgcaaagaaaaggagcgtgatctgcagcgtacctctgagcttcaagctgcgtttagccggttcctcttgcaatatccgcttgaggttgtgcaagaaatggaaaggggagtaggacttgcgcgcgattctgtgcgtgagctagaaggccaagaggatgccatcaagagatccattcgtcaggcagagcaggtgattcagcagcataatgccgtccttgatgagcaaaaagaggaaatgattcggctcgggcagtggattgaaaaagggcggaagtatatcgagctgggcaaagaaatcatgacgttgaacggggcgatcgaccagcttgaccagcagtctaacgatcagcagcataagctggaaggtagaaggcgctcaatggagctagcgaagctgcagagcgagtccgtgaagggcagaatgagcgttttgagaacggagaaagcgagtctgctaagccaagatctatatattgaactagcggatgtgcagcccattgaagcgaagcatagcttagattggttgaaaacagagagaaaagatttgcatctcaagctcaatcatatatcccaagggcgccagcaacttgaaacggaattgaagcatgctcaggctagcagaacaacgttggagcgagagatgaacaagcttcgcttggaacaagcggatctgaacttgaacgaggagcttgctttctctgtgacgggtgaagatcagatgtcacagctattgtccgagctcaaggaacacgaatcacggctaatgcgcgataaggaagaattggtgcgggtcgacaaacaatttaatgaattgacagcgcgaattaaattactgattgagcagtatagtggtttacacgagggcgagcggccactaacctttacggagtcgctgagcgtagtggatgcccaagtccagagtgaggatgcacgtctgcaacagcagaaattgggcttacagcagcaacacacgcaaatccaggcgcaattaagtaaaatcggagatgtgatcgattacttaaatcaatacaaaattttgcatgggtttgaaaatccactcattcaagcagcttttattacacaggagcagaaagcggagtttctgaatgaccgcatgaaatgggtgcggaaatctgtggcgtcgctaatcgccttgatgaaagaactagaagtggaagagtcgacggtgaaaaaggccaggctgcattttattgatttttgccggaaacaaattaaggatgtcaaaatgagagatatggctgagcaaggtgtcgagaacaaagacaactatgtggagctgacacaatttcagcataaaatgcacagccgcattgaacgcgtcaatcatgtcgcggaagagacgatgcgcacacacaatcagcagcttgaacagtatatcattcatgtgcacagccatttgaagctgatcgcgtctgaacttcgagatattcccaataaaacgagagttaaagttgaagatcagtggaagcatattttctcctttctcattcctgaatgggatgaacttgaggcgaaagatcatttgcgcaagcatttggaatgggttttgaccgaactagaaaaaggccattaccgtgatgagaacgatcaagaagtgaaatcaacggttcgcaaggagctcgaaaaatggttggataccaagcagcttctacagattgttttgcaagaaaaagtcatgaaagtttcctgccgtaaagtcaccaatgagaataatgtaacgaaggcttccttctcatgggaacagtcgaacaattggtctggcggggaaaaatggagcaaaaatatgacattattcttaggcttacttaactatgtcgccgaaaaacggcagcatattcaagcgaacatgaagcggcatcgcaccgtgatccttgacaatcccttcgggaaggcatcgagtgaccacgtgctaagtcctgtgttttttatcgctgagcagcttggcttccagatcattgcactgacagcgcatgcggaaggcaaattcctcaaggactatttcccagttgtctttagctgtaggctcagacaggcagccaatggaagtaagctggtcatgaccaaggagaaggaaattaatcaagcttatttccgtgatcatgcgccgatttcgctggaaagattaggggacgttaagcagattgagttgtttatttag

SEQ ID NO: 52745 - DNA, 1047 bp, Paenibacillus sp. Soil750
atgaatcccaactctatcattcgtacatatttgcaaaaagtaaagaaagccaaagtctctcttcacgaattagaagctttatttcaaggccagccatgtacctacgaacaattcgctcagtcggtacttgagcttgaagctgaggagatcattcagatggttcagagcaaagggagaacgggtaagcgaccatcccttgcctatcaatatagcgtgcagaagaatcggttaaaagtagatacgcataaggacatccatcaggccaggatgctgctgcatcctgatattcaactggatacttactattcagtaggagcggaagtttgggagcaagacaggccctatttggaacggattgacgcctatttgaagcgggggaagcttccaaccaccccggtaccggcaccggagcgcagctttgagctagtcgcagatgagaaatggataacagagaagcaagggaaagagctgctgacccgaatcggtatgtgggacaaactattaattattcctgtagaagaccccttgatgtttgctgtgaatccatatagtttaacgagtgtagttcataggcatctaatcgttgaaaataaaacaacgtatcaagcgctgctgcaggcattgccggatgttccgtttgctacgcttatttttggcggcggctatcgcattacgagaagcattgagttgctgccgttgcagctcccgctcagggatgcaacgcacgaattctactattttggcgatatcgatagagtaggcatccatatttggcatctatttaatgagcgggtacttgcgctttttggtagaccagctaatctagcccttcccttttacagagcatgtctgagcctagagtttgcatacggaaaagaaaaccaacgtggccatgagcaagcattgcaagattttctctctcatttcactgtggaagaacaggaaattattaaccagtgtctagcaacggggggctattttccccaagaaatagtatcaacacacgagctttgcaagatttggaggcacacagcatggactacctag

SEQ ID NO: 52746 - DNA, 1527 bp, Paenibacillus sp. Soil766
atggactacgtagaaattggtcaagtgatttccgggtttcgggaacggatgaccaagctagcgctttttgatccgctttatgagctgcagagaaagcggcaaaccgatcgacaaaacaaaccaatcgactttatggaacttgggctgctcacgctgctttatttttttgagcagaagttgatgcgaaataacaaggcaggtgtcaaagacttagcggagtttcttcaaaaggtgacggggatcttcatcgatttggacgaagctggatttgaggatctggctaggcagattacgcaattgtttcgcccgacgacagggaagaaacgggattttacatttatgaactgggaatcggggcagacggagcatatttacatatcgattctcaaagcgaatgcctttgatttaaaaacaaatacgcagtactacacgctcgacgaagatgggttggagcttatttttgcgaccaaagaattttatacggaatttcaattatccatccatcagttggtattgcgtaagcaattggagaagggcgagttcgaaggtgcgctgcgccaaattaacgaaatgcggattgatgtggaagctcttcaggagcggatggttaagctagagcatgaattgaaaagaaacatagtgtcggaggaaacattcgtacgttacaaaggtctgttagaagatatctatttgcgcttgcacatggagaatgaggaattcgaagaattacgccaattcgtcaaagagaccaaggatcgtgttcaggcacagactgttagacaggcagatcagcgaccttatgagttaattttacggatatccaatgagctggagaaggtgcatggtgagcattccgttctttttcatcagagtatggtgctcaaatcacatgccttgggcgcagcacaagaatccttatattatacgggactggattcctttaatttcgatcaggatattgcttctcttatcttcagtacgccgctgccgccagagacgatgcaaggcgtgatagcaccgttcttaccggtgcaagagtcgaagatgtggtcgcttttgacagtgtgggctcagcaaaatttgctggaagacagcagcggtcaggagcgggatgatacgtttctagaaattggtggagacagcgaggaataccggtaccaaacgatacagaaaaaattgtacaagcttcttatggagctgcttctgcacatgatggaagagcaggaccatgttgaagtgaacgtttttatccaacaattcgaaggacatgaacatgcaaaattgctagcagagagagctttctatgatttttggatctatctgcatcaaagaagccccttgcgcgcagtggatatggatacagagcaaaatgaagaacagggaacgttgctggaagatatgtatgcacttctaggaaatcgctgtttggttgtgattgaacaacaggacatcattaaggttaatgatagatttagcatacagaatatgttaattacatggggagaacaggatgacaatcggacttga

SEQ ID NO: 52747 - DNA, 762 bp, Paenibacillus sp. Soil766
atgacaatcggacttgaaaatggaacggtaatgaaggcttttcggatttacaccttgctcgcgcgtgataacgaggtagggaaagagtggcttcaagcctacatggcagacgatgtggtacgcggacttgtggatcaatttgcgcgtgaagtcgattgtgtaacgattattgctggcgaacaactgtatatgattccggagactaggctatcgccttttcatatgaataacgaagtgattaaacggacttatctgcgggcgaacgccgtgaatgcggatctttatttgatgtatgtcagcattatcgtacttattggtgccttctatgatagttaccaaacgatggagccgacgagaagttttattgggattgaagagtggacggcgcttgtgaatgagcgtatttccctattgaagacacatccagaagcggaattaaaagagatggagaaggaattctcctataactggacagccctgatcgaaaaatggagtgccatggacgatattaaggaaacggccgcgaagcaaagcgggaatacgattagccgggtcagcttcatggattctgtccgcaagtttctcatcgcgcaagaactggtgatcgatattggcaatcaagaaattacattgaccgaaaaggccaaagtggttgtgcagcgatacttcatggaactcgagtataaccgaggtattttggagtttttatatcaaagccatacgtttgagggggagggaagcgaacatgccagcgatctctag

SEQ ID NO: 52748 - DNA, 4431 bp, Paenibacillus sp. Soil766
atgccagcgatctctagaatacgatttacaaatgtcgtctacgaggacggaaataagcgctacaacgatgaattgtttcattttgatggacataacggcgcgattctgttggaaaatggaggcggcaagacggttttcatccagtcagccatgcaagccattctgcctcacgaagagttagccggacgtaaaatcaaagatacgttaagtcttgaaaatggtcctgcgcatatcgcgatcgagtggatattaagtgaaagacctcggagatatgtcgtgacctgcattagtttgtttctgacagcaacagggattgattcgtatcggtatgtgtatgattatccagtgcttgatcccgatgcgattgatcggattccttttgtgaaggggagtgctggccatattcgagcagcggataagggtgaaattcatgattactaccacgggatgacggtgaaaagaatgaatgcgaagctgccatccacgatgaaagaatataaaaaaatattagaaaacgactatcatatcatcgcttcagagtgggagcggattgcgaagattaatagctcagagggcggggtagagagcttctttgatgaatgcaaaacaacgggccagttgtttgatcgcttgttgatcccgacagtagaagatgcaatggctggttatgaacaaggcgagttcgcgaataatttcgagatgcacagggacagcttcaaaaaatataaagaattaaaagaaaaaattgaagaaaacaaaaaaattcttgttgaattggaccagtatgtgcttcgctatgcaacgatggatacgaagcaggtagcttatttagctgcgcaagctgaaacgaaggcctattggttgctcgtcaatgaacagaagaatgaggaaaccgccaagctttcggggtggcatcagatgatgtcagcatgcgaggagcaattgcagggattagcacggaagaaggaatcgctccatattgcgaagcaaaagcaggagcaatccgttttggaaacaaagctaagtttggtcgaggaagacgttgaattcaaagaaaagctcgtgcggagtgcgagagagagctactattcgttgcgtttggccgattacaggcagcagtggacctcggctgaggagcgcatgaactatgtgcagcgcgaacttgaacaattcggtcatacccaagaagaggatgttttgcggaaagcatggatccagaatggcgggcaaattcgcagtatttacagcaagatggaacaagagtggcaggctgaagaagagaaactccgtcaggaaacaacagctcatcagaataggttaaacctagaggaaacgattttgaatgagctttcaagtgaactagagggattaaacaagcagctcattgcacacagatctcttgtgcaagcccgcgagaaagatcgagacgagctaagagcaaatagtttggccaatccagctgtcgagagcatggaaggcagcatggcggattggattcagcgttatcagaagttggatgagggcaatgttctcctagtgcagaagaacaaggagttggcaaccggtaaagaggaaagtgagagacaactagtaggcgtgagtgataacctcaagaccgccttcgtggagcgtgctaatgccgagcataagctcgaatcatttagaaaagtgcatcaatccatgcttgaagaaattgcttcatacaagccttcttgggggagactctcttctgtttatgagaagcagagttcaattgaagagcgacttcatgaggatacggaaaagctgctgcttgagaaggaagcttacttgctgaaagagcgtcttgctttccgttatattgatgattatagtgctcagcctacatttttcgcggatgtctatgtagcgggcttagtggacaaatggagaaatcagttcgacttattggagacaggtattcaatatttgcagagtttgcaattaactgagcgggcgatgacgcaccctctgtggtctgtgacattaattacaaccgaaggtgaggttggggtagtcacaaacaagctgcgtcagtacgcggaagatatgcagttcccgattcaagtgatctcttcacaggaagcggcacggctagccaatagtgatacgccagtagccgcggaggatagggcttgggttgaaccgcagcattggcgtgacaatgcggaggatatggaattcatcagctggaagcatacgatctcccaaaagggtgaagaagttcggtcggctcgcagagagaaggaaagagatctgcagcgtacctctgatcttcaagcatcttttcgccgattcctgtcagcatatccgcttgaaattgtacaagaaatggaaaggcaagtgggacttgcacgcgattctgtgcgtgagctagaaggccaagaggatgccattcagaaatctattcgccaggtcgagcagacgattcatcagcataatgccgtcatggataagcaaaaagaggaaatggttcagcttgggcaatggattgaaaaagggcggaaatatgtcgagttgggtaaagaaatcgttgcgttgaacagtgccatcgagcagcttgctcagcagtctgacgaccagcaaaataagctggagggcaggcgacgttcgatggagcaagcgaagctgcagagcgaatccgtgaagggcagaatgaacgccttgcgaacggagaaggcgagtcttcaaagccaagatctgtatatggaattaggagatgtacagcctatagaagcgaatcatagcttagattggctgaaaacagaaagaaaagatttgcatctcaagctccatcatgtttcacaaggacgtcaacagcttgaaacggagttgaagcatgcccaggctagcagaacaacgctcgaacgagagatgagcaaacttcgcttggaacaagcggacttgaatttgaacgaggagcttccgttctctgtgacgggtgaagatcagatgtcacagctaatgctcgagctcaaggaacacgaattacggttgacacgcgataaagaagaactggtacgggtaggcaagcaatttaatgaattgacagctaggattaagttactggttgaacagtataggggttcacatgagggtgaagggccattgacctttacagagtcgctgagcgcagtagatgtacatgtccaaagtgaggatacacgtctacaacagatgaaatcgggcttgcagcagcaatatgcgcaaattcaggtgcaattaggtaaaattgaagatgtgatccaatacttaaatcaatacaagattttgcacgggtttgaaaatccactcattccagtagcctttatctcacaggcacagagagcggagtttccgaatgatagaatgaaatgggtgcggaaatctgtggcgacgctaaccgccttgatgaaagagctggaagcagaagagtcgacggtgaagaaggccagactgcattttattgatttttgccggaaacaaatcaaggatgtcaagatgagagatatggctgagcaaggtgttgaaaacaagaccaactatcaagaactaacacaatttcagcataaaatgcacagccgtattgaacgcgtcaatcatgttgcggaagagacgatgcgcacacacaatcagcaactcgaacagtacatcatccatgtgcacggccatttgaagctgattgcatccgaacttcgagatattccgaataaaacgagagttagagtcgaggatcagtggaagcttattttctcctttctcattccagaatgggatgaacttgaggcaaaagatcacttgcgtaagcatctggagtggattttgacggaactggacaaaggacattaccgcgatgataacgatcaagaagtcaaaacaacggttcgcaaggaacttgaaaaatggctggataccaagcagcttctgcagattgttctgcaagagaaagtcatgaaagtttcgtgccgtaaagtaaccaatgagaataacgtaacgaaggcttccttctcatgggagcagtctaataattggtctggcggggaaaaatggagcaagaatatgacgttgttcttaggtttgctcaactatgtcgccgagaaacgccagcatattcaagcgaacatgaagcggcatcgtaccgtgattctggataatcctttcgggaaggcatcgagtgatcatgtattaagtcctgtgttttttatcgcagagcagcttggctttcagatcatcgcactgactgcacatgcggaaggcaaattcctcaaggattatttcccagttgtatttagctgtaggctcagacaggcagcgaatggaagcaagctggtgatgaccaaggaaaaggaaattaatcaggcttatttccgtgatcatgcgccgatttctctggaaagattaggggacgttaagcagatggagttatttatttag

SEQ ID NO: 52749 - DNA, 1047 bp, Paenibacillus sp. Soil766
atgaatttcaattcgcgtatacgtacgcacttactatcattaaagaaagttaaagtttctattgacgaattatatgcactattcgatggccaaccatgtacttacgaacaattcgctcagtcagtacttgagcttgaagctgagaagatcattcagatggttcagagcaaggggagaacgggtaaacgaccatcccttgcctatcaatatagcgtgcagaagaatcggttaaaagtagatacgcacaaggacatccatcaggccagaatgctgctgcatcctgatattcaactggatgcctattattcattaggagcggaaatttgggagcaagataagctttacattgcaatgatcgacacttatttgaaggagtatatgcttccaactaccccagtaccggcaccagagcgaagcttcgagcttgttgcagatgagaaatggataacagagaagcggggaggagagctgctgacccgaataggtttgtgggacaagttccttattcttctcgttgatgaccccttaatgtttgctgtgaatccatatggtttaacgaatgaggtccataggcatctaattgttgaaaataaaacaacgtatcaagcgttgctgcaggcattgcctgatgttccttttgcaacgctaatttttggtggaggctatcgcataacgaagagcattgagctgctgtcaatgcagcttccgcttaaggatcctgtgcatgaattctattattttggcgatatcgataaaaaaggtattcacatatggcatctacttaatgagcaggtgattaaactttttggtagaccagctaaattggcctttcctttttacagagcatgtctgagcagaaaatttgcaaaaggaaaagaataccagcgtagtcatgagcaggccttgcaaacttttacctctcattttacggaggaagaacggaagataattaaccagtgtctagcatcaggaggctatttcccccaagagatacttccatcacacgagctttgcaggatttggaggcacacagcatggactacgtag

SEQ ID NO: 52750 - DNA, 1527 bp, Paenibacillus sp. Soil787
atggattacgtagaaattggtcaggttgtttccgggtttcgggaacgcatgaccaagttggcactttttgatcctctctatgagcttcagagaaagcgccaaactgatcggcaaaataaaccgatagatttcatggagcttgggctgttgacgctcctttacttttttgagcagaagttgatgcgtaataacaaggcgggagtcaaggacttagccgagtttcttttgaaggtgacggggattttcgtcgatttggatgaagccggatttgaggatctggcaaggcagatcacgcaggtttttcgcccgacgacagggaagaaacgggattttacgtttatgaattgggaatccggtaacacggagtatatttacatatctattctgagagctaatgccttcgacttaaaaacgaatacgcagtactacacgctcgacgaagatgggttggagcttatttttgcgaccaaggaattttataccgaatttcaattatcgattcatcagctggtgctgcgcaagcaattggaaaagggcgagttcgaaggagccttgcgacaaattaatgaaatgcgaattgatgtggaagctctgcaagagcggatggtcaagctggagcatgagctgaaaagaaacatcgtatcggaagaaacgttcggacgttataaaggtctgctggaagatatttatttgcgcttgcagatggaaaatgaagagtttgaagagctgcggcaatttgtgaaggagaccaaggatcgcgttcaggcacaaaccgttagacaagcggaccagcggccttatgagttaattttgcgcatatccaatgagctggagaaagtacatggcgagcattcggttctttttcaccaaagtatggtgttgaaatcacatgctctgggcgcagcgcaagaatccctatattatacaggactggattcctttaattttgatcaggatattgcatccctaatctttagtacgccactgcctttggagacgatgaaaggtgtgctggcaccgttcctgccggttcaagagacgaagatgtggtcgcttttgaccgtgtgggcggagcaaaatatgctcgaagacggcagcggacaggagcgggatgacaagtttctggaaattggcggagacagcgacgaataccggtaccagacgatgcagaaaaagctgtacatgcttcttatggagctgctgctgcaaatgatggaagagcagggtcaagttgagttgcatgcgtttattcagcttttcgaaaagagtgagcatgcaaggctgctgggcgagagagctttctatgatttttggatctatttgcaccaaagaagcccccttcgggcggatgatagggataagcagcagaatgaggagccggggacgttgctggaggacatctatatgcttcttggcagccgctgtctggttatcattgagcaagaggatattatgaaggtaaacgacagatttagcatacagaatatgttgatttcgtggggagaacaggatgacaatcggacttga

SEQ ID NO: 52751 - DNA, 762 bp, Paenibacillus sp. Soil787
atgacaatcggacttgaaaacggaacagtaatgagggcttttcgcatctataccttgctcgctcgcgataatgcggtgggcaaagaatggctccaagaatacatggcggacgacgtggtacgcgggcttgtggatcaattcgcgcgagaagtcgattgcgtaacgatcattgccggcgaacagctgtatatgataccggagacacggctatcgccttttcatatgaataacgaagtaattaaacgcacctatctgcgggcgaatgccgtgaatgcggatatttacttgatgtatgtcagcattattgtattaattggcgccttctatgatagctatcaaacgatggagcccacaagaagtttcatcgggattgaagagtggacggcgcttgtgaatgagcgaattgcgttattgaagacgcatcctgaagccgaattaagagagatggagcaggaattttcctataactggacggccttgattgaaaaatggagtgccatggacgatatcaaggagacagccgcgaggcaaagcgggaatacgattagccgggttagctttatggattccgtccgcaagttcctcatcgcacaagaattggtgatcgatattggcaaccaggaaattacgttgaccgaaaaggcgaaagtggttgtacagcgttattttatggagctggaatataaccgcggcattttggagtttttatatcaaagcgatacgtttgagggggagggaagcgaacatgccagcgatctctaa

SEQ ID NO: 52752 - DNA, 4431 bp, Paenibacillus sp. Soil787
atgccagcgatctctaaaatacgttttacgaatgtggtctatgaggatggaaataagcgctataacgacgaattgtttcatttcgatgggcataatggcgcgatcctgctcgaaaatggagggggcaagacggttttcatccagtctgctattcaagccatcctcccgcatgcggagcttgccggacgtaaaatgaaggatacgttaagtctggaaaacggccctgcgcatatcgcgatcgagtggattttgagtgaacgaccacgccgctatgtggtaacttgtatcagcttgtatctgacagctacagggatagactcttaccgatatgtctatgattatccggagctagatgcggatgccattgatcggattccttttgtgaaggaaagtgcaggcagtcttcgatcagccgataagggtgaaatccatgactattaccaccagatgacatcgaaaaaaatgaatgcgaagctgccgtcaacgttgaaagagtacaagaaaatattggagaacgattaccacattatcgcatcagaatgggatcgtattgcgaagatcaatagctcagagggcggtgtagagagcttttttgatgagtgtaaaacgacgagccaattgtttgatcggctgctgatcccaacggttgaagatgcgatggccggatacgaacaaggcgagttcgcgaataattttgaaatgcatagggacagcttcaaaaaatataaagaattaaaagaaaaaatcgaagaaaataaaaaaatcctcgtggaactggatggctatgtgcgccattttgccaaaatggataccaaacagatggcttatgcagccgcccaagctgaaacgaaggccttttggctgctcgtgaatgagcagaagaatgaggaaagtgccaagctttcacaatggcatcatcaaatgtcagaatgcgaccagcaattgcaggtagtggctcggaagaaggagtcgcttcatattgccaagcaagagcaggagcaatccgtcttggaaacaaagctcagattggttgaggaagacgttgagctcaaagaaacgctggtacgaagtgctaagcagcactactactctttgcgattggccgaatacaggcagcagttgacctcagccgaggagcgcatgaactatttgcagcgcgaactggatcgattcggcaataccgaggaagaggctgagctcagggaagcatggctcaataatggcgggcaaatacgcagtatttacagccagatggagcaagagtggcaggttgaagatgagaaactgagtcaggaattagccgcttatcagaataggaccgacttagaggaaacgatgcttagagagctgtcaagcgaactagaagtactaaataagcagctcattgaacatagatctatcgtgctggcccgcgagaaagataaagaggcgctgagagccaatgttttggccaacccggccgtcgaaagcatggaaggcagcatggcggactggattcagcgttatcagaagttggatgacagcaatgtgctgcttgtgcagaagaacaaggatttggcgttcggtaaagaagaaagtgagcgagagctggaaagcgtaagtgaaagcctcaagaccgcctacgtggaacgtgccagttcagagcaaaatctcgaagcgtttaaaaaagagcatcaatccatgcttgccgaaattgctgcgtacaagatttcatgggggagactctcctctgtttatgagaagcagagttcaattgaagagcggcttagagaagatacggaaaagcagcagctggagaaggaagcttacttattgaaggagcgtcttgctttccgttatatcgatgattacagctaccagcatacattttttgctgatgtctatgtggcaggcttggtggaaaagtggagaaatcagttcgcattgttggagacaggctttcaatatttgcagggcttagagctaaccgaacgggcgatgactcatcctctttggtctgtaacattaattacgactgaaggtgaggttgggttagtaacgagcaagctgcggcagtatgcggaggacatgcagttcccgattcaagtgatctcgtcacaggaagcagcgcgtcttgccaatagtgatacaccggcagctgtagatgatagcgcttgggttgaacctcagcattggcgtgataatgcggatgaagcggaattcgtgagctggaaacaaacgatatcgcaaaaaggggaagaagttcgggcgacacgaaaagcaaaggaacgcgatttgcagcgcacttccgatctacaagcttctttcagtcgattcattacttcgtacccgcttgaagtcgtgcaagaaatggaaagacaagttggaacaaatcgcgaacgagtgcgtgagttagagagccaaggggatgccattcggaaatccattcgccaggttgagcagacgattgggcagcacaattccgtcatggacgagcaaaaaggtgagatggttcagctccagcagtggattgaaaaagggcggaaatatgtcgagttggggaaagaaatcgacactttgaatggggtcatcgaccagcttgcccagcagtcagaagatcggcaaagcaagtgggagagcagacagcgctccatggaacaagtgaagctgcagatcgaagacgtgaaaagcagaatgaattatttgagaacggagaaagcgagtcttcaaagtcaagatttgtatatcgaaatgctggatatgcagccgattgaagcgaatcatagcttagattggttgaaaacagaaagaaaagatttgcatctcaagctaaatcacatatcccaagggcgccagcagcttgaagcagaatggagccatgccaagtccagcagaacaacgctggagaaggagatgagcaagctccggctggaacaagcggacttgaacttgaatgaggatcttgccttctcggtgaccggcgaagaacagatgtcgcagctgttatcggagcttaaagaacgcgaatctcggttgacacgtgataaagaagaattcgtgcgagtcgagaaacaatttgatgcgctggcgacgagaattaaacttctgatagagcagtatagtgctgcgcattcgggcgggctgcctcaatcctttacggagtcgctgagcgtggtggatgagcaagtccaaagtgaggatatacgtctgcaacagcagaaatcgggcttacagcagcagcatgcgcaaatccaagctcaattgggcaaaattgaagaggttatccaatatttaaatcagtacaaaatcatgcatgggtttgaaaatccgctcattcaggcagccttcatcacacaggaacagaaagcggagtttccgtatgacagaatgaaaatggtcaggacatctgtggcttcgctctctgctgttatgaaagaactggaagcagaagaggcatctgtgaaaaaggccagacttcactttattgatttttgccggaaacagatcaaagatgtcaaaatgagagatatggccgagcaaggcgtcgagaaaaaagacaactaccaggagctaacgcaatttcagcagaaaatgcacagccggattgaacgtgtcaaccatgtcgctgaagaaacgatgcgtacgcataatcagcagcttgagcagtatatcattcatgtgcacagccatattaagctgatcgcttctgaacttcgagatatcccaaataaaaccagagtcaaggcccaggaccagtggaagcacatttattcgttccaaattcccgaatgggatgagctggaggccaaggaccatctgcgcaagcatctggaatggattttggccgaacttgaaaaaggccactaccgcgatgatagcgggcaggaagtgaaatcgacggttcgcaaggagattgaaaaatggttggataccaagcagcttctgcacattgttttgcaagaaaggccgatgaaagtatcctgccgcaaagtaaccaatgagaacaacgtaacgaaggcttccttctcttgggagcaatctaataattggtccggcggggaaaaatggagcaagaatatgaccttgttcttgggcctactcaattacgtcgcagaaaaacgtcagcatattcaagcgaatatgaaaagacatcgtaccgtaatcttggataatcctttcggaaaagcgtcgagcgatcatgtcttgagtcctgtcttttttattgctgagcagctcgggttccagatcatcgcgctcacagcgcatgcggaagggaaatttcttaaagattatttccctgtcgtctttagctgcaggcttagacaagcggctaatggaagcaagctagtcatgaccaaggagaaggaaattaatcaggcttatttccgtgattacgcgcctatttcactggaaagattagaggatgtcaagcagatggagttattcatctag

SEQ ID NO: 52753 - DNA, 1413 bp, Virgibacillus soli
atggagaaaatggatcgagaagtaatttctatttttaaatcggatcacgaattaccccagatgtcgagagctatgagggacattatctctttagctggtgtcatgaaagatctctcttcagagtcagcctttgcttctccgttagagatgttacgttttttaagaatcatcgaattaatccatgaggaagcatatggtctaagtgatccaattgatagtgcagaaacactctattatcgttaccaagcacggtataaagatggggagctacccacaaaagcaagagtcaatcagattgtgacaattttggcaaagaataattggataagcaaacagacgcatcagatcaaaatgatgagtgtaggcaagcggatgatggatgctttaacaaggttagccaatgattccctggcctattatttggaggatgaaattgggcgctccttgtttcaagcgcggcgagacgcggaaattagtgaagcatatgacgataaaggaatttccggtgggaataggatcgccagtttaattcataatgtgcaaggcgccattgatatgttgaaggaacgagagttggagcttcttgctgaccgtaatgctttgccgcaacttcaattaattcatacactcatggaggaactggaaggaaaactgcaagaaagaattaaccaatttcaaaccatcgaagacagtctcgttctcagtaatttgatgcaaaaaggagcaggggtgctagctgaggggacaagcttatcgattggcttgattaataaatatttgcaatttatgaatgttcaacagacaccacttcaaacggaaatttctccagaaaaagttcgtgtttttattgagaaaatgtttaatcctcctcctgaatcagaaatcccaaatgcgcaccagctttttagttttatggagcaagcccagtatgaaggggaagaaagagacggtatttggatgccagttaaatatgcaacgccactgtcctatttagacattgaaaagggaattgactttttggaaaactatgagcctgttgtggcagatcttgaagaagtaaaaaccctcgaatttcacgaggaaaatatcgaggtagattcggtgacagaattagtcgaggaagcgagttggctgctcacaaaggcaagtattgatacagaaaaaattgagaactatttacaacagaaaaaagaagcagatatagaagagacgattattgagacgagttctccatcatggggtgatgcgattcgccaactcttagctatagcagctcttgaagctaataaaaacattgaatttcgaccgaaacaggaagtgaagcaatatgagaaagaatgggagtggatcgaagatgaagacagaaaatccggcattcgaagaagagatcatgcaacatcaaaatttaaatag

SEQ ID NO: 52754 - DNA, 690 bp, Virgibacillus soli
atgaagacagaaaatccggcattcgaagaagagatcatgcaacatcaaaatttaaatagttttcatacattacgaagtgtattaacagatcgagaagagcagacatttatgtcgatattgttttcatcaagtgccacgattcgggctaataattttggtctctctcgtaaagaagtggaaaagttattaggtgtcacgcgtaatgaccaatacttcttttcctttttgtcacgagtgaatcaagctgttgggcgttattatcgacttatatatgatgaacaacgagatcaagttgttgttctactgcgcgtaccagcttggtctgctcgccataccctatcggaagaagctcttgcggttttgctctatatgttttatcaacaggaagtgctgaagcacgaatatacccttttatcacaattgctagaagcgttcggacatgaaatgttaaaagggggccggcggattcagcttgccttagattcgttaagaaaaataggagcgatcgaacatgatccggcaacagaaagaaaagattcctattgtttaacagcgattggtgttcatatgttttcagattcctttttacgtagagtggttgaattcagtcattctaatcaattgtctaaagaagacgtgatgaaatttttcagtcgttataatctttacgaacaggagggaatgatgtga

SEQ ID NO: 52755 - DNA, 3216 bp, Virgibacillus soli
gtgattccctggcgattacaattttctgggatccgtgattacggggtagaggaaatgaatttagaaaatgaacatgaccatgtgatcattacggggccaaacgggacaggtaaatccacgatttccttctgtatgggagccgttttgcgttcaagcaaagtggatattgatggattgaaatcgcaaaaccttccagtagatcaaacatggcatgcccaaattcgttttctttttaaaaatgtaggatattctcgaattgatgcccctttatatattgaatttcgtttatattgtgaacaacttccgaaacagccgatcaagcttcgttatgaaattcatgatggggatgaaatagaccaattagaactacggcaaacgtatcgttccggagatgtaaataaaaacaattattctgcctataaacgagaactgcagtttaaatacaaaattcatcccgacttgtactatttaatttggtatcagcaagaggtcaatcaatttgctgagatggtgccagaggagcggttccggatatttagtgaaatgcatggaatccaaaaaattcagaaagactgggaaacaagtttggaagttgtgaaggaagctcaggaatcattagcggtcacgacgaatcaacaaaaagcatatgaatttaatttgtcggtggcgagaagtgcaaaagatcggtatgaagcgaataagaaacggttgcacgaaaatggttatctgtatgcctgtatgacctatcagcttcaaatcggggctgaacaggatcaagtgaaaatggaaaagtatatagaagaacgtgaattggagttggattcattaattcatcagcaaattgaaaatgaagagagaattgctctagagaaggataagagaaaagacctaatccaggaacaaaatcagaaacaagcgagtcgaaaacagcaactcgagaatttacggatgaatgaagataggcaagcggaagtggatactgaagtgaacctacttcaaaatgaactaagcgagctaagggaagcctatcagaaactatcttattctgaagaagaaacgaaagaaaaatggctacaagcaactgaacaagccgaacagttaaggggaagagacaagagtttaagggaaaagattacaagtatgaatgatgaaatggaatctactcgtcaaaagcaggcagatctaaaatcggctattaaacaatgggaggaaaatagtcgatctgcacatgatctactaacgcgttatacctcaagttataagttaaccgaagagatcgccttactcgacgattccatacaaacgaaaaaggaacagttggaagaaaagaataaacaactgcgtacttccaaaaaagagttagaaatgttagaacgaaatcagattgagtcaccgcgccagcgtgaagcgattcgcgagttgaaaaaacagggaattcaagcttattccttcaggtattttatcagtatgatagatcatgtagaccttaaaaaggaaaccctatttgatacgattaaatatacggtcttttatgatggttcaacctgtcagcctgttaatgatctgtatcatgtgtccttaaaaaagatcattccggatcgatcccttactgaattaccgcaatggggattacggatgcgtgagggtctctcaacggaagatcaaaataaagcagcccgagtactatggtggattgaacgattttttagcaaggagactccacgtattgaacatggctggctcgtggatcaacaagggatgagaggggcacaggaacaggattcctatattttaagtaaaaaggctttggaaaatcgcaaacagaatcttgaacagcaaattgattttttgcaaaaagagctggaacttttgaaggagaaagtaacgaaggaaaatgaaacatatcagatttggaacgcagatgttcagaagataaaagaagcagaagcgtttttatccacaaaagcagagcaagactaccgaatcaaacaattagaacaatacaggattttgtatcagcagctactagaagataaaacaagattggaggaagagtcacaaaacacttggaaggaaagtcatcggttgtcggaagaggttaaaaaactcgaaacggacttacaggtatatgagaaattcagtcagcaaacggagagaattgagcgactgcaaaaactagaacagtctttgaaagaacttaagaatgaaataaaaggtctccgcagctctataacgacattgaataatgagctagatgatgtgcaacaacatctcagaaccaaccagcggactatcgatgagttggaagatgaagggactcaaaataaacggtccataaaactaatttctaatcaaaaacaggaaaaagaagaagaaagaattgctatgagcaaggttgctgtaggttataaagaggagttagaggagcttcgacagcttattcctgatcttgtagaaaaggctgctacaaataagcaagctgatgaatctaaatttgaacttcaaaatcgacaaaaccaagcgaaagtagaattttttactgcaaaaaatgaaaaagatattgatcccaatgcagtggaaaacttttacacgttagaaaaggaagttcttcgtaaaaaggatgaattgcttgctgctaaaaatcttttggaagaaaatgaggaacgtgccatccagaatgaaaaacgattagaaacagccattacaatgcaagttcaacggatccaccttctttttgaacagtatatgggcttatttcagtttgaaggtcagattaaatatgagaaaaccttggataagaaaggccgtccagtctttaaattgtttatctacgttcggaaagaagggcatcggggaaaggtttgggatgtaagttggaaggctagaggaggacgcgtcggaaaaggtgtttccggtggggaggaatctctaagttctctattattcgctctttctctattgcaaaacttggaaaaccgcgctagttttatcgtaatggatgaattcgatagtgctttggatgaaaaccgtaaagccaaagtctttgaactgtatgcggaagaactccagcgaaaattaattatattatctcctaaagggcatgaagatgagtattataatcgattttctaaagcttttattgtctcacatgatcctactgaattgagaagtaaagtaaagggaatcaaactaaattctgcgaaaaatttagtttag

SEQ ID NO: 52756 - DNA, 444 bp, Virgibacillus soli
ttgcacacaaaagaatttatccaaaaatatatatgtaagtctggggaaacgattgaacagcttagtcaaaatgaatggcaaatccaaaagtggacggcgcggacttttaaaacaatggggaatgttctggcggaggaacagtacgatcaatcgccagtagaggaaataaaaggtttaaagctaaaaccccattctcgtagaaattcattacccttatcagagaagataatacaagaagggttgtataaaggatggattattcaagaaatccgctttaagaaagatggtaggacaccagcagattcggtgtatcgaatggggcctggattatttatatatgaaaggctgaggtcagagaaagttgatttagaggatagagaactcaaacaaattttattaaaagaattggaaaactcaaagggcaccttaccaaatgatttttaa

SEQ ID NO: 52757 - DNA, 1515 bp, Streptomyces anulatus
atgaacgacagccgcgagcccgcttccgtcgagctttccgatgacggtctggcacgcagagccaaagcgctcgcctgcacggcccctctccaggccctggacgagaacaaggggagcctgcgctgggtggaggcgagtgtctaccagctggcggagatcgcgctgcacaccatcgaccaggtcaccatctcgatggacttcgactccggggccaaccagcagaaggtcgtcgaccaggtggcgcggctcgccgccctccaggctccggaacgtacggcggaggagcaccgcaaggtggcacggcacgtgctccagcgactgatcaacgtcggcaccgtggaccggagtttcgccgagaagatcggttccatcgaccgcagcggtgtctaccggcgctatgacttccggttcaacctcctggtcgaacgggcgggcccggacggaaagatctacctccgtgcctccgacgaggcaatcaatgtgctggtcggcgcactcgacaccgatgtggagtcggcgcagatcgcggcggaggtgaagctcgagagtctgatcaggcgacgcaggatcgccgaggccaaactcgcagccgagcaggcccgttaccggacggtccagtacggggagatgctgcgccagctgctcgacgccacctcccgggacatccgtgcggtcgactgggagcaagaagtaccgaagctgctcgcggatgcgctgatccacatcgaggagcgctacgacttcgagcatcgcatcctgagcaacatcagtgagctccgggacaagtccgacgaaccgctgcgcaagcgaaaagccgcggagttggtcacgatcgtccgcgactgcatccgtcgacatatgcagttgcagcagaggttgttgacggcgggcgcccttttccgggaggagcaggaccggcagcagttcgcggaactccccgtgcggtctgtactggacctccacggacagctgttgaccccggcgctggggctcccgctcggtgacgcgctgaccgtcggtaaggagttcttcaggggagctaccggcgccagaccccctgtcgtactcgaactgtccggcctggtgactcgattgctccggccgatgccggaacgagaccgcctcggggaggagatcccggagcccgacctcacagacacgacggagaagcccgtcttctccctggaggactgggccgccaccgacgctctgctcgacctccgcgacaccccccggcagctgagcgacctgctgaccgaagctgagcgcaccgcgcccagcacagccgccctcctcctgcaccgggcggtcaacgccttcaatccgcatgtcggcgaaagtatcgcgcgcggcagctcccggatgcttgtgggcgtggccaccggagaccgcttcgaccacccccatttcggcggagacggtctcctgctctactccgccccgatcgtctctccccctgacgcgagcgatgcccccggatccgagctctctcttcccgaggaacctttgcgatga

SEQ ID NO: 52758 - DNA, 4461 bp, Streptomyces anulatus
atgtatgagttgtcgagagtggcgcttcagtcggtcggtcccgccggagcgcgctaccaggacgtcctcctcgacttcagcgctgtcggccgcccggtctccgaccgccgcatgtcgttgttcggcgccggtgcgcccgctcgccgcccttcaccggcgaccgtgctcttcctggagaacgggggaggcaagtccgtactgatcaagctgatcttctcggtggtcctgcccggtcgccggcagatcgtcggtacgagcggcggaggcgtcctggagcgcttcgtgctgcccaaggacacgtcccacgtcgtcctggaatggacacacgctcgcagcggccgccgcctgatcacgggcaaggtgatggagtggaaggaccgccgcgaatcctccgacccacgaaacctgctcgaacgctggtaccacttccgccccacggccacgctgcacctcgacaatctgcccttctcgtcgagcaaccactatcggacccagaccgactacctcaacgagctggcgaaggcagacaccgccgactccgccatggagtacggcgagttcgtgcggcagggggagtggaccgagcgattggcggacctgaacctggatcccgagctgttcaagtaccagcgcagcatgaacgccgacgagggcgaagcggcggaggcgttctccttcaccagcgacatcgcgttcgtgaacttcctgcttggtgcggtcctacccacggaccccgccaaggagctcgccgatctactggacacctacgcggggcgcctgcatcgacgttccgtgctgctgattgaacaggaattcgctcaaggtgcgttgagcatcctccagtccctcgccgatgcgcgtgtgactgccgacgaggcgcgtgtccggcggaggatcaccactcgggagatggccaccctgatggggcgtattcgagcccgtgcgggggccgaggccggagctgtccgccgcatccagggcgaggccaggcaactcgccgacgacagcgccagagcgcgggctgagcacgcccggatggaggcggccaccatcgaactggagcgcctggtggctgaactccgctggcaggacgcccgttccgaggccaatgctgcacaggaggaagccaggcgggccgaggacgagtcggcggcctgggcggtcgcccccacggtgctgcggcgcctcaccgcggagcagcggctgagcagtctccgagtggtcgtggctgccgccgagaaggccgcccagcccgcgctggccgccagggacgaggcggcggccctactgatccgggctctgcgcgacgggatggaggagctgaaggagaagagcagccggatcgaagtgcaggctgtcgccgccgcggagcaggccgaagcggaccagaaggtccataatgacgcactcggccgagcgatcggccaggtgaaggaagcccacacggctgagcagcgagtacgagaggtgcgcggccggatcgccgatgcggtgcgcgagggcttgctcgcccccgaggccaccgcctccagtgcactggaggaagcacaggaagccgtggcgggcaacgcgcgcaggctcgcgacactggagaaggaggtgaaacgactcgaatccgaacagcaggaggcagcgcgcgctgtcgagacgtccgagcggcaactcgccgggctgcaccgtggtctcgacagcgccgaacagaagtggaaggcggctatggcccgcagggacgccctgggtgtggaccccgcgttcctcgatctgctcggtcatcgaccggaccacctggagaccgccgcagaggcgctgaggagccgtttggtcgaggttcgggacaaggcggctgccgagatcacggacctccacgtcgccgaagcccaggatgcgaggtcccgcttcgccctggagagcaccgagctgttgcccgcctcttccgaggcgacgcgtgtcaaagaactcctcgtggagggcggcatcaccgcctggaccggatgggagtacctcgcagcgatcccggacgtcgaacgccgtcgtaagctcgtccggcaggtgccgcagttggcgagcggtgtactgctgaacaaccccgctcagttgccggcggcagaagagctcgtcaacaggcaagaaccccatccgagcgtattcctcgcggtcggaacgacggaagcggtcacccggacacaccctgatatcagcggggtcggcttcatcgtcgagccgcatccggcgttgtacgacgagcggtcagccgacacggaacgccgtctggtgaggcaacggcacgaccaacgtgtggccagactcgccgaactgtccgagcggcgggcggccgcggcggcactggtggcccggatccaggagtggcgcagggacttcccgcccggtcgcctcgccgaactccagcagtgcgtggaggagcggcgcctgctggccgaggcgggggagcaggaggcccgcgaactgcgtgcgtttcacgaaacgttgtccgataggcgtctcgcggccctggaagaggccgagccggtacggagcgcccagcgggggcttgacgagcgtgcccaccgactgacggtcctcgccgacgaggaggcacgggttcccggctgggaggccacggccgatctgcgcagggaagcaggcgaacgagagcgggaggcggcaggggaagccgaccgcgcggcccggcggggccgggaacaggcagccgcgctgctgcggcaggtggacggcatgcgtgcctccgccagcagactgtcggaggagctgaccggcctaccgtcggacgtcaaagtcccaggagtgccggaaggcgcgagcgcgccactggaagtgctccggcgcgactacgtacaggcggccgagacctatctgcgggtgtcggtaggggaccagctgctcgcggatctgcaacagaccgagagggagatctcgctgatcgcggctgaactggacgaacaccaggacgcggtcgtcgagttggcgggaaaattgttgaacggcccacaggggacggattccgcatcccgggagctggcccgccggatcgccgatcaggccgcacctgagctgcgcctgcgagcctcggagctgagcgcacacgcggcgagccggaggaaggagtacgaaaagttcacccctcccctcgcggaggtcgacctggctcccttcgaaagaccgcgccatgtcggccatggcctgcgcctcctggaagaggcgaaggagatgcggaatcaggtggcccggacggtcacggagctggaccggcacggacagcgtctgaaggagtccctggaggaggccgaatcgtcacgcaagggattcgagctactactgatgggctccgatgagttcgcggagttcgcgcccatcaccggtcccgccggccccgaaccgtacgggggcgacctggccgcagccgctgccgaacaccaggcggcccgtaccgtccatgacgaagcacgaaagcaggagacggtggcggaggacgaggagcggcgcttctccgaccagctcgtccggcatgccggacgagaccggttccttccgctggagaccagcagccggaggatcatcctagagatcgagcgggctgaacttcccggacgggctgctgagtgggtaggagccatgagggggcgtctccgctcgctcaccgatgacctggagacgatcgaccgccaccggaccgccatcgttcgacagctttcccaacaggtcgcggaggcgttggagaccctacgtcgggccgagcggttctcccgcctgccccaggggctcggtgactggtccgggcaaaacttcctgaggatccggttcaagagcgtctccgaggaggccttgcgcgaccacatgggcctgctcgtggacgatatggccaagagcacgatcgaggctctcgaaacgggacgggagcccaagcgcgacggcctctccctgatcctcaaaggagtggcggccggggcgccgagcggcttcaaggtgacaatcctcaaacctgattccgcattgctggcccagaaggtacccgtgtccgacatccgtgccgtgttctccggtgggcaactgctcaccacggcgatcattctctactgcaccatggcggctctgcgtgccaacgaccgcggccgggtcggtcatcagcactccggcgtgctattccttgacaacccgatcggccgggcttccaccacctacctgctgcgactccagcagtcggtcgcccgcacgctcggcgtgcaactgatctacacgacaggtctgttcgacaccaacgcgctggacaccttccccctggtcatccgactgcgcaatgacacggacctgggcgcccggcggaagtacctgtccgtggacggggtgttcgggcgctatctggacgagtccttggcggcaggcgccccgcagatctccgcctcccgttacttcgtcaaggacgagactgccgatgacgacgagtga

SEQ ID NO: 52759 - DNA, 852 bp, Streptomyces anulatus
atgccgatctgggccggcgaactggcacagatcgaggattactgggccctggcccggacgacggacaggattcgtgccgcctacgaggcattgaacacccggctgcacagcggacacagaggaatgtgtattccccaacgcgagagggccttgcagatcttcggcttgcaccccttcttccagcatccggatcacccggcggagaaactcttcgacacgctggacgcgcagccgctcttctccgaccgggaacgtctgctgaagttgctcaacgcgttcgatgtcgatcctcccctactcagcaaggacttcaggtcgaggggcctggtgaagaaccacgccggatatcacaaacccggtaagggaagcacgctcctcgtcatcgagaactccaccacctactggtcgatctcccacatgctcgggcacatcgggcgcatcggtcaccggatcggtcatgtcgcgtggggcagcggcgtcacgttccagaagtccatcggcagcctcaccgcgagggaccggatctccgacatcgtctacttcggcgaccttgaccccagcggactggcgttccccgctcgcgccgagcggtacgtcggccgcctgcgggtccgcccggccttcgagttgtacgacgcactgctgcggctcggcacgcccagccgcagcctgccgaaggaagcctggagcacaccggaacgggttgacgagctggttttctggctcgatccccgccaccacgaccaggtgcgcgacctccttctcagcggcagtcgactggcacaggaatgggtcggcttcgaccacctgagtaccaccgaacgctggtacgcggatgtgcgggacacgtaa

SEQ ID NO: 52760 - DNA, 1467 bp, Salmonella enterica
  subsp. enterica serovar Itami str. SA20014991
atgtcactagggtttttggagcaggctcgtaatgaatctatggcacgccgcgagctgacgattcaatctcacgcgttgctggtagtgcggacgctggattcaatatacagcgccctacagcgcaatccgtttgatggcttcgagcttgatgcactggcggcaattatgtatctctttgacgccatgctttattatgctgaccgcgagcgccagccaggtatgacgcgtaaagaagcggagctatgtctggttgggcaccttaatgaagcctatccaggacaagaagaatccgactacgcacaaacggccagcaagatttttgcggcgatcaaagatcctttccgcctccgttattatgatttctcgcaacgaacgcattccgaagagcagatagtccgtctggtacgctatgacctgctatccggctcagatgatattctctggtcgctgaccgatgaaggaatgctgttctataccctccgtttggatgaaacgccgatagaacgcgctgcgattctggcctggcgcacgcttaaaaccatccgtcgcggtgaaatcgacaaggcagtacaccagatccaatcaacgcagcggcaactggagcaatatctgattgggatgcggatgaaagtgcgtgccgcccagtctggtgatttgagtgcatcctatgcacacgatatccgtcccgtactcaatgattcctttgataaaacccgagaggttttggaacatatccagaactcaatgtcggctattaccgaaatgctggttgaaggaagtgcgaaattaaatcccgacaaattaaataagctacgtaaggcacaggagatttttgctgaggtctgcgcttttacgcagcgctatcaagactgcttacttgatgttaacaaagattttgagcgagctcgtctgaaactcattattcccagagataatacccttttccgggaaacgcttgaaaaaggtgcactcaagcccttgctgtctcattcctccgacactgtcgaaaaggaaatcgatggtctcaccgcacgcctgttggctccccgaagacaggatgatgatcggcacattctgtttgaccttgaggcgctgctgaacctttatctcgatagatttgaacaggcgcttccacatgagatacaggaccccaccgatcagcctgtagctattgaaaccaacctgcgaggtatccctgaatctgccattaaaaaatgcagcgattgggttagtgaccgattgaagaattgggggcatgtgagctttagagatgtttttgacgcctatgagtgcgaagaattatccaaacaagaacaacaggtttgtttacttcatattggcagcctggcagctaacagcgatcccgcaatagaagtggagatagacgacgctatcgaaacaacgctctggcgggctaacaatatcaaactgttaacggttgcttccttatacccctttgaggagtag

SEQ ID NO: 52761 - DNA, 4443 bp, Salmonella enterica
  subsp. enterica serovar Itami str. SA20014991
atgtggctgattaaacgggtttatatggatggcgcaggccatgaagaagctttctacaaggacctcacactggactatattggcctgtctcaagcggtcggtagccctgttgttgaaggcctgcgctcgcccgtcagaaatgcgaaggtggtgaccagtacttatcagcagcttgtaaatgggggcggtaagtcaacctacatcgcgctgctgttatcgatttttgaaccgtccgttagtgacttcacccaatatctggcaaatcatcgccagagtgaataccactaccgcaattacttctataaagaactctctgttgttttggttgagatggtcaatgaatcaggacaaacgttattactgggacatgctcatcagcgtaatggagatgatgttgaccgcacactgtttatttgtgatgcgcccgactccctgatgggcgcgccgtttgatgaagtcccttcttattcccgcgcggaacgcaattctgagctgcgcccctatgccaatagcctgcgcagttttgatagctggcttaatctcaaggccggtagtgaaggcggcatgcattggcgtaaaaccaccagacagaacgagtggcgcgcatttttactggaacaacaaattaacgttgatcttatcaaaacaatggtgaccttcaactccgaagaaggtggcctgacccgttttatcgaatacaaaactgaacatgatttccttggcgcgttcttcgcctgcaccatgtctaaagatgcggctgagcggctgcgggaactggtagcgcatgaagttgaacgtcagggagagttagaggggattcgtcgtaacgagtccttcctgaaggatgtgctggctaactggctggcgtttcttgatccggctaaacagttggaaagcatccaggcacagcagcaactgctggatgatggcttccgagaagcaatgcgcgatctcgcagcctttgtcggggatgctcaggttgaacagacgcagcttgaagataacatggatagtttgcaaacgcatattggccaggcgatgtctctgcatgagcagttaggtaagcgcagagcactgcttgaatatgatctcgtgcagcatcagttcaacaaacaaaaagcgatagtcgatgcgcttcaagacgaagccgataccaatcagcgccagattgagattactcacgctgctatagactacaaagcctatgctaaggccctgaatgagtaccgccaggcagatgaagatctgaaggtattccaaagtgaaacggaaaggccgctacaggtgattttcgagcgtactgctggcgaagccttgggcacattagagtgggcaatcgacagacatcgccagcaggaggctacgcttgaggaagaattagggcagatggacagggaaagccatgtcctcagacagtcatacgataaactacaaaagacgttgggtggtctggaaacggagcgtgacggatataaaagagacaaatttcagggtgaatcgcaacggaatgaattatgtgaagcaggggtgatccaaaagggtgaaacaccagtagcagcccaataccgactggaattaaccttacgcgatgcaaagcagagtgaagaactggctaatacaattcatcatcagaaagagcaggcgctggaagcacagctgaatgttgtgcgggaggcatcaattgagaaaagtgaggcccagcaaaaactcattctggctgaacaaaaacaccagtcagctgtggatagtgccttacttttagcaaaaacctatcaaaaactgccaacgtcaacgcgacatgatctagatattgaagacacgagttggcacagcgagctgtgtggattgcagctcgacaaggtattgaatgcgaacgctcaaacgctgaatggaatgaaagagcgtttactgcaagcccggcacgaactagacgagttaaggatgacgggacatgaactggtcgctaagctggtcaatcaggcacttgaagcgttttatgcggcgggcattgcacgggataagctctggacatttccacactatttggcctctgtttacaacgatgatgcacaaaagattgcagcggtgatcgatcaaaaccctggccgctacctgagtctggtcgcactcgacaatgtaacgtttgaacaggtccataaaattagtgagatcctgccctggaagaaggctcctattgctatttacttgctggatgaagcacaagatctccgccgagaaacgcctgaattagtacaggttgtcctctcaaaccccgataagcacggatatagccaggccgcttacgaagcccggctgcaagacctggagaatatcgtagcgtcgcaggaagtcagtgtgaaggctgcgaagagcgcccttaaggtactggaatctttcaggaatgactggcgtctgcattacgagcagtatggtaagcattgggggggactgcttgaccaacgggagctggctctcttaatactggaaaatgctgatgcagcacttaagcaagctgagcatgatgagcaaacactgcgtgacgagaagagagatgcccaggtgcggttaaacaacgcccaacagcagaaaattcaggcagaaaaagcacatgataaactgagtttttttgtagaaacagaatgggcgaagcgtgaaacggcgataatgaagctggagcagttagctgcacagattcaacgaagcaaggacactctttgcacccagagagagagattggaacggctgaacgagatcaaggagaataagcgctccgagaaaacccttttaaatatccagatgggtaactggagtaatctgtgtaacgagccgttctattcagagattacggcgactgaaggtatggaaggacgaagccccgaagatgcccatgagatggcagctcaggcgcacaaaaaattgctcgaagcagccaacggtgatcaagtgaccgctctcaagcaacaactgaaagatgctgaacaggcacaacgttacgcctctgagcgtttgaccgctcaacccacctacaatacatatccggacgaggtaaaagcggcggctatcaatgagctaacggtaattaataaccgcatcgtacgcctcaaggaacagcaaaagcaattcacgcaaaatctaattaattctcaggtaactctgcaaaatttttctcaaagctgtgaggaggctagtaaagcaattgacgaggattttgtctgggaagagaagcccattgagatagagacaatccaaacgtctctggctgaaatcgtcaacagcctccatgaaattgaataccagctaaaacttcaactggagcaaaagaagctgcagttgcaaaagatggaaaatgtgaaagaacggctgcagaacgccaaaacagctcaagcgatgatccagcccattacgccgacctctgcggcgggtctacctggcaggatccagagcatcactgaatatactgacgatctggttacacaatgccaaaagtatgccggcctaaatgaaacgctaaaacagcaaaatatacgcgtctctacggtctggggaaaattccgcaaacggatcgaagaagagttggccaaggatccagatgcccgagccagtcaggaatacttacggcagttggactcaatcgcaacttatcatgaagtgctgggcgatttggacagggtcggtacagggatcacgcaggtattcgaagctgtgcaggacagcctggaacaattccagcgttcgattgatctgactgtcacccatctgactgctcatctggagggggcgattaaacttctcaagcgcgcaatgtcggtcaaaattcctgaggattgccccgtattgcctggtcggcccattatcaaaatgaccgatcggctgaatgatgttgccgctgatctcaggggttttgccagcagccgcctgcagcagtggatagccaggggacagataccccgagcgcccaatcgagacgccttgacagctgatttgatacagtcggtatttggcgaaggggaactggaggtgcgtttgctgaagacgaatgccagccgtccacaatggactcctgtcacccgacttgaaggttcgggtggacagcgccttacatctgcctttttactgtttgtgacggttggtaaagtacgagagtacgatacgggtatttcaagtgcaggattcttgttagccgataacccgctgggtaaatcgaatgccgatgatctaatgcgaattcaaacccaaatggccaaagcctataaaatccagctcatctacctgactggtatttcggatgaaaacgcccaatcaatgtttgataaccatctcttcctgaataaagttcaaaaactgaggcggcgcgatttggtaaccgttgataaagaacgccatgccctgtgggcggcttctctggctgctaagccacagttcgatcccgtcattttaggttga

SEQ ID NO: 52762 - DNA, 1044 bp, Salmonella enterica
  subsp. enterica serovar Itami str. SA20014991
atgatctggctatcccgactggagtcgacagccaataaacatcgtcttgccgctggtaaggccgcccgtacagtgaaagctaatgcggtgctggatgaggtgatacgcgtccacaaccaggaggccttggctcaggatgcacctgatttgctaagtcaggctgttacgcaactgcttctgaaggactggcgggctcagcctaagcgcaaagcgagttggcagcgctattggcggggtatgagcctgccaagtacttttgtttacgaaggtgccatcgttcctacgaagacaatatcagaagtagcctggcatccctggttagcgcaacgtattacaggacaactgacccagccaatcaaggcacgcttacaacagctgaatacatatctttttcgccaaaccgagggcgacaagtcactattcccaggcttgcttgggcatcgtgagcggtctctgcttatatttggtgacgaaaaagcgctggactccttgccgcctgatggctggaagcatgtcattctgactttggctgatatgggcgcgtttcgacgtgcaccgcctttaccgtataagtcatcatgttgccatgatcttccggctatcattgttgaaaactccgatgtgtattatcgactatgccaacttaatcgagttcagactcgctggtcactggtcatttacggcgcaggtaacaaagtatccggccaggcggagtgcgtgtcacaacttcttgaggtcgaaaaggtagaacagctactttattttggcgatctggatgttgcgggcttaaaaatcgcccatcagttgcattgtaagttgcttaacgattacggtatcagcttgcatttagatgaatggctttataatgaactgatatcaaatggcctgatgacagcagaagggaacgccaacaacgaacggtttgatttcgaattacagtgtggctggatgccacagtttgttttacgagaaatgaagactcttctggcgatccatcaacgtctacctcaagaaggcgtggcttctttaggtttagtcatatag

SEQ ID NO: 52763 - DNA, 1512 bp, Streptomyces scabiei
atgtctagtgacgccatgaatgatcacgggggcggtcgaaacgtctgggccgacgaggggctcacacgcaggctgaaggccctggcctgcacggcgcccttgcacgacctcgacattcgccaggcgaaccagccctggttgaacggcacccagtaccagatggccgaggtggccctgcagatcatcgatcacgtggccatcgcgatggactacgacacgggagccaaccacgaacaggtcctgctcagggctgcgggtttcgtcggctggcaggcgccggaccgcccggccgatgagcacacacgggtcgccggatgggtgctggactccctgatcaacgttcgggacgcggacaggggtttccgccgcttctacggagaagtggaccgcgctggagcgtacgcgctgaggaagtgggacttcaagctgatcgaagagcgttcggacagcaacggggacctgtatctgcgtgcttccaacgaggcgttgaacgttctggtcggcgcgttggacacagatgtggagtcagcccagatcgccgccgaggtgaggttgcgcaacctcatcggccgagggcggctggccgacgcgaaagccgtggccgagcaggctcgcatccgcaccattcagtacgcggagatcatccgggcccaactcgatgccacgagccgcaatgtgacgacggtcgactggacggacgagataccggacctcctcaacgaggcccttgaccacgtcgacaaccggcttctggaagaggccgcgatcgcccggtccgtctccaccgaacgtgacctgtccgaggacccggtccgcaggaggcaggccgccgacctcgtggaaatcctggacgactgcgtccgccggcacactcgtctgcagacccgcttgcgtggtgctcgtacactctttctcgacgaacaggaccgccaacagttctccggcaccgccctcagggctccggtggacgtgtatggcgacctccttgagccggtactgcggctcacactggccgatgcgtctcttccggtgcgctccttctacgagcagtccgtggggccgacgacggaggaccagttctgtctggccacactggttcccgcgttgctcgccccatcagcggaacgagcccggttcacgggcgaggaggaggagccggagctcgtcccggtcgtggaagtgcgcgggtacaccgacgagcagcagcgcgtggccgagtccttgctcgatctggccgacgaagcccggcccttgtccgagttgctggaggaggccgccgcactcgatccggaactccccgaactgttggtcctgttggcgctgcgtgccttcagcccgcaactgggggcggcgttgagcgagggagccgaccgggtcctgctcgccgtatcggcgggggccccattggacagccaagggttcgagggcgacgacctgctgctgacgtccgcggcgttcgaccgagcggctctggacgccgaccgcctggagaggaacagcggacgatcatga

SEQ ID NO: 52764 - DNA, 4467 bp, Streptomyces scabiei
atgtacgagctgtcccgtgtccggttgagaacggtcggaccggccggtgcccgcttccacgacgtcaccatggacctcagtggcgcgggacgcccggtgggcgccgagcaaggagccctcttcgacaccaccgccacgacctaccggccctcgcccgccagcctgattctgctggagaacggcggcggcaagtccgttctgctcaagctcgtcttttccgtcgtccttcccggacgtcgccacaccgtgggcacgaccaacacgcgcgtcgtggaaaagttcgtcatgcccaaggacgtctcccacatcgtcctcgaatggatgaatccgctgaccggggagctgctgctcaccggaaaagtgctggcctggcgcaaccaggtcgcctccgaagtctccgacaacctgcgtgaacgctggtactgcctgcagcccagtgacgagatcaacctcgacaccctcccgatggcggtcggcacgaagtcgcgcactctggacacataccgggacgagctccaggaggcgtacgcggccgaccagagcctggccctgtactggacacggcaccagggcgagtggaccaatcggctgcagctactcgaactcgaccccgaactcttccgctaccagcgggagatgaacgtcgatgaaggtgaggcggcgaactggctcaagcttgattcggacgtgaagttcgtcgactttctgctgcgggccatcgtcaaggccgatgagatggacgacctggcggcgctggtcaccgaacatgtggagcggctggctggccgtgggttgctcctcaccgagcgggagttcgtcgcccgcgcactcgaactcctgggcccgatcgccgaacaggccgaagcctcccggcaatcccggcgtcgagcggaggaggccgttcgtgatgtagcggaactgggcggacggcttcgggtacgtgcgcgaaacgagcaccatgtggtgctcgggcagcgggcaaagcttgtcaagtcggaagaggaactcaagaagctgacggtcaccgccgaacgcgccaaggggatcgtccttgaactccggcgccacttggccgacttgaaacacgagagggctcaacgggagctggcggtgagggagaagggactgtcctgggcgcgagaccacgtcaaggcgtggcaagcgacctcggccgtgcatgaatacgaggacagcatcgcccaggtcaagacactgaccgaactcatcggcgccgcggaggagaaggcccgcccggcactggaagagcgcgacagcgcggcccgccgcctggcccgcagcctgtgggcgacggctgacgcggctgcccagagcgcctccgacgacctgaagcaggtctcggctcgggagaaggagaagagtgcggcacaagatcgtgcccgcgcggcgcaccgggccgccacgacggccgaacatgcggccgcccaattcggccagctgatcacgcgcctgcgtaaggacatcgaagcagctgtctccgacggtctgctccatgaccccgccgcgctgtcccggaccgtggagaccgttcaggaacaacgcgacaacacagcccagcgcgtcacagacctggaacgagaatgggcggaactcgcagaccgagaggccctcgcgcaggacgagttacggaaagccgagtcggaggcgggtgacctgcgtgggcgcagtaaggagctctctggtcgcttggacgaggtccggacacaaacagcgcgattggagaagaaccctcggcttgtggcgctcctcgacgtgccggacatcgacctcgaacgcgacgtcgccgcgctcctggaggcattgaacgccgcgcgccttgaggccgaacgagaacggaccgagctgagggtcgccgagtccatcgacgaacaggcacgccacgccctggccgcgggcgacctcctgccgccggcccaagtggtctccgacgcttgtaaggcccttgaggacgccaaagtggtcgcggtcccggggtggcgctacctcgccgccatccccgataccgaccggcggcgcgatatcgtggagcggctgccgcacctggccgcgggcatcctcctccacgatccttctgacatcgaccgggcccgggacgtgctcacggcactgcgtccccaacccactgtcttcgtatcggttgcgacaaccaggaccttcaccgaccccgaggccgcactgacagacggcgttgaggtggtgatcccgcctcaccccgccctctacgacgtggacgcggcggccgccgagcacgaggcgatcgacgcccggcacgccgtacgcagcgctcgtgccgaagagctgacggcccgcatcgagcaggacggcaacctgacctacggtctcacggactggcggacgcgctaccccgaaggaagcatcaccgcgctgacggaagaacacgcgggcgtggtgcgcgagctcacaaccgccgacgcgacggtgaccgaacgcaaggaagtgctggagacactccaggaacggcggcggaaaatcaaggaggagctcccacctctacgcgagactcgggactcgctcatcaaacggctcgaccggctccaagaactcgccgaccgtaacggccacctgccggaatggacggagcaggcctcatccgagaaggagaggatgcgagagcgccaggaagccgccggtaaggcggagaatgaggccgtcgagctgcagaagctcgtcacattgcatcaacgcagagccgacgagtaccaacgcaccgtgcgtttcgtcaacgacgaacgggccaggctgcccgggagcgaggacgtgctcccttccgatcccgttcccgaactctccacggcgctgctgcgaagcacgtacgaccaggccgcggaacgctatctccgtgttcaggtcgggagcgacctgttggaagagcgtgagcgagctaacgaacgcgccgccaaagcgaagcagggctactacaagctctccaaggacctccgtggcagggcggccggactgctgatgagtcctgagggctccgacgaagcggcacgggcgacggctctggagagcgcggagcaggcagtgcgggaagccgagagggtggtacgcgacgcggcagtggccgcgtcccgctgtgcggacgaactgactgctgccgaggatcgcgtgacgaccccggtgaagcttcccgaatacccggccgatatcgactcctgcgccgaagcagtcgaggatgccggccgacagcaggcgtcaagcgcccgtaaggcggcggagcatcaggaagtgcacaccaggctcgggcatcaactggagggcgctgaggcatccgccaaggccttccagttcatcgtcgaaggtttcgccaaggacgtgtccgcgggcgacgacgaggccgctgacgtcgcgccctacgagggagacgcggacgctgcccaggaccttgccacccggctaaccaacgaacgtaggacacgcgaagcgaatgcccacaccgatgaacagaccctacgcacggcaacggagaggctcacacaccacgctggcgcagaggagttcaaggacctgcacgttcgcgtgcagactcagattcgtatcgcgggttgggaaacggtagcggcccgtgccacggagtggtccgacgctctcaggccgcgcctacgcgctctgaacgaggagatcgaccagacggagcggcaccgcacactgatcgtgcggaacctcaaggcacaggtcgacaaggcgttggccctgttgcgccaggcgcagcggatgtcgcggctgccagccagcctggacgactgggccgctcaggaattcctccgcttccgcttcaccccggcccaggacgacaccgcgcacctgcacataggggaggtcatcgacgaggcggcgaagggccgcaccgcggacgggcggtctgttcgcagggacgggatgtcgttgctgctcgcgggagtgagggcagccgtccccagggggttccggatcgacatgctcaaacccgacgccgtgctacgtaacgagcgcatcagagtctccgagatcaaggatgttttctcgggcgggcagcaccttacggcggccatcctcctgtactgcaccatggccgctctgcgggcgagtaatcggggcagggagagggacacgcactccggtgtcctgttcctcgacaacccgatcggccgggccaacgcggactatctgctcgccctccaacgcaaggtcgccgaggcactcggtgtgcaactcatctacaccacagggctgtctgacgacggcacgctgaaacgctttcccctcatcctgaggttgcgcaacgatgccgatctgcgggcgggacgcaagtacctgaccgtgaccgaccggatccaggaggcgctcgacgcgctgcctgagtcggacggcacgggcatcgtcaccaccatcagaatcttcaagcgagagacggaagacggccagaaccgtgaagcacaggcagagtga

SEQ ID NO: 52765 - DNA, 1116 bp, Streptomyces scabiei
gtgaagcacaggcagagtgagttcatcgggcatctgagagccggtgccacggattcgggctggaacggcgtgcgcaggactcgcgtcgtactggacgacgtctggatcgccttcagaaaggtgaacaatcgcaacccggacggcgaattcgaacccttgctcatgtcgaggatgttggacgaactcgaagagcaaggcctgatccaacagatgaaacaacgtacccgggacaaagtgtccctgcctctcaagatctggctctgcgccaccgcacccccgcgaccgcccgaaccgcccatgccgcactggcaccccgatctctaccaactcgcccgggagtggccgacggctaccccgaagcagcgctccgcgtacgtggccgtcaataagtggctgatgagcgatccggatcttttccccgtgccgctccgggagcgcgccctggagatcttcggaacgtacgggagcgaagcggactttcccatgccggaaaagaccttcgacaccctgcgttcggggccgatcttcggcgactccgatcggctgcacacaacgctgcgtacgttcacgacacacccgccactgctcacagagacgttcctgaccgagatcggggacggctactaccaacgggtcggcggcggaaacatcctgttcgtggtcgagaactcagccacctggtggtctctcgtgaacagtctccccgacaaccaccgcctggggtatgtcgcttgggggctcggcggcacattccgcgcatcggtgaacacgctcacggcgaagcaccacatcgcggagatccgctactttggcgacctcgatctgagcgggatccgcatcccgcacgcggcatccaagacggccggcgaccggggccttccggctgtccagcccaccgagcgactctatggcgcgctgctggaactcggacgcgcacgcggtgcgaaggagaaggccgtcgatgcggaggaggctcgggctctggccgaatggatgcccgcggcgcaccgggcgaaggcggtcagcctcctggtcgccggtcagcgcctggcacaggagtgggtcggctaccggcacctgacccacaacacggcttggcacgccgaccttgtttga

SEQ ID NO: 52766 - DNA, 1536 bp, Methanocalculus sp. 52_23
atggcggactcactccggcgctttaaggagatcaacgagcggatggagcatctcaaatgcttctacccgtttttcgaggcctatacttcccgtccgatgcaaggcctggactatgatgccccctacctcgcgctggacgtgttgaccctgctcattgagaagggcaggctccagggccgtgttctcaagtccgatgagatccgggcgcacatcgaagagacgatgaaggagattcaccctgaccgggagttcgattgccgggaggtgacgcggaccgtgctcggcttccttgaaacaaatacccggaatgagctctactgcttccagtaccgggacccggtcaggggaagacccgtcaaccactacgtccacctggtcgagtatgatgtgaccgaagacggctaccggatcaccgatgaaggcctcgagttcatgatcagcatcaaggaactccccgaagagtccagaatcacggttgccctcattctctttaagaaacagatcgagagcggctcttttagaaacgccctggagacggtgcggaacctcaacctcgaagtactccgcaagaaaggaaagaaacaggcgctgcttgacaggatgaggtatggtgaccctgatgtggccgaaggctttaccacctacacgcaggaggtgatcgctcagatcaggcaggagcaggaactcttcacccaggtccaggcgacgctccgcgatctctcaaaggaccaggagaggattgcccgcgcccccgaatcgttcgggaaggaagaggactttatcgccatccaggaacttgcgaccgaacttgagtacgggtataccctccacaacaccctcttgaaagactataccgaccttcccgctgagtatgagtggatctgccaggtccgcatgaaatcgctctttgaccggaggtaccagttccaggaagcactggagaaccacatccatgcaaacgtacctaacgaggtgcatatcgtggagatgcatcctctcctcctcccgaacgtttcccggacgtttggcctctgctcgatctttgagccgcagaggatcgtcgggaggaaggtggaggacatggaggtgaagacgagcgaggagtggggcgataggaagtccatcgagaagatcgtggaggggcggcaggatgagaatttcaggatctatgcgcagttgctggttgacgcgctggcggagagtgaaacaatagatctgccggcctacctgagcgtgatccgcacatgcctgggagacgaggggatagaccacatcgacctgatccccttcctgatcgagctgaacaaaggcacccggaacggcgaggcatacgaggccatctttgaccttcacgtgccacgaggccagaatgagcctgcggtagaagccctgctttctgccgcagcccagagcgggggtgagtcccatcgaatccgggtgatctcccggccggaaaggcgagtattgatcggggaagaagaggacgtgtatctctcttatcttacgtttatcggggaacgattgcatgaagtttga

SEQ ID NO: 52767 - DNA, 750 bp, Methanocalculus sp. 52_23
atgaagtttgaccgggagaaccttgggaccgccctggagatgctccactgcatgctggcggaaggctcgattgcacgcaaagatcacccaaaggagttcttgcgctacgatcaggaggctgaggtgagggaggcgctggagttctgtgcggagaagcacgacctgcttgtctgcaggtataacgatgccctgtacctgagccccggcgtacagaaccgggtctttggcctctcaaacgccgagatccggaatagcctcgggagggggttcaacaatcccgagatgtacactgtcttcttcatcatacatgttctgatcaccgagttctaccatgagtccgcgtacgatgcctacgtggagaaggtggcgaagacaaacctccttgcagccgtcgagaagaagatgcaggcaatgggagcgatccaggatcttgaaaagacaagcgaggaataccagttcaacttcaaggtcatctacgatctgtggagcagcctcccggcggtagagttcaagaaagacgatccggacgagaagaaacagtggggcgtcagctcaaaggttaccctgattaacgagacgatcgccttcctggagaagaaccagcttgcgaaagagcatgatgatgccgtctacctcaccccgcgctgcaaggcgatcatccgtgaggtctacagcaaccgcgaggtgcaggacgccatcacgctcttcatcgatgggcttggccatcaggggggcgatgaggatgcctag

SEQ ID NO: 52768 - DNA, 1460 bp, Methanocalculus sp. 52_23
atgcctagactgcggtcagtgcgggtggtaaacgcccagttcaacgagggaagggggttatatcaggacttccgcctgccgttctatggccgcaatggcacctatgaactgggcaacggcatgggaaaatcggtccttttgatgctcatcctccagtgcgtcctcccgaatgccgctcctgacccgaataagccctttaagtatatgttcgccggaggcgatcgcaaccgcacgactcatgtcctggctgaatgggaactggacgaggtcgtagatgggagaagatatctcctgacggggttctgcgcaaaacggaagtccgatcaggaagacgaaggtgagagcgacgagatcaagtatttctcctacctgcacctttacggtgaaccaaacgacctcgatatcgataagattcctctctgcagggaagatggagcagacttcttcacccaggactattcagaaacccgaaagatgctccgggaaaaagcaaaaacagggtatgatatctggatagccgaaacccggcagcagtacctggagcggctcaaggactactatctcatcgagtcggagtgggaactcatcaaactcatcaaccggcaggagagttacttaaaaacccactttcacagtttcagggattcaagggcattcgtcgaggacctgctgatcaagatgatagaccggtgcctccaggacaggcgacggctcaaatctcacagtggagacgaagatcccgtcgagaaagcgctcgctgactcactgtatcaatcccaggaggatctcaggaaactgcaggcggagcaggcacgccttcacgagtacgagcacctccagaacgagatctccatcctccagacggcaaacgatcacctcctcagatcgtaccgggcatacgaggaggcaaggcagcgagcggcatcgcagcatgtcgcgtacgtcgcggcaatcgccagtaaagaggaagagatccggcaactgcaggagcagattctcggaaagcgagcggcttgcgagagtgtgcataatgagatcgaaagaaccgggctcaagctccagaatgtacgcctgaacctctccgggcaaaggctcaaacgggcggaaacggagaaggtggagcatgaacagacggtcaatacgctgaaacaccgggccgactttgcccgtgcggtgaacaagtacctctcgatcagggagcgtgaagcagagatccgggagcgggaggagatcatgcggaagatggaggaggagcaccaggaactgttcgcccggcttcgccccctgggaaagaccctccataccctggttgccgcagagaaagagcgagtcagcggtgcacttctggcggggcagagccgggcgaaggaaacccatgctgagaacatgagcctccagcgggacctcggaggtgccagaaagcaggcagagggtatcaggaggcggatcaccgagctcga

SEQ ID NO: 52769 - DNA, 1092 bp, Methanocalculus sp. 52_23
atggaacggttgatcagaaccatcgtgctcgagcacaaaaacaagcgcatccatctcgccgagatcgagagcgccctcaaagagcgcgggatcaacctgttcgccgatcaatcaaggcatcgcaaattcatcgaaacggtcgacaccttcatcgcacgcggcatcctggagcccctgaaaggcgcacggccgctccagcagtacggggggctccccgatagatataccctccaccgggacgtgatcgccggtgccggcgcccccctcttgccggagcaccggaacgaactcgtctccctctccccgccgatcaatatcgactattatgtgacccatggcgatgagtatcttagagaccgcaactacatcctgaggatcaacgatctcattcttcggcgcggagagtgcgaggtcctgaccgtcaacgagcgctcatacgaactcttcggcgacgaaaaagcgatcgccatgccggatgaggcttcggtcaaaggcgcccagatcctcaagaacctgcgccttaccctcgaggacatccgggcaaagcaggtctttgaacccttcttctggatcgagaaggatttcttgaacctgcaggggaaggcggagagaatcgtcctgatcgtcgagaacaaggacaccttctggacgctgcagcaggcggtgacggacggcgtgctcgccggcattcacctggtcatctacggcgagggaaatgcaatcctgaagaagtttgagtatatcgagaccgtcggcggggtgccggatgaccgctaccgctacttcggcgatatcgattgggagggaatctccatctataatcggctccgcgcacgctacccggagtacgacatccggccggctaccaccctctacgccttcatcctgcagaaggccggacccgcaggagcacgtcccctgcggcggccgcagcgggccggcaccctctcccccttccttgacttcttcgatgcagagactggagacgcgatccggcagatcgtcacagcagagcggtacctcccgcaggaggtcctcaacaccaccgatctatcgaggtttggagatggcggactcactccggcgctttaa

SEQ ID NO: 52770 - DNA, 663 bp, Methanomicrobiales archaeon 53_19
gagtggatctgccaggtccgcatgaaatcgctctttgaccggaggtaccagttccaggaagcactggagaaccacatccatgcaaacgtacctaacgaggtgcatatcgtggagatgcatcctctcctcctcccgaacgtttcccggacgtttggcctctgctcgatctttgagccgcagaggatcgtcgggaggaaggtggaggacatggaggtgaagacgagcgaggagtggggcgataggaagtccatcgagaagatcgtggaggggcggcaggatgagaatttcaggatctatgcgcagttgctggttgacgcgctggcggagagtgaaacaatagatctgccggcctacctgagcgtgatccgcacatgcctgggagacgaggggatagaccacatcgacctgatccccttcctgatcgagttgaacaaaggcacccggaacggcgaggcatacgaggccatctttgaccttcacgtgccacgaggccagaatgagcctgcggtagaagccctgctttctgccgcagcccagagcgggggtgagtcccatcgaatccgggtgatctcccggccggaaaggcgagtattgatcggggaagaagaggacgtgtatctctcttatcttacgtttatcggggaacgattgcatgaagtttga

SEQ ID NO: 52771 - DNA, 750 bp, Methanomicrobiales archaeon 53_19
atgaagtttgaccgggagaaccttgggaccgccctggagatgctccactgcatgctggcggaaggctcgattgcacgcaaagatcacccaaaggagttcttgcgctacgatcaggaggctgaggtgagggaggcgctggagttctgtgcggagaagcacgacctgcttgtctgcaggtataacgatgccctgtacctgagccccggcgtacagaaccgggtctttggcctctcaaacgccgagatccggaatagcctcgggagggggttcaacaatcccgagatgtacactgtcttcttcatcatacatgttctgatcaccgagttctaccatgagtccgcgtacgatgcctacgtggagaaggtggcgaagacaaacctccttgcagccgtcgagaagaagattcaggccatgggagcgatccaggatcttgaaaagacaagcgaggaataccagttcaacttcaaggtcatctacgatctgtggagcagcctcccggcggtagagttcaagaaagacgatccggacgagaagaaacagtggggcgtcagctcaaaggttaccctgattaacgagacgatcgccttcctggagaagaaccagcttgcgaaagagcatgatgatgccgtctacctcaccccgcgctgcaaggcgatcatccgtgaggtctacagcaaccgcgaggtgcaggacgccatcacgctcttcatcgatgggcttggccatcaggggggcgatgaggatgcctag

SEQ ID NO: 52772 - DNA, 4401 bp, Methanomicrobiales archaeon 53_19
atgcctagactgcggtcagtgcgggtggtaaacgcccagttcaacgagggaagggggttatatcaggacttccgcctgccgttctatggccgcaatggcacctatgaactgggcaacggcatgggaaaatcggtccttttgatgctcatcctccagtgcgtcctcccgaatgccgctcctgacccgaataagccctttaagtatatgttcgccggaggcgatcgcaaccgcacgactcatgtcctggccgaatgggaactggacgaggtcgtagatgggagaagatatctcctgacggggttctgcgcaaaacggaagtccgatcaggaagacgaaggtgagagcgacgagatcaagtatttctcctacctgcacctttacggtgaaccaaacgacctcgatatcgataagattcctctctgcagggaagatggagcagacttcttcacccaggactattcagaaacccgaaagatgctccgggaaaaagcaaaagcagggtatgatatctggatagccgaaacccggcagcagtacctggagcggctcaaggactactatctcatcgagtcggagtgggaactcatcaaactcatcaaccggcaggagagttacttaaaaacccactttcacagtttcagggattcaagggcattcgtcgaggacctgctgatcaagatgatagaccggtgcctccaggacaggcgacggctcaaatctcacagtggagacgaagatcccgtcgagaaagcgctcgctgactcactgtatcaatcccaggaggatctcaggaaactgcaggcggagcaggcacgccttcacgagtacgagcacctccagaacgagatctccatcctccagacggcaaacgatcacctcctcagatcgtaccgggcatacgaggaggcaaggcagcgagcggcatcgcagcatgtcgcgtacgtcgcggcaatcgccagtaaagaggaagagatccggcaactgcaggagcagattctcggaaagcgagcggcttgcgagagtgtgcataatgagatcgaaagaaccgggctcaagctccagaatgtacgcctgaacctctccgggcaaaggctcaaacgggcggaaacggagaaggtggagcatgaacagacggtcaatacgctgaaacaccgggccgactttgcccgtgcggtgaacaagtacctctcgatcagggagcgtgaagcagagatccgggagcgggaggagatcatgcggaagatggaggaggagcaccaggaactgttcgcccggcttcgccccctgggaaagaccctccataccctggttgccgcagagaaagagcgagtcagcggtgcacttctggcggggcagagccgggcgaaggaaacccatgctgagaacatgagcctccagcgggacctcggaggtgccagaaagcaggcagagggtatcaggaggcggatcaccgagctcgagcggcagtccgtcgaactggaggcccgggagaaagaactcgtgcagaggcatgaacggtacccgaaagtctcctcctggttctcttgctccgaccaggtcgaggccacggaaaagcggcttgctgccgaaaaagagacttgcaacaggctcgcaagcgagatcagcgagatcgaacggcggctctccacgaaccaggcgcttgagccggagctggaaaagggaatggcggatctggatcgggcaattgaaacccttcagcgggagattgcccattttacggccgaaaaaggttctgcacgacagatcgccgagatctacgagatggacgatattgaggcctgtgccgcacatctcaaagacaggagtgaacagttgcatgggatgctggcaggctacaggagccgtcgtgagggccttgcccgggatctggagagcgcagagaagtacggcgtcaccttgagcggtgagtacctggctgctcttgagagattacaggaaaaatacccgaccgcgataagcggcgccgaacacctgaaggggatctccgatgacgaacggggagagtgcctggccaacgcaccctggctcccgaaggcggttctcctcctcaaaggggatttcgaggcggttgtccgcaacccgatggcccttccggcacaggtccaggacgctgcaatcgttatcaccagtatcgaccatctccgggagagaagggtgctctcacttggagatgtctatatctcctctcgtatgcccgagcagtcgcttgaagcgctcgccagcgaccgtgcagccgagcaccaccggaaagagatccgcgcaatcaacgaggagatgcagaaggctgatgaggcgttagtagcgataacccgcgactccgacgccctcagccgcttcattaaccggtatccaccggaatttgaaccggagagggcggccaatctcggggagcacctacgacagatgggcgggggtacggcaaggcttgcagcactgcgaaaccagcttcaggaggatcgctccgccctcccccgcgcccggaccggcctggcggagcaggaaacgacaataggtctcttcgaggagaaactcgccctgctcaccgatctcgtcaaagtcacggaggagagggagaagactctcagcaacctgcagcaggagcaccggaacgccgaagaaactacggcgctacagcgacagatcgaggcggcgatcagccggtgcgattctgaattcaagagactggaggagatcaacaaccagatgaaggagcgccttcggaaggtagagcaggagatctccgagtacaggccgtacgcaagcgaggatgttccaaccctgccggatgcagatatcgaccgcctcaggagtgaataccgaagtgcccggcaggtggtcgacagggttgtgaaggaccgcgagagttacgaaagagataatgcccgtgacagaaagcagattgaggacgaccagaacgatatcagcagttatcggatctctatcgaggagatcgaagcaggagatccagaggagcgttattcctctgagtatatccaggaggttgaccggagttttgaggatgcggagcgcctcctcaaagaagccgctggtcggtatgaggatgtgcgtggaaaacaccaccttctctccctggagatggaggaggcagagaggaaatttaacgcccatgccccagaagcatatacccgggatccagatctcatcgatccggaaccgttgaaggccgatcaaaagaggttggaggcagaaagcctcaccctcaaggcggaacttgcacaccttgatgctatgcgccgggaaggcgaaaaagtgcttgaaggccttatcaacgaacacaatggctacgaactgcttgacagcactcactatttcatccagaaaggtgccgccccggcatcggagcttagaggctaccgctacttccaggaagaacttgcggctgccgtcgggagcacgacgaagcagaaagagcgtttcggtgccgcaaaggaccaattcttccggaacgtcgatgaaattaacgttcctcactactttatcgagacagtcagggggaagatccgcataggagagagtgtgggcgaggcaacctccatacagcaaagcctggagggatatgctgccacagtcaccggatgggcaaaggcggtgcaggcacaggtggaggggcttcttgaggtcgagacgaagatcatcgatcaggccctggggatggcgataacctaccgggactacctcatgatggtccccagactctcgaagatcgagatcgatggcaatccccgtgagatgctgcagatcaactttgatgattgcacctatcgtgacgaggtggcccggggtgagatgcaccgctatattcaggaccttactgctcatatccaggacggcactctcagccggggggaacttgagaaggcgctcgcaccgggccaactggtgggtagagtgatggatatgggcaggatccgtgtaaaaatacgcaagattgatatcgatacctacccgttccagctctgggagaagatcaaggcatctgaagggcaggagaacacgatgtatatcatccttctggttgtcctcatatcaacaatcagagcgattgtcgtcggcaggcatgatcggaacaccgcgaaagtgctctttgttgacaatccatttggttccaccggatcatactatctctgggagaagatctggtcgatcctcgaccgcaataatgtccagatgatatgttcgggccacaagatcgatgcgaaggtgcgcgagttcttcccgatctcctatctccttacgagtgagatctcggccggcggtcggatgaggatcgtcggtgtcaggtttgttggggccggcaaagatcttgaccgcctagagcggcagaagaggggcgagatccttgcgtggacagaagagtaa

SEQ ID NO: 52773 - DNA, 669 bp, Desulfotomaculum sp. 46_80
atgaatgtggagggattggagttcctcgaaggttttgagaagcggatgcagattatagcagccgtagattctattgtaaaccgcggcaaccggaaaatggacatagagaagctgcttgagccgggacagcttgacaatattatttttgctgtccttgtctttataatggacaggactcttgccgaggacgaggagtgtaccatagaagttataacgtccttcgttgcaaggattattcctgatttcggccttagttttccccgggaaaccacccgcaggattacggactacatcatcaaggatatcctgcaaaacggcggggaagcaagatattacccggtgatgagatatgggaaggggatggccccggtccggatcaggcttatcgacgacaagttgaaggacagcgatcgcggttatgtgatgaactaccagcttacagaccagggatatgacctgctccttagaacaaaagaagtagagcaggagatcagctttactattgaggaactgaagctgcgcgaactgatcaggcgcaaaaactacaagaaagccatcgggcagagcggcaacctggtgctagatgatcaggcagaaaaagaacgatatcagccagttcatgcaaaagataagggaaaatatttacgacgtggacatcaaggagtttga

SEQ ID NO: 52774 - DNA, 1167 bp, Desulfotomaculum sp. 46_80
ttggtccagctttttctccagccggtgataccgtgtatcaagatccagggccgtaatatagcggcgttttttcgcaagaaaaagctgccggcgtacattatgattgagtggaagcttgacggcgccggcgggtaccttcttaccggtatcgggattgtgcctgcggaagcgccggggatggaaaatgagaagaaccggatcaggtattttacctttacctcgaaatataccggcgccaatgcttttgatattgcccacatcgctcttgtggacaaaaacggtggtgttctggatgtgacgccgtttcgggaagccagagaaatgttgtccgaaaaggaaagaaaagatccgtttgttttcagttttttccccgaggacgacggggatcgctacgtcaggcgcctggctgaattcgggattgcccaggataaatggaaaaatgtgattgccaagataaatgacggagaaggcggtttggaggaactcttccagaagtataaaaaccccggccagctgttgaatgactggattattaaaactgccgaaaccgtgagaagtgaaacggaaggggcgctgcaggacatcaaagtacaagagaaaattatgcaggccgcccgcctggttgaagaaatccgccgtaagaggtctgagctttcgggaatagaggagaagctgtcggcttcaaaagaacagtatgataccgatggccggatacgcagcctggaatactccctgaagctgttattagaggaaatcctgcaccatatcatttaccatgtccttggcttcttcccggcatacttctcctttttcaccagttcatcaaccagtttttccgcagctttcctggttaaggctatggctcctcaacctcaatatacccaaatatcctgtaaaaacttacgttgctttttccagtgtctcctcaaagaaattcatcagcagggcgtgttcggattgattaagttcagccaggttggcttggaatctgtccatatagctgacaatctggaacagcagcggaaactggttggctgttttcaacatgctgcccatgacggcgccggcaaaaatgatcagtcctgtttccgccttgatcgtattcatcactacatttttaaccagtccgacacccttttcactgatggtttgcaattgagcgattaa

SEQ ID NO: 52775 - DNA, 324 bp, Desulfotomaculum sp. 46_80
atgcaggataccgggaagaatataatagccggtgtccctgtcgatgctcttctttatggcgaaggcaataagatttccaaacgcggcgcccttgaggaatacaatgccggcatgctgggcggcaaaaaggatcaagcggggcgttttttttatttcggggaccttgatccggagggaatccgtctgtttttccgggccagggaagccaaccccaatcttgatctcaagcctttttccggcttgtaccggctcatgcttaaactggctgaaggcgttgaacttctcaatgaatgtggagggattggagttcctcgaaggttttga

SEQ ID NO: 52776 - DNA, 1341 bp, Streptomyces reticuli
gtggatcaggtggctgagtctgctgcgcttcaggtgcccgggcgggctggtgccgagtatcgggatgtcgggcgctggctggtggagcggctgatcaacaccgagagacacgaccggtgctttcggcacgagatcggcaatgtgacaagcgacggcttcgtcgtccgggagttcccgttccagatcctcaaggacgtgccagacgaagccgggcaggctgcgctgacagttactgatgcggccatcacggtgctcgtccatgcggtcgatgtggacatcgcctccgagcagatcgcggcggaggccaaactggccgcgctgctcaagcgcgcgcggatcggtgaggcgtggcaggccgcccgcaccgcccatgtgcagagcatccggtacgcgaaggaactgctcgaccgcatggaggagatgaaacgcaatgtacgggccatcgactggaaggcggatcttgatggcccgctgaaggaggcacaggagcacgttgaggaaaggtcacgagcggagactcagctgaaggcgcaggtcacacaactgctcgaggtcacggaagaggaacacaagcggcagcagcttgaggcgctggatgcgctgatcgaggattgtctgcagcggcacttgatgctcatcgacatgctgctcagggtggttcctgagttccggcgccagcaggaccggcagatcttcgtacctcccgtggtccatgcacgagtgcatttgcgcggccagctcctggagccggcgcttgagctgagtatcgaggacagcgagcggccgctggaggcttttgtgcgcagggtgttgggtccggtccgtccgcgggtgatgtacctgccggattacttcgaggccctcacacggatgtcggaacaggccgaggttgagctggtcgcggtgggcgcaccggacgactgggaagacacgttcgatccaccgcggttcgacgacgcgcagcatgcatgggtggacaggttgctttcggctgtccccggggagggcgtgcgactgtctcggttgctcgagcgtgcccgccagtggggcgagggcagaggtcctgacgacgacactgaccatctgctggctatggagaccgcgcatcgctttcggcatgtcccggtcgccgagctggcgcgcggtgaggaagccgtcgttgtcgtggatgacgggaccgagttggaagacccggttttcggtggcagcgacttcctgctgttgccagctgtgggtgaaccggtctccgacaacgttgatgcggcccgggacatgcagccgccccattcgccagagcttgttccccttaccacgaacgacgatctggagccgagtgcatga

SEQ ID NO: 52777 - DNA, 4458 bp, Streptomyces reticuli
atgtacgagttgaaccgcatcctgctgcgcaacttcgggccgctagatgcccgctacgaagacgtgaacctggacttctctggcgtgggcccgctcgttgagacagcatccctgatgccgacgcccggacacgtcacgcagcggccctcgccggccagtctggtcatgctccagaacggcggcggcaagggtgtgctgctgaccgggatcatctgcaccacgatcccgctgcgtcaccatgacccggaggagctgcggagcttcgtcgtttctccggctcagccctcccacatcgtgctggagtgggctgatgcccggactggcaagctcttggttaccgcgcagctcctcgcgcccgaaggcgatggcaagctcaagcgccgcttctacagcttccacccgggtgccgctctgtccgcggacaatctacctttccaccgcgacggtcactggctgccgttcgaccactactacaccgagctgtgcgaactacaggacacggtcgaggcgttggaactacagatcgtggacgggcaggagaagtgggagaagcaccaggccggtctgggacttgaacccggcctcttcgatgtccagcgcaagatgaacgccaccgagagcggggcggccgaggcgttaaccacctccagtgcggcagcgttcgtccagtggctgctggagaaggccaacgacgacgacaagtacgccagcctcggtagtgccttcgagacgtatgccggcgcccacgaccagcgcgagagactgctcaaggagcgggagttcgcgctggccatggaggagatctgcggccgggtggccgagcggtaccaggagcacaccgaccagcagcgcgaggctggccaggccaagggcgacctcaccgcccttgccgcagggctgatgcgtcggcatcaaatcctcaccgccgcggcacaggccaccacaggcacggtcaataccgcataccgggcacatgaagcggccaagcaggaactcgacgtcgccaatgcacatgtggcgcatgtccgttgggctgtctgcggtatcgagctgggcgaatcagccgaggaacagaagcgagtcgccgcgacggcgcaacagctggaagaccgccttgcgggctggcgcagtgtcccggtcgccgtgcgtcacgcggctgcccaggagcgccacggccgtatgcagcgagccctctccgaggccgaggaaacagccgccccttatgtgcaggcgtgtgatatcgccgcggcggcactgcgggcaggctacgcggcggccgaaacgcaggcacgcgccgaggccggcaatctggagaaggagatctccgagtctcgcagcaagatccagcagtggcgcgagcgaagcgactctctccatagggatgccggtacggctgagggagaacagcgccagatgcgccgtcaggtgcaggacttcgaggagcagctgcataccgcacgggaagagggacaggtgcagcccggcgaaagcgccgcagacgccgcctcccggatggacggcgaagctgatcaccacggccagctctgtgtagaggccaagaaggcacaggatgaggcccgcagccgccggacgcaggcatatcagcagctgcctgcgctgcaggagcgggctctcgatgaccgccgcgcagcagaagcggccgaagcggagaccgaccggctccgcgtccgcgccgagtccgtgcgccgccaccccgtgactgcggaactgcttgaactcggcctcgaagacctgcaagacggcgatgccctgacctggctcgccgaccactacgctgccctgcagaacttgatcgagcggaagatcaccgctctggacggtgcgctcagacgaacacagctccagcacagcgcggatgaagaactcctcgccgccctggacaccagcgacggcctcctgcccgccaccaaggaggtccgctcgctgtgtgccgacctctgtgcccagggcatcgacgccgtccccggctggcagtggctgcgcgacaacgtcccggcggacgatcaccagcgcctcatcaacgaccacccggacctggtcggcggcatcatcgtaggcggcggccccgcagcgctggatcaggcgcagcgtcatctggagcgcacccgtcccctgcccacggcggccgtcgcggtaggaaccggggagcggatgttgacgccggtgccccacacgagcggccggatggtgcccgagccgaccccggccctgcatgacgaacaggccgcggcactcgaacgagccgaggtcgaagcacgcctggcagcctccgcgcaggcactgggtgagctcgatgaacgcatcagtgtcacccgcgacctgggcaacaagatcacgtactggctggacgagatcggctccgtgagcgtaggggcacggctcgaacagctccaggagctccggacggcagcgcaggcatcccaggccagccttgaggtcgctcgcgccagtgccgaacagaacgacgacgccgtcaccgctgccgaggaggtccacgcacaacaggaaacggctcaccgcgaggccgccgaggccgcgcaggcgatgcgtcgcctcgcggaagccgaggcgaaagccagccaggcacgcgaccggatcaccgcgctcgaggaagaagctcagcagcgtcagcgcgaactcgaagagctgggcgagaaagaggagacggcacacggcgacatcgcacgcatgacccaggcggtggaagccgccgtccagcaggcccagagccatgcccaggcgcgaaagaaggtcaccgccacgcccgaggccgagcaggctcagtacgccaagggagcgccctgcgaagcgctcaccgtcctccagcaccgctacgagcaggcagtcgaggacctgcggagtgtggacatcggagaagaccagcgtcagcgtgccaaggaagcagaagacgccttgcgcgcctgccaggacgagtgggcgcaggtccctgaccaggtcaagcccttcgcccaggagtacagccgttctcccgccgcggcggatgacgtccagcgcgacgccgtacagcgcgatctaggccaacagatcgacgacctccacgaccagctacggcgccttcgggacaaggagagccgtctcaaggaacgacaccacacgctcgcgaccgcggcacaagacatcagcactcaagacgtcgcgcagtggaccccacactccctcgaagaggcttacgacctgaccgcccgtgccgaacacgcccaggcggaggcgcagcaggccgaacgcggtgccggcgaggagtacaacgcggcccgtaggcagcagggccagcacactcgcgaactcgacgccttcggtcgtgtcctggcccgcttggagaccacgatcgaacagctcggcattcaacccgcggcggccccctacgaaggcaccgccgatgcggccgaacccgccgtacgtcaagcaacagcccgctacgatgacgcccggcgcaagctcaccagcaccgagcgccgcgtcgaggacagcgtgtccttgctcaaggaccaggccgccgacgtccgcttcgagcaactcgacatccccttgcgcaaccagatctcggctcttgaccggcggcacatccccgccgccgcccgtgagtggactacggcgctgcaccgcgctgccgcagccctgacgacccaactcgaaggcatgagcaaggcgcgtgaggcccttgtgtcccagctcagcggcttcgtcaccgaacttctccaacaagtggaccaagcaagccggttctccgtcttccccgacggccccacgccctggtcagggcagcgcttcctcaccatccgctacaggaagcccgagccctccgtgctcaccgcccatatgcgcgaaaccatcgacaacctcgccgccaacccgcgcacccgcaaactcaaaggcaccgaggtggtcatgcgctgcctgcacgcagtcgttccccgcttcaccgccgaggtcatgaaacccaacgccacccaacggatcgaacgtgtgcccgtcgagaagatgggcaagatcttctccggtggccaggaactgaccggcgccatcctgctctactgcgctctcgccgcgctgcgcacctcccccggcccccgcagccgtacccgccacggcggactgctcctcctggacaaccccattggccgcgccaacgccccctacctcgtcgacatccagacgcagatggcggcagccctcggcattcagctcatctacaccaccggcctgagcgacgaagccgtcatggcccgcttccccgccaccatccaactgcgcaacgacgccgaagcccgcaccggcctctcccgcatccgcctcgacgaccacgtccgcaacgccctcatccccacccctcggaccacccctgacacccacgagcccgaagcaaacggctacctcagctccgcacgcctgtacaccaagggggaagagaaccgatga

SEQ ID NO: 52778 - DNA, 1065 bp, Streptomyces reticuli
atgaccgcgcccacccccgagcagcttcctcgcctctcaccaggcgccgtccgcctcagcgccgccctgcacgctcgcgccgagaaggccaccgtgccgcgcgccaccgtgatggaagccttcaccgcggccctccccggcaccgcccgtggtgagggctcccgcaccgcactggccaccctgctcgaagaactctccgacgccggcaccctgcgactcccccacggccagagacacaaatgggacgcaggccgtcccgccctgcccgaacagatccggttgcccgcaatcaccccgcgcaagcctgcgcctgtcaccacacggcgctcctaccgccccgaactcgactgggcccacaccgcgtacctcacctccgcccatcacgaagacctggccctcatcaaccgatggttccgcgacaccagcaatcgtcccgaatttcgcgtaccgctccccctgcgcgaacgctcgtacgagatcttccaggacgaaaagcgcctcgatggtctcctctccggtgcgctcttcgcccccggccgccttaccctggaacagctcggcacctttcgcgaaccaccgcccctcgcctaccgactgctcggcgacggagacaccctcctggtcgccgagaacagcgacacctacgccacactccgagacctgctcaccccgaatcccgggcgcaccagagccgtggccttcggctccgggcgagccttcgaagcctccatcgaaactgtcaaagagatccatggaatccagcggatcgtctactacggcgacctcgacgcagaagggctgtcgattcctgcccgcgcctcagtaactgccacccagtgcgggctgccctcggtcgaacccgcctccgcgttgtacgacctcctcctgagccacgcctccaccccgggtcagccggtttccgatgagcgcgcccacacgcttacggcctggctgccgcccagactgcgacagaggactcatgaggtcctgctgtcgggccgccgtattgcacaggaagccaccaaccgtaaccagctggccggcgacgccgcctggtgcccttga

SEQ ID NO: 52779 - DNA, 1503 bp, Streptomyces longwoodensis
atgaaggcgctggcggtggtccgcccgctactggcgctcgacagcagcaaggccaaggccgagcgggggtgggagggctaccgcctggctgagctggcgctggctgcgatcgatgtcgtcacgctacgcacggacatgcgcacggcggtccgccaggagacggtggtggaccatgtgtccgagttcgccgcgctgcagctgccgggacgcccggctgaggagtaccgggccgtcgcgcgctgggtgaccgaacggctgatcaacaccgaggagcgcgaccgggcgttccgtcacgcgatcggcagcgtgacggacgaggggttccagacccgtatgacgtcgttccagatcctcaaggaggtacctgaccatgtggggcaggcggcgctgattgccacggatgcggcgatcaccgtgctggtgcatgcgatcgacgtggacatcgcttccgaacagatcgctgccgaggccaagttggaggcgctcctgaagcgtgcccgtatcggcgaggcgtggcagatcgcgcacacggcccgtctgcagagcatccgttacgccaaggacatccatgggcgtatcgaggcgatgaagcggaacgtgcgggcggtggactgggatacggaggtcaaggagaccgtcgacgatgccctggagcacgtccgcagccgttccgcgactgagcagcagctcaaggagcgagtcgaccagctgctggaggtcactgacgacgcgcacaagcgtcggcagttggaggggctggggacgctgatcgtcgaatgcatgcaacggcattcggtgcttatcgacatgctgttgaaggtcggcccggagtaccggcgccaacaggaccgccaggtgttcgtggcgccgacgctgcacgcccgggtgcacatgcacgagcagctcctgcagccggtgatggaattttccctggatgcctgcctggggcccttggaggcgttcaccagggccgtcctgggcccgcagcagccccgcgtgatgtatctgccggactatttcgaggccctggcccgcgtcagcgaattggccgcgggggacctggtaccggtcgcacacgacgacgacccaggcgacggcgagcacacggccgtgttcagcaacgcgcaacacgaggcggtggacgtcctgctggacacggccaccgaccagggagtgcggctgtccgcactgctgggctccacccgcttgcccggccccggcataggtcctgaatccggcacggacgcactccttgcgatgcgcgtgcagcagctctttcggcaggtgccggtgcgtcaactggccgtcggcgagcctgccgttgtggctgtcgacgacggcaccgagctggtggacgaacgcttcggcggcagcgacttcctgctgatccgcacccaatcgcagccctcggtcccacccagatcatccgatgcccccaccgccgacgacaaccggctgtcgtcggtgactcccatccccgaccgtgaccaggagagcgcgtga

SEQ ID NO: 52780 - DNA, 4461 bp, Streptomyces longwoodensis
atgtatgaactcaaccggattctgctgcgcaatttcggccccgtcgacgcacggtacgaagacgtcaccctggacttctccggcgccggcccggaggtggaaaccgcctcgctgatcccggccgccggccatgtcacccaccgcccggccccggccaacctgatcatgctgcaaaacggcggcggcaagggcgtactgctgaccggcatcacctgcaccaccatcccgcaccgccaccaggatgtggagacgctgcgcaacttcacggtgtccctggcacagccctcccacgtggttctcgaatgggccgacgcgaggaccggacgcctgctgatcaccgcccagatcctggcgccggaccgcgaggggaaactgcaccgccgcttttacagcttccacccggccgccgccctggacgccgaccgtctgcccttccaccgcgacgggcactggctgccgttcgaggactattgcaccgagttgcgggacgtacagcgccgcgtcgacgccctggaactgcgcatcgaggacggccaggaacgatgggagaaacaccagcgcaccctgggcctgcagcccgatctgttcgacgtgcagcgccggatgaacgccaaggagagcgacgcggcggcggcattcaccaccaccacatccgacgcctttgtggactggctgctgcgcaaggccaccgacgacgaccagtacgccgagctgggcaccgccttccactcctacgcccatgcccacgaccagcgcgccgcatgggacaaagaacgacagttcgccctgaccatgcagcgagcctgtggcgaggtcgccatccttcaccagacccggcagaagaccgcccacgccgccgagagcgcgcagcaacggctcgtgcacctgaccgccactgtccagctgcgcgagcagcaactgtccgacgtactcacggtccacgccgacgccatcacggacacctaccgagcgcacgaggaggcaaagcgggcagccgagcgggccgagcagcgcgtgcaccacgtacgccatcacgccagcgccctcgaactggccaccgtccgggcaaagcagcgcggcgccgagcaggccaagaaggagaccgaagccgaaaagtcgggctgggagacggtcccagtggcgctacgccatgcgcatgctgtggacgatcacacccgcgcccaggaagccctcagccaggcagagcgcaccgccgcgccctacctccgggccgtccaccaggcagcagccgacctccgtactgggtacgccagcgccgaggccgccgcccaggacaaggtccgccgactggccgaggccaaccagcagaccgagaccgacatcgagcagtggcagcaccgccgcgaacagctccttgaagacaccggcgcggcccaggccgatctccgcacgctccgcgagcagatcgactccttcaccaccacgctgggtcgggcgcgccatgaccggctcgtcgagccggacgaactagccggggacgccgcggcccgcgccgaggcgcacacccgccacctcgaccagctcatggacgaggccaaacaagcacgtcagactgcccgcaccgggcgggaccatgcgcaccggcacctggccgacacgcagcggcaggcgctgtccgaccgtgccgcggctgatgcggcgctcgcccagaccgaccggctgcgcaagcaggccacagcgatccagtccctgccgctgtgcgccgacctcctcgaagccacgcccgacgagctgcgcgcctccgacgcgttggaatggctccatgaacatgccaccgtgctgggggagaccgccggacgccgcatcgcgaacctggagaccacgctcaccgggacccgcctcggcctgcgcgaggaccaggacctgctcgacgtgctcgatacgagcgggggcctgcacccggccagcgctgccgtgcggcgcctgtgtgaggaccttgtcacgcacggcatctcggcctggcccggctggcggtggatgcacgacaacgtgcccgccgacgcccacccccaggtcatccgcgcgcaccccgacctggtcggcgggatcatcgtgggtggcgccgacggcctggacgccgctcgccgccacatggaacaaacccgccccctcccggccaccgccgtcaccgtgggcaccggcgagcgcctgctgcgcccgggctcctgcgacgacgaccgcttcgtaatcgagccctctcccaccctgcacgacgaagacgccgccgaacgcgaacgaggcgaggtcaccgcgcgcatcacggccgccacccgccaactgcaagacctcaatgcgcgcctggcggaggcccgagagctggagcgccacctcgccaactggctagaagcctgcgcgcagatgcccgtccccgaccgcctcgcccagctgaacgacctgcaaaccaccgccgccgcgtccgagaccgccgcccaggaggcccgcaacgcggccgagggtcacgacgccgccctacacgaggcggagcaggcgtacgaggacctcgtcgaccgggccggtcaagcccagcgcgccctgcacgtcctccggcaactggccgacgccgagaccgaggccggccaggcccgcgaccgcatctccgccctgaccgcgcagtgccaggagtggcggaccgaagccgacgatctgcgtgccgcgtgcaagcgggccgaagcggagctgctgcgccgcgcccaggccatcgaagccgcccggcaggaggccgacagccatgccgagagccgtcgggccgtccccgccccgcccggcggcgacgcggctatcgaacccgacacaccgcacgagcctctccccgtgctcaagcaccgctacgaacaggccctggacgagctgcgcgccgtccaggtcggggaagaccagcagcagcgcgccgcccgcgccgaagaacaccttctgacgtgccagagggaatggaaccaggtgcccgggccgattcaggcgctcgcccagaagttcagcgcggacccgcgggccaccgacgaggtccaacgccacgccatcctgcgcgacgtggccggacagctcaccgacctcgacgaacggctcaacgcactgcgtgacaaggagagcgagctgaagatccgcaccgaccaccttaagtccgccgccgcggcagcaccgctgaccggcgaggaggccgccgcctggacgccggccaccctggaggatgccaccgccctgagtgcccgcgcgggacaggagctggaggaagcccgtaccacggagcgcgccgcgtccgaacgctacaacggcgcccgccgcagccaggccaacagcagccgcgaccttgcggcgttccggtccgtcctgccgcgcctggaaagcgccgctcacggtctcgaccttcccgccgccgcagagccctatccgggcaccgccgaggctgccgagacagaggcccggcaggccgccgaggaataccgcacctgccaccaggctgcccgcgacgccgaccgcgctctggaaaccggcgtcagccgcctcaaagaggaagccgccgacgtccgcttcgaaggactcgacatcccgctgcgcacgcagatctccgccttgggcggcgcgaagatccccgccctggccgagaactggacccaggcgctcggctcccgcatcgccgcactgaccagcgacctggatgccatggccaagacccgcgacgccctcgcctcccagctcggcgcccacgtcaccgatctcctgcaccgcctcgaccaggccagccgcttctccgccttcccagacggcgacgccccgtgggccggacagaaattcctcaccatccgctacaagaaacccgaccagcagaccctcgccgcctcgatgcgcgaaaccgtcgacgccctcgcccaaaacccccgcacccgcaaactcaaaggcatcgacgtcgtcctgcgctgcctcaaggaggccgtaccgcgcggattcaccgccgaggtcatgaagcccaacgccgcccagcggatcacccgcgtgcccgtggagaagatgggcaccaccttctccggcggtcaggaactcaccggcgccatcctcctctactgcgccctggccgcactgcgcacctcgcccggcccccgcagccgcacccgcaacggcgggctcctgctcctggacaaccccatcggccgcgccaacgccacctacctcgtcgacctccagttcgagatggccgccgccctcggcatccagctcatctacaccaccggcctgagcgacgaggaggtcaccgcccgcttcccgatgtgcatcccgctgcgcaacgacgccgaagcccgcgccggcctctccctgatccgcctcgacgagcgcatccgccacgccctcgtcccctcccctcgcatcgtccccgacgacagcgccgccgtcccgtccggctacctccactccgcacgcctgtacacgaaggagacccccgctcaatga

SEQ ID NO: 52781 - DNA, 969 bp, Streptomyces longwoodensis
gtgtcccgcgccaccctcgtcgaagcattcaccgcagccctgcccggcctggccagtggcgagcacgcgcgcaccgcgctcgccacactcctgcacgaactcgccgaccaccgcctcctcaacctgcccaccagcagagcccactgggacgccggccgaccacgcctgcccgaacaagtacgcctgcccgccaccacccaggcgacgccgcgtgcaccgcgtgaacccgtctcgtggcgcccggaactcgactgggcctacaccgcccgtctcaccgccgcacagaccgaggacctcctggcatgcaaccgctggttccgggacagcagcaacgcccccgaacggcatacgccaatcccgctgcgcgagcggtcctacgagatcttccgcgacgagaaacgtctcgacgccctcatctccggcgcgctgttcgcccccgggcgcctcaccctcgatcagctggccacctaccgccagccgcccccgctcgcccaccaccaagtcggcgacggcgacacccttctagtggtggagaacagcgacacctacgccacactccacgacctgctctccaagcagcccggccgcacccggttcgtcgccttcggagccggacgttccttcgaagcctccgtcagccgcctcacagaactctccggcatccaccgcattctctactacggcgacctcgacgccgacggcctggccatccctgctcgcgcgtccctcaccgccctccagcacggcctgcccccgatcgcaccggcaactgacctctaccgactcctcctcggccacacccccacgccctccgctctcgttgccgacgaccatgccgagacgctcactgcctggctgccgccgcccctgtccacacaggcccacgatctactcactgccggccagcgcctcgcgcaggaagcgaccaaccgcaaccagctctccgtcgactccagttggcgcacttga

SEQ ID NO: 52782 - DNA, 1545 bp, Desulfosporosinus sp. BRH_c37
ttgggggaggaattaagtgggtttgcgggacggattcaaaatgtggccctatttcagccactctttgatttgcagagaagccgcaagtatccagagtacgatgccttggcgataggttttggaatcttgctctttacgcttgaaaatatgctcattggccgagatcattgcgatcaccaggatcttgccagttatgtgcgtttgatgatagcagagagttacaacgtccagctcagtgagaatgaaagctctgagatggcctactactttctggatgccttgcgtaacaacggccgcccgtttgatctggaatttaaagacttagaaaccggtggggatgtgcgctgtaagtttgccctgattgaagttgctaattacgaaattcacgggaaaatgcgctttaagctaaccgatgccgggttagatctattgtttaagaccaaagagatttataaggagctgcgtatcagcatttcgcagctttatttgcgtcaacagattgaaaaaggggtctttcacgaagccctgcgcacgatcgatgatctctatgtccaggttcaagatgtgcatggtaaaattgagagaattagaaagctcgtcttgcgtaacgtttctgacgtctcagttggaaactatattgctctgatggaagaggttactgagcaacttcggcgggaaaaagaagtcttctcctccctgcaaaccttactacgagaaacggctgacacttataggtttcgcgaattaaatgttaaagaacgagagagttttaaccaattaattacggtatctacccgtcttgacttagtcgtcaatgaacataaccgcctatttaccagtaaattaagcctcggctccttactggaggaagctatgctagacagcttagctaatacatttcgggtgaaagtaaattttgagcatgaatttgtcgatcaagtcatcacggagaacacaccgttagattccttgcgccaagtacttaatcccttgtttaagtgtaaacgaactccacacttcaatcttctgcgcgttcttgaaccgcaaagccttaaaagtgaggacaccgagcaacaggagatgtttagcggtccgtctgaggaggatttcgtcagggcggctgagcgtgaacgtctcatgaaacaacaacgggacgcacgcaccttaaactatttagcaattattttaggagctcttgagtctcaatctgaacaatccttacaggggattttagccactcttcctacagagacctacgtgcaagtgatctccgaagtggaattttacgcgttcctggtccaacttcaccaaatgggcgagataccgttggtggtggatgaagaaatgcgctctaagattatcgactccgagagcagcaatttgccgtttttactcttgaactatctcgatgaacatcccgaggcaagtcgatacagggcactcaaagtgcaagcaggggatgaagaacttatttttgagaatctcagcagagttacggattatcgtttctctgttcactcggaggggaagggtcacgatgtttga

SEQ ID NO: 52783 - DNA, 735 bp, Desulfosporosinus sp. BRH_c37
atgtttgagtcctataaagccgatacggtcgaaactgctctcaagatctttctggagttagtccgtcttgggcagcttcatcaagaagattatccggaaatggttcaagcgtacaaaaccgaccaagaggtacaggggctgtttacgaatattattgaacctctggccgatgttaaggtcttggagtcactatatgtcctttacctttccccgaatgtggataatcgctgttttggttattccaacgaagaactaagggataaaatgaagctgagtacgaaccgggaactttatttagcctattttgtaatcctttccctgttagccatgttttacggagaagatagcttgagtgaggtaagtcgttcctacgtaactgtgagtgacttagagcagtttgtgagtaataggcttcaggatttaaagactaatccagaacttccggaggttgaaaaagaactggaaatcaatttattaagttcagtagagctctggcaagatatgccggaatatgatcctgacctaaaatcactgcgccgtagtacaaaaaacaggattagctttatcctgaaagtggctaagtttctggaagcggaggggctggcgcatgtcgagcaggacagggagctttatgctacagagaaaactgaacaaatggttcggaaatactattctgatcggggccgtcaggaaaagttgctcaccctactttgtgcgcgaaaggagaccccctaa

SEQ ID NO: 52784 - DNA, 4401 bp, Desulfosporosinus sp. BRH_c37
atgcctcaaatttggcgagcgcgtttaaccaatattgaatatgattccggcaagaaaatctatgcggacgaactatttcgttttaatagccaaaataccctcattaatctagccaatggcggcgggaaaacacttttaatccaactgctgctgcaagtagttttgccgaacgaaatgctcaacaagcgctctttagcagatctgctcagcagtaagaagtatactggtcatattctagtagaatggaagctagataacctagaaccgacctacctcacgaccggcttctgtttcacccggggtaatgacgaaggagatcgcttaaagtactttctctataccctccattaccgagaaccgaacgagctggatatcaagaaccttcctttagttcaggcgaaaactccactggactatacggaattattgacccttttgcgtggggctcgtaatcaagatgctcgagtcaccctctttgaacgggatgacaaacgccgtgcctatcttttccaccttgcaagttataacatctttgaaaaagagtggaaaaacattaaagtaactaataatgtggagggtggagtaggggaattctttgctgtggctaagaccgctaagcagctcttagaaactatccttattcctgctgtagaagaaactatcttcgccggggaacaggatgcaagacgtctgtcccaggcctttgctcaggtaaaccagaacttgatacgtttgccggaattacaaaagaatctgcacgatttccaggtgctgcgctcggaaggagaacgtgttttagaagcggttcggagttttgaggagagtcaaggtaagctaatccgtgagaaaagccggttacgaaagctctataacagtgctgagagtgatatgcgtcaagtcaagcaagatttggccaaggtagaggaacaattggacatatggaaaactcagcgaattgagctgaactaccaagcggaaagcattccttatgtacgcttacagcagcaaaaagagttggccgaacacggtaagctggaagcggaagaaatgcttaaatcagcgacggagcagtacttaaatgcagactttttctggcgtcaaagccgagggtataatgactatttggaacgagcagaactcttaggtgccaatgttgctctgaaaaaaaggcgagaactggctagcctaggacaagaggagcagctcacggaattagatatcgcaagggtatcttttagaacaattctggaacggttctgcatagatctcgaaagagactatactcaaattagtgaagcaaacggaaccatggacaagcgcttaagcgaggtctcgatagagttaactaccttacgtcaaacggataagggattagcaattagggtggcggcgatcgaaaccgctctgcaaaactaccaaacgaagtgggacgatttgtatcaggtctatcaaaacatggcctggttagaagatccggccctggccttacgtgagctgacggtgattctgatggaccttagggaaaaaattaaggcccttgaagaaaggcgtttggtgttagtagaggagcaaaagattcgagtacagcggattccaaatttagctgttcagctcagcgaaaaccaaacgacccttaatacctaccttttagacaagcaacaggctgaggcggctttgctggaactacaggattatttgggccgttattcaattcgctgtgtagccccttatgctgaacaaaacaggatcaaagcggaaattcaagctaaacgaatggaatttcaagataaaattcgtttcgagggtgtaagaatcgaacaacttaaagaccaattaagtctaatccgagaatcgggagcgtatgtaccgaaccgcgaaatcctcaaagttcaaaggctcttggatgagttgcagatcccggctcaactggggagcaagtggttggaagagcaaggggttagggaacacgatcgtctcgcctatttgcgtcataacccgctgcttccctatgctttgatcctggcagagcaagactttaaacgtctgcaaaacagcaaatcattccaaacgggggtccttagttgcccggttcccttgttggtgcgtcgagcagagttggtaccgtctgccgaactcccccccgcaaaactaatgtccgttagcggaggcccagcttatcttctctggcacaaagggtatgactatgccttatccccggagtcgctggaaagcgttgtgactgagttagagactgagctcgagcgggcgactaggaaccttcagtccttagtagcgagcgaagaacagcttcgaaaactcggtgaactggaacattcatttttcagccgatatccttcggattatctcgtcacgctcgaaaaacgactgtcggaagttcagaaacagcgggagttggatttaggcgaaaaagagagattggaacaagagcaatccaaagcagaagctgaattagaagaaatacgaacattaagtgaagcgcgtaaagacgaagaacacctgctccgtaaggatttagaacggttcactgagtggcagaaagaagtattggaatacactcgtaactgcgcagaacttaagggagtacaagaggaacaggctaagaatactctcgacctatctcaaagagtgagtgagcaagaacaactgaatcaaaatcgaatcgctggggcaagcaaacttaaagaagtcgaaggcctaaggactagccggagaaatgagttaagagaggttccgttgcccaatcgacaagacataccccctcgtgaagtctcgtatgaagaagcgaaagggtgttggcaggaaagcgaaaatgcggttgccaaggttcattccgaattaaagtactgtgaggatagcattaagcagaacgagcgcgaaatcgtaggcctagaaaaacggatagaacgggacttgaaattaacgcttgccgaggttgaagacgctaagtataagacctccgaggaagaacttgatcgcttggaggcagatagccaggtttggaaaaaggagattgaatccaatcaaagggcggttcactcaaaagacaaagacgtggtaggccttaagggtcaacttatggagaaagaagctcaaatcaagaagacctatgggaaaaaaccggaaattgcttttagagatttagacctcgcactcgctaaactagaaaaagaaatgctctcactccagcggcaagaacaggagtggaaattgatccaaaaggacacggtagagcaggaacggatcttggtagacggaatgaagagcctggccaccagtcttaagcttttcgaagtccttccgagcgaagaagcgcttcaccaagaggaatggctgacgattcgtgccaagctcgccagcacgatcgataaatcaactcaagagctgagagagttgcaaaagttagtgcagcaactgcgggaggtaggagaaaagtcctttcgggggtatgcggaaatcctgcggcgccaagggaacagtgtggtcgaccgttttgtgagccacttgctggcagatgaagagaggcggttccaatttgaggtgatggaacaagcctttgccaagagctttgaaatgatcgccaaatttgaagagaaagcgtcttttgagcttatcgaggctgagaggaacaaacaagaactcgttgagctgtcgattaatcaagcgcagagaattgctcaggaaatgcagaggatcgacaactacgtgaaagtggactatgctggcaagcgagttaatgccgtccagatcagacttaaagagtgggagactgataaagcccatgcgctgatgaacgcttatattgacgatttgattaaagagttaaagcgcttagcagaacaaggcgagcccgaggataaacaagaaaagtttattgacaaaaaaatgtcctctcgtcagcttctcaatgtcttaaccaatcttgagcaagcgaccatccgtgtccttaaacctgaacaacatcctacgaacccatattttgatccgtgggacgatgtccaaaaatggtctgggggagagcgctatgctggatatatggccatgtttatggcaattctcagctataccaggagcaaactaagtagcctccataatccctataaagttatgttagccgataatcccttcggagccgcctcatctccgcatgtcttaaacctaatttttcaactggcggaaagtaataatatccagatgatatgcctgacagcccttacagaagacacgatttttacgtacttcccagcagtctacagcttgcgtctccgaccgttcatgggcaaggattatatgacttcaaaaatcgagcgcgggttttatcagattgatcctttagaagaggaactgcgtaagaagcggcagatcgaatttgagtgggaatag

SEQ ID NO: 52785 - DNA, 1077 bp, Desulfosporosinus sp. BRH_c37
ttgctccaagaaatcgagaaactgatcaaccaatctaagctcaaaagtctgtcgagttcgaagctggaagatcagatcgagcgattgcttggggaagactatgctcgcttgggagggtatgctaacttcgagagtatactcaaacagttatgtacacggggagtattggagcctatcaaggcgtctggaacgaacggacgcaacccgcttttatataatcggtatcggaaagttatgctgggaatggaacaagaacttcggctcaacctcttaaatttacactccctgattagaagtgaagcatatattaaatcccctcaagcgtatacagaagatcaacgctatattctagccctggatgctttcttgaaagatcctcagcagagggagagtttaggggaatctattgctgttaatgaacgctcatttcagatcttcaacgatgagaaattcctgtttagtgatcgtggacgaatctttttacagaggatcggcaggaccctaacggatctgtcttgttacataacgacagagccctttttctatatcgattaccgctccaagctggtagttgaaaatgacccagtttcgtcttacaccgcgctaatagttgaaaacaaggataccttttatagtatcaaaagagcctggcaggcggggaagcgttcgatcggtggggtaaccttcgatctcttaatttatggagaaggtcgtaaaattgtaggtagctttgcttttgctcaggagataccggacttggtgccgaaaacgttgcgtgtgtattatttcggcgatttagatcccgaggggatagatatcttcggctctttggtagccgccttcccacttgctgccattgagcccttcgtgtattgttatcaagcgttaatccatcgttatggaaggaacgctcccttacggcgtgagaaggaccaaaaattacgggcgttgcatgaagaaaccttcttaacatatttcacgtctgaattgagtcaggaaattcgagaattaattcactccaagaaatatattccgcaagaagggctaagctatgccttctttgttcatgataattga

SEQ ID NO: 52786 - DNA, 1038 bp, Bacillus coahuilensis p1.1.43
atgattttaatgtctcgagaatttgaagaagaaatggacatgagtgttgaacaattgtacacattgcaactcattagagctggtagagttaatcaggcggttggtgtactggacgcattaacattgagaataagacgtttattagcaaaagaaaaggattatagatatgaattagagagaaatccaaaggtgctactcactaatagggaagttaggaaaaaatctaaagaagatgtccggaaccaatcagaggaagcacaggaattatataaaaaaatgttatctactttaaaaatgattgaaagaggtaacgaattatcacgcttggaacacatagagctcgaaaataaaatcttctctacctcgaaattacaccttagtttatcggacgaggtttataaaaatattgctctagaactagatattcgaaaaaacaatccattatcccttgtttatagaaaaacagctaactttcaccaagaaatatgggaaaagcatatttatcaggacggtattccaactgaagagatatatgatttaatattaggtccattattttctccaaaacaggatgtcattcttccgatggaatggatatggcaggaacaggaattggttaatgagcaagaactgatagaaacagactttaaagaagaaaaagaggagatttggaataaatatgtgcatgaagtgaattgggctgtggtagtaacttgttggtatccaatatttaaagagttagctaatgttggtgaatatcatgcaaaggatattagttcttttgatcattggaatcgggatgctattgacttctggccattgtttgcacaatctgaattgactgttggggaaatacaggagaatcgaaagtataatgatgaacggtttacactattacaaacgatgctaaaaatagatgacgatataagcttctttgaagggaaaataatttatgctacgtatgagcctggtgaggaaatcgtgacagaagatattcagatgtcctcctacgtactgcgatataaaaggggattataa

SEQ ID NO: 52787 - DNA, 753 bp, Bacillus coahuilensis p1.1.43
atggccgctgaaaaaataaaaatagcaacagatatttatgctaagttgatgaagcacaaaatggtcgatcggaatgaaagtgtactaagatcttactttgatgatactcaagtccatgacttagttcagcatattgcacgaagtttcggaacgattattttagaaggacatgaaaagctccaattaatatccgatggtaaagagtctatttttgctacatcattcactcacttaaaagaaaaatatagtgatattgaaaataaaaaagagttttacttgttatgtaatattttaatgatctaccttagtgaaatagatggggacttaactgttcgttcccgatatgaactacgtggtttatctttatttagattggaagaacttgtaaccaatgtgtttagctattggaaagaaaagattgcaagcgaagaagattacgagaaaaaatggtctatgaatattagggagcaagtagagttttggttaagtaaagatctgaaagacgatagcaataagttaactccttctatgaaaaataaattcagcattatgaaaaaagcactaaatctgtttgagaatgaacatttattaaatgtcattctagagggagatgaacatattgtttatgcttatcctgaattatttgaacgaattgagggacttttccacaattatgaaaggtatacgatgttacgagatgtaattgtggaagccaaacgaaggaaggaggttgaggttaatggcagcaattaa

SEQ ID NO: 52788 - DNA, 4497 bp, Bacillus coahuilensis p1.1.43
atggcagcaattaataaataccgagtggttggtacacgttacaaacagcaaactagagtttataaagatgaagtctttcattttagttctgatgaaggaccacaaaatgcaattattacagccaaaaacacgtttgggaaaggtgtacttttgcagctattatttcaacctattattcctaaaacaccttggagtcgtgggaaaaataaagttaatcactttttctatgccaataaaggtcaattcaagccttatacattttatagttgcatagatttccatttagatttggacaggcacttgttggtcggagtagctatgacttcacagttgaatgaaaagaatgattgtgagcctttatataccctatttgtaagggagtatggttatagtctatacgatccatttactattgataatatccctctttataacaaagaaaaaggtgcaccaaagccttatggtgaatttttagagtatctgagggaaaataaaaaagaatttcttacatttaacgagagttctaaatcaaagttctatagcactctagatagttacgggatcataaaaaaggattgggaacaattaattgatattaaccaatatgaaggtggagtagcacattacttcgacgacaagaacgctacaaccaatcacggccttttctcaaaaatgattatccctgcaattgaagctagattaaatgaaaaaggtgaagaaagtgaccttattacgctgtttaaaaacatagcttcaattactaagaaccttcctgaattgaaaaagaatgcatatgcatatgctgaaattaaaaatcataatgaagaagtttatttaagtttatccgagttgataaaagaaagagaaaaattcgatatacatatagagaaagggcgttccatattaacagctctttcaaatgaaatatcctcgttagaaaaagagacaaacgaccataaagagcaattagtagagctaaatagggtaaaacaagaactagattggaagcgaagaaacttacaatatgtaattaaacattatgagttaaatgatgctaatgcttccctcctatcttttggacaaaaacaaattgataaagaacaacaaaaagtgactttaacaaaccaaaaagatgaagtggaacttcaactgcagttaaagaaatgggatgaggtcgaacaggaacttcaaaatattcgcaaaaaaataaatgccattgaacaatcgcaagattatcgtgaatctaaagaacagcaaattcaacttgaagttgaaattgaaagtgaatggaatgctctacttactgaaatcaacagaataagtacggaaagtgaagcttacaaaaaccatattcttaaactacgggagtctattaacgagcaagttaaatcttataataagcagcttctaaattatgaagttgacgaaggtattattaaaaaatcaattcaaaagtttgaagcggaactcgagatgcaaaaagaaatatacggtgaacacttcttttatgatatggataagattcactctcaaaaaactaaagagttaaaaaacagtgataataagcatttgaaattaacgaaagaccagaatgaaaaggtagaggaactagcaagtttagatcgtaggcaaaccactttagaggcagaagtaaaatcagatgaaaaagaagtaaatagggtcaagcaacagtgggagcggcaaaaagaaaaagaaatcaaaattatgaacaaggtatggaatgttcttcgtacgaatcctgttgaagtagaagactttcgtaaatggttgataggtcaggctcctgttttaaaaaacagaaaaagcgaatgggaccttactttaaatcagttaaacattcagttatatgaagtagcatttgaagtgaaacaaaatgataagccttatttaattccaagtgaggaagtctataaagtaaaatcattattggtggaaaaaggtgtccctgtgctttacggtgatgagtacattaaacaacaagagcaagcaaaacgggaagaacttaataagaagcatccgcttttaaaatatgggttgttagtgccgaatcaaaacagggcatatgttgatgagattaaaaagttagataaagaatttttccatattcctattcctatcttttgggttaaccaattagacaaaccaagcgatatgcagtttactatattagatcagaaagcggcagaattatctattcacgaggataaattatcagaacgtaaacaagagttgtactctaaaagtgatgaagttaaatcagagattaacaatacgaaggcttatatcgatcaacttacaacagttgttgcagaattagaatcatttgatcatagcaatacatctgttgaattagagaaacaatatcatacgcttcaagaacagttggtcaaaaagataaaagaaaaatctgatataaaaaaacaagtggaaatcgttaataaagaactagaagatatatctgctgaaattgttaccatttcaaatatgatagagagtctgaaagaagaaatagaaaacctgaaaacttggatagaaaataagaacatatacgagagtgaaaagcaaaaacaatttgggctgtcacttaaaattcaaagtatgaatagtaaaataggtactaaacaaaatgagcttagcacacttaatgatgattttgaagattggaaagaattatatcgagattggaggggcagtaagaatagtctagtcaaaaaagttaatgaagttcttcctaaggtatttgttgaagatgtaaaaactgaagccctccaagaaacacaacctaattttactatggacgtagataagctaaaggaatatatgtataaatggaaagctgtacaacaagaaatggaaagtcgtaatacggagttagtgaagttaggagttaacctagaacactttcagaaggcagttcatgatgaagaaaaggaattgtatcgattaaataatgagtggaagaagttcctagtaccccaggaaccactcccagtattaaagaaaaggctggaacaaaagaaggaaagtgtgaatgaaattaaaaatgcccttcttctattaacatcagatataaaacatgctaattcacagaaagaaagaatagaaaaagaattgaatgaaatgaaagcatctatttttagagactgtgggaagcaacctgaaatatggaagcaagatgatttttctaaaatgaaaattgatattcagcattcaattaatgaaaataaaaatgatataaatgatacaaatgctattcttaaagaccttgaaaataaggtaagtaattttagtagtatatttcaaaagttgaatgcaactttgaatatattaaatattagcagtggtttaaaccctactccttatgtgcaggaagttgtcaaaaaggatcctgtcaaaactggtgatgaatggattaaaacattcatgatatcacaaaaaaatgtaactactaaaaagtcagcagtacaatcaatccatcgaaagaagaaagaagtttttgagcgaagtgagtgggttttagaaattaaagatgttgccttaaaagtgtacagtgatatggactttgaagaattacaggaagtaaaggcatctatcgaaggtttggatttattggcaagtaatgaaattgcagaagctgaggaagagagaaacacagcagaagaagccaaaaaagagtgggtagaacacgcttgtaaatatgcacttcaaattgttgaacatttacgaaaaatgattaaagctatgcgtattacaaatagaagcgggttaacatttccacttgtaaaattaaaaagggataatatgcttccaagggaaacagagcaaattaaaggtgctatagatgatttgttcgacaaggttattactgaaatatttgctgattttcaagatgttaacgatattccacagaaagtgctcaaagataaaatcagtatcaagaatattatccttgctgcattcaattatcaatatccaattttatggctgtatcgtttacatgaagaaaatagcttcttatatgagccaccaaaagaagagttctatacagagtgggaaacaattaatgaatcttctaaaacggatccttctggaagtggtggacagttatttagcgccagaaccttaatattaatgatgttgacctcgtttaaacgcacaaatgaagataatagcaattggaagcttttaataacggataacccgttcagtgtagctgttagtgatcatatcgttgatccaattttggctatcgctgaggagttgaagttccaatggattgttgtaaccccacctgagttagtaaaagtggagttattacaaaagtttgatatgtactatcaattaagtgcaaaacctataacttctggatcagaccaagttgtatctgaggtccaatatggttaccggaattacaaaaagtcaaacagtattttaaaagaagacaaagttttattttctgtggagcaagataactag

SEQ ID NO: 52789 - DNA, 1509 bp, Paenibacillus sp. DMB5
atgaactggtctgattttggggaacggaacaagcggcttaatccgctgtggagccttggcgcggggatgaatctcggtgagcttcagccgtataaggaaatgattgcgctgagtgtgctgcttcaggtgtattacctggagctggagtcaaatgagcagcggtccaaggaggatattatcggtctggcatggagctcgctggaacgcttcagaattaccgggctgggaactgccgaatcggtggaacggctggtggacgggctgctctggagcggcaacggcggtgattttgaggcggtatattatgatgatcacacgcggcagatgacgatgcagaaatataaatattttaccgtggatgaggatgccacacgcagcagctgggaagagagcggcacgacggtctaccggctctccgagtatgcgatggagctgatcttcatgagccatgagatcatcgaggagttccagatcagcatcaagctgctggagattcagatgcatatcaaacatggccgggtaacgcgggcgctgcaggatgtgaacgagctgatctcccgggtacgtaaaatgacccagcagcagcaggaataccggaacgcgctgcgccgtaatccgaagcatatgttcagtgaatacggcgtaatgcgccaccagcggctggaggagattcaccagcagtttgacgaggaacgcagacactttgataatattcaccgctcgctggcgcgcctggccaatgatgagaaggatctcattgatttcaacgagctgcggctgctgtctgagcgggtggagctgtcgcggaaagttcatgatgagctggctgaggtggtcctgggcatttttgaggcggaaaccaatctgcgcctgaacttccctgagctgttctggggggcttccggctttaacttccggaccaatgtatgggaggaatgggtcaaaagcgacggactgccggccggtgacagtcttgaactgctggtaggcggattgttcgcaccgcagcaggatttcatatatccgctcgcctgggcatgggaagagcaggaaaccggatttatgcctgaagaatggctggatgagccggaggataccggggaagaaccggaagtatcctatattcccaagacgataccctgggcagaggttgcccggctgtggcttcccgtatttacggggcttgcggcggacggcaggttcacctttgctgcagaagcttttaccgaagaagaaaagcttggctgggcgaataaccagaatgcggtggacttgtgggcacagttttttcatgctgaagtgaaggtacaagagtctggtgcggagagcccggccggaacggacgaatgtcagaggcttattcaatacctgctggacagtcaccctgaactggaggttatgcggggtaaagtattaagaactaaaattaccggtacggggcagcagccggcggtcaagtggccggggctagagatgagtccatacactattattatagaagaaagatga

SEQ ID NO: 52790 - DNA, 759 bp, Paenibacillus sp. DMB5
atgagttatacattggaacaactgcagcaggcgtcacggctgttttttgacctgctgcggcggaaagtcatttcgcttgatgatccggctgcggccgagtgcctgcaggataacggcgcttatgatgctttgcaatatctggctaaagagggtggctgccggatcatgaactccgggcaccgcctgcatctgctggttaatccgctgggatcgggctttgcgactaacttcacgcagctgcgcaataaatattcacggattgagcgcaagacacatttacatattatcaacgtcatcattctagtttttttggcagaaatggatcaggacgagcagcattttaaacccggacaggacagtatgtcttatatccagctggctgatcaggtatccgccgttctgaaggcctggtatgaaatggatgaggaaggcaagttcagcaagcagtggcggctcgatattcaggcgatgtacaaggtatgggccagcctgtatatgcagaccaaaagccaggaggatgccgacacactctccagaggctccggttcacggatcggcttaatccatgaagggatgaagctgctggaggacgagcatctggtattcatttccgagagtgaaaaacggattttcccgcgggaggaattgtacgaacggatgcgctatctgtaccatgatgtagaccgttacaaggaactgaaggcgcttattggcagcacactggcggagaaggagggtgacgcccatgccgcgcattga

SEQ ID NO: 52791 - DNA, 4482 bp, Paenibacillus sp. DMB5
atgccgcgcattgaacggatccggatcgccggacttaaatatgagaaaatgctcaagaaatacgacgatatggtgcttgacctgtgcaacgaggaaggcccggccaatacactgattacccttatgaacggcggcggaaaaggggtgctgctgcagtcgatttttcagctgctgattccaaagacttcgtgggggaaggacaatgagaatcaggttgaagcctttttccataaccataaaaaacagctgaagccttacaccttccacgtcgccattgaatggaagctggattccggcgaccgtaatgaatacattaccaccgggatcgccatgaccgccaatagctcggcagaccagcttgagattaaggtcgattacctgctgtacacgctgacggaatacgatgagcatgctgaccttacgctatccaccttgccgctttacaatgcagatgaaggcggccctgcaagctttgagacgattcagcagttcgtaagggaacggcgcagcgagatcatctactacggcagcagccaatcagagctgaagaaatattacgctttcctggccggacgggatatccacatcggggaatggcgcaatatgaagaagattaacggtgaagagggcgggatcaagggttattttcagaaaaatgatgccttcacgaaccacaatctgttcgaaaagctcattattcctgagatcggctccagcctgaatgacggggcgcgtgaggaggacggatcgcttcagcggatgttcaccgacacagcaacggttgcgcagcggcttccgatgctggagcagcgggagaaggctttcgccgagttcacggcgctggctgcgccgctgcatgagctggtcaagcagggcgctgaagcggagcgaagctttcaggagacagagctgcttggacggcagatttacacggtcatttatgacgagctgagatcagccgaggacaaccggggcagacaggccgacgagctggtccggctgcagtctgagggacggcagctgcgctttgaggcggataatctgagctacctgcgcagcaaagaggagcatgacacgaagcaggaagagttcaaggccatcatcgataatcaggggcgggcgcgctcgcggcttgatgagtcaaaagagcaggaaaaacgtctggaagtagcgcaatatctggctaaacgccaggtgcataagcgggaaatcggccagtggcagaaggaaattgaagccattgaaggctcacttgaaatgaaggaacgccaggaggttatccagaatgccaaggaagagctgcgcctgcagtgggatcaggtcttccggctgtggcagcagcagctttgcggcttcgcaagccgtcagcaggcgctttcggctgaagaagccgggctgcgtaaagagcgggagagctatgttctggagctggggggactggaaagccggattaatgagcttacgggttacatccggcagtatagcgaggaagcgggtgtagttgcctcgcggcatggccaggaagcggccagcgcgcctgggccggcgttgcagcgtacgcttatggctacaactgctatagctgattcgattgctgaacgcagcggccagcgtctgctggctgaagcccgcaagctcagtctgcgcacaaacctggcggagcttcaggctaagcttgccgctgaacagcgccaaacggacgggctgcacaatcagctggaagcgcagatgggccgggaatcgcagctgtggtcccagcttgttgtactgcttgagctgtacgaagagcatcaggtgctgggggcaacagctctgtttgaagcaaaagccttgattcaggagcggttcatccgcaggctggaagatacagagcagcagaccaagcggctgcgcagggagttctatcaccagcagctggacgtagagctgcagcaggaagcttattggctgcctaatgcagatgtgcttacagtcaaggacagactggatgcactcaaaatcagctccatgcccggcagctcttacctgaatgacctgagttatctgcaccgtgaagaagagctcgggcgtcatccgctgctcccttacgggctaattgttactcagcgtgaagcagataaaataccaccggatgcattaaggaatgtcatcctcaaatcggccgtgccggtctttatccgcgaagaaatgggcgtagctgctgcggaaccgttcctgctgctggcgaatcagggaccgcagatggttctgcagccggagcagtttcaggactggaagcgcggtattgcctcccggctgaaagagcgggaagtagagcttcaggacgcggagaattatttgtcgaagctgaagacagcccggcaggagttcgagcggctattccagggtgagcatacggtaagcttaaaagccaagctccgtgagctggagctggtcgtgaatgagctggatacagcggtggccggtctaaagacagagatcagtgagaatgaagaactgcttgcttccattcagaaggagcttaatgaatacgaactggaaaagaccggactggagcaaagagcccaggccttgcagcagtgggaagaacggacccgtaagcaggagcaggattacaaggacaagcagagagcagtagaacgcaggcagacgctgaataaggaaatctccgttaaagaccaggggctagttcagctgaaagcagaaatggacagcaccgtagagcagcgggagcaatggattggggatacccgttattcgctgtttccaaggctgcagagctggttcccggagcttgttttccctaatgaccgcaaggctgaaacggactgggctgaggctgagcttaaccccgatgcacagaataaaatgctgcagctgctaagtacagtggagagccttcagcaatccctgacccacaatgagctggaaatccgtacgcggcaggggaacatcaagcgtgcaggcgaacagcttagtgagcttgaagctgctgtctatcaggtggaccgcgactggcaacaagcacctgagccgcaggattcaccagaagcaatagctgcagcgcgtgcgcggcaaaagaatgagacggtttatctggaggaggattaccagagcgtccgcgaatcctacatccgctgccagacgatccttgagaacctgcagaaggaactgcgcaaaacggaaaagacgattaaagagaagcatgaacggcccgttgaaatatggactgacacgctctctgtcaaggagcaggagattacggaggatacccgtgagaatgaacggcagttaaatttatgcaaacaacggctctctgctgtggatcaatggctgcagactctgggcaatcagagacagattctggacacgcatgttgagggccgagttcagctccgtgatgtaccggaggaagtacagcttcaggtgagggaaagctgtgaacgtacggtcgctgactggctgcttcagagtaaagagagccgtgcacagcggacagagcttacccgtaaagtgaaggaagagaaaaatgacttgagtgccaagctggccaagtgcggctggaacagtgagctggagaccaaaatccaggagcggctgaacacagtccactgggaggacttctatattgccgggcaggtgctggattcgatgctgcagagctcacgcgaccagattgagagcatccgcagcgataaagagagcatggagctctcgcgcaagctgtgggtcggacgcgcggccaagcgggtcgtacagattacagatatcctgaagcgcatggagcggcggatgattattcacaacgagaacggccacgcttttccgctggtgcggctgaattataagcatatcaccgtgcccaagacaaccgatgacatcgagccgctggtcagcgactatttcaaccgctgcatcagcagccttctggagaaatatccgaagatcgagcaggttccggcggctgcggttaaggagctgatcaatgacggaaaactcgtctacgcagccatgcagaaccgcttccctgtgcttcaggtatacaagccggttacagagaattacttcctgtatgcggcaccggaggaattccactactctgattgggaggtcatcaaccgcggtgcacttgacgaagcagtcggcagcggcggccagcgccagtcagtgcagttgctggtggcgatgatgatcatgacccataagcgggtcaaccgtgagaacaagggctggaccgttttcctgtacgacaacccgttcggcgagatggtctccaacaacgtgcttgatcccgtctttgagatttccaaggcgttaaggttccagtggctgatcgtgacaccgccggagctggtgaagaatgatgtcagtgtgcggttcggcgtctactggcagctctattttggcggtgataagggagaaatgctggagtctactttggtaaaaggcggcagaaagatgatcccggcgtcgctattctag

SEQ ID NO: 52792 - DNA, 1632 bp, Clostridium sp. C105KSO13
atgcagtatgaatttttaaaacattttcccaaaagaatgaaaaatgtggggctatatgcggttctgattcaaaacagtgtacagaagactacctggaagcagtacggattttcaacctcggatgagcagctcaatctcatatttgcagtgatgctgtatattatggagcagtctctgaaggaagagaattgtacaatggacgatattggcgcctacatagatacgattaatgtgcagtactggcataaagatatgaattatgaggactgcaggcagctgggggactttattgtcaatgtcattctttccaatgacggaagggtcatgcattttgacggatttaattttgaacaggatgcatatcaaatcatgcatatcagttacgtggcgaacaagattgtttatgtagaacaagaagtaaaacgcacgtcttattatctgaccgatgacgggtacaatcttctcctcggaacattggagattgagaataatatgaaactgaccatccacgagatgatctttcaaatgcaccttgaaaagcagagctatgataaagcagtggatgagattaaaaatgtttttaatctgctgcggattcagctgcagaagattcaggaggccatgggaaagatacggcgcaatgctctggattactcagtgcgagattatgaggaagttctgacagagaatttggaaactatcggagacacacagcagaagtttcagaattatcgggaaatggtaagaagccgggcgagggagctggaggaagaaaacatcaatgtaaaacggctcagtgagaaagatgaagagaagctgaatcaccttcgtataattgaaagttacctgaatcgtgccatagatgaacaccagaaaatactaaacaatcattttgatttgaaggctttatacacaaaggaactggaaaatctgacacagatgtctctcatcagacgatttcctctgcgcacaaaattgtatgataaaatattggaacatcctaaagctttggaacatctggattacttcttgcgtccactatttaatcaggatgcagagaaggtgtataatttaaataaagcatttcagtaccaaaagccgatgagaaaaagcgaagaggaagatacacaggaagaactggattttgatgcagaggcatggcaggctcagcaggatcagaaacttaaagagaagttaaaacgctacgagaacagccttgggtatttattgaaaagtgcatgtgtaaacggagaaatttcactggaggaaatcggccggcaggtggaaggtattcctggtgataaagataggctgataccgaatgtagaagtgtttaaagaagttatggttgagttgattaagaatcgggagattgatattgaggcattaaagaaagagagaagtgaatatatacaagatactccaggcgaatttcagctcaacgaaatgctgctgaagttgatagaggatgatccgagaaaggagatcactttgtccgacggaaatgctgtacgcaggattgaaacatatcgtatgcctgacggtggcacagttacttttaagaatgttttaaatgaaaatggagataggaagactattcgctgttctaatgtgctgatcagggtactgtag

SEQ ID NO: 52793 - DNA, 717 bp, Clostridium sp. C105KSO13
atggcatatgaaatagaagaaatcaggacgagccaggaaatattttattatcttctggagcaccatgagctgcgggaggaagaggaacaccatctctacaaggcttatacggagcaggaggccattcaaaatctggtgaagtctcagggggaggctgcccagagcgacattgagcggtatggaaatgtagtttatctcattccccatgaagaaaacaatacactgggtttctctaaggctcagctcaaagcagcactttgcaaatcgaatgcgacggacaaagattattacctgtctcagtttgccatactcacgcttcttgtggagttctttgatgggcaggggggcagcagcaaggcccgggagtatattcgcgtgggagaacttcaaaactgcatttccagccggctgaaggaaggcgcagagaatttaggtgaggagggagaggagcgggaagaaatcgccttttccaacatgcttgaagcctatgaggcactgcgctccgacgaaagaggatcccgtgcccgtacaacaaaagaggggtttcttcatcatattttaatttttttacagaagcagggcctgattgaatatgtggaacaggatgaaatgattaagacaacaaagaaattggacaatttcatggactggaacctcctgaatcaaaacaattatcagaggatcatgcaggtattgggggtaaaggataatgagtaa

SEQ ID NO: 52794 - DNA, 4407 bp, Clostridium sp. C105KSO13
atgagtaaaataaacggtgttaggctgattaatatcaattacaataacaatgcaatccgtatcagtgatgagacatttcatttaaacggagagagcactctgctttccctgcgaaatggtggggggaagtctgtgctggttcagatgataacggcacccttcgtccacaaaaggtaccgtgacgcgaaagaccgcccttttgagagttatttcacaacaaataaaccatccttcattctggtggagtgggttctggatcagggagcgggctatgtgcttaccggaatgatggtacggcggagccaggatgcggaagacacaaggggagacaatctggaaatggtgaatattatcagtgaatatcaagagccctgtcttcaggatatacatcatctgccggttgtagaaaagggaaagaaagaaatcatactgaaaaattttgcggcctgccggcagatgtttgagtcttataaaaaagaccgctctatgaactttttttattatgatatgaacaatggggctcaatccaggcagtattttgagaagctgaaagaataccagattaacgacaaagagtgggagaccatcatcaagaaagtgaatctgaaggagtccggtctttcagatttatttgccgactgtaaagatgagcggggactggtagagaaatggtttctggatgcggtggaaagcaagctgaataaagataagaaccggatgaaagaatttcagaagattgtagagaaatacgtcggtcagtataaagacaatcagagcaaaatcaaacgccgggatacgattcgggcatttaaagaagaggcacttcgtattcaggaaaaggctgaactctaccgcgaagctgaccgaaaaaggttgggacaggagaacaggattgcctattttatccgggagctgaacgggcttcgaagcgatacagaagccgcataccaagatgtccgggaacagctgcaagaagtgagccgcaaagtctctcgggtggaatacgagaaactttccagtgaggttcatcatctggaggaagaacagagctttcatgtcagtaatcgggatatgattgagatggagcaggaagagcttgaacgggaggcagcagggatagaaagatatctccatttgctgttgtgtgcaaagcaacaggaactgacgaaagaggaagagagtgaacttctgctggtgcgtcaaaagctggaagtttctcggaagaaagatgaagatctggagccggagagaaaccaattagggtacaggctgaagagttattatgggattgccctggagaaaaataaagagctaagacaggaaaagaagacacatcaccgacagattttggatcacatcagtacagagaaagaaaagattttcaaactggaagaggacattcggcagaaaatggcagctgaaggggccctgcaaagtaaagtggagtcctacggcagccaggaggaacattataatacactttacaaagaagaccttgtacgcaatattttaggcacctacgagccggggactctggagatacgccgtgaagcatatgaaaaggcgctggaggaagagaacagagaaaagctgcggaagaaaaggcaattcgagagttctcaaaatcagcagagagggctggagcgaactcttgcagatctggggagagagcagatagaaaaaaagcttgagaaagagcaggaggagaaactgcaatctaaatataaccgggagctagaaaagcgcagggtgattatgacttacctggagttggacgagaagtcactctatgatacggaaaaaatcatccgcacttctgaaagaaagctgacagaaatagcatctttgcggagaaatctggagaaagaggaggacgtgctgcaaaaggagtatcagagccttactcaaggaaaggttctggaccttccgaaagaatttgaaacagagcttcaaaacatgggaatccacgtgatttatggtatggagtggctgcagaaaaacggatacacagaaaaagagaatcaggaactggtccgcagtcatccgtttctcccttatgctctaattttatcagagcaggagatgaaaaaactgactcaaagcccgggtgctgtttatacttcatttcccattcctattattgtaagggaaaatctggaacagaagcagaataaggatgctgcaggtattcttcattttcccgatgtcagtttctatgtactgttcaatgaaaatctgttgaatgaagaaaagctgcgttccctggtgctggaaaaggaacagcagatccagaggaagaaagaggcaattgcaatccgtcaatcagaatatgaggaatattttgaacgccgggagactattaaaaatcagcaagtcagtctggataagtttatagcaaatgaagaggcgataaaagaactgggcatgcagctggtcaagctggatgaagatgtcagaaaggtgtcttctgatctggcggaactgaaggcagaactggagcatctggagaaggccattcaaaaggcggagcaggatatttttcatcaaaaccggagaatggaagactacaggcagctgtgtgaagcatataaaagctatgaacggaatcgggaatccctggagaaatgccgcagggatattaagcggcagcaggagaatcagaaattagcacaagttcagctggagcggcagcaggagagacaaagagagctggaagcagagcaggatcagctggagagagaaggcagtgctcttggtgagcgctgccagaagtatcagagatacgaagagacagagatacaagaagacctgacccagcaggatgtggcggctgcggaggcacgctatggggctattacgtccagcatgtcccaggaactacaagatctggaggatcaggagcaaagggccgttagaagatttgaagaggcacaggatgaactggagcatctgagagaaaaatatcatcttaagccgggggactgggaagatatccactatgaacggaaagaggaaacccacagggaagttctgctggaagatagaaaaaagaagctggaagtgaagaaaacactttggaatgaagaggacaagcagattgctgttctttctcagcagagggacgacaggctgaaacaaataaagagtgaatgcggagaggaggagcccctgtccagagcagagatacaggatcaggattttgatgccagaaaaaatcagcttcgttatcagaaaacagagattcaaaaacaggaggactgtctgaaatcccatctgcagagctatgatgagaatctgacggcactggcagaatataatgaactgcctcccggggaggaagttgtgtgggagcagaattttgccgagatggacagccgtaacctgcgcaatttcaagggaattttaatccgagattataatcaggatatacgagagagacaggagacaaaagaaagattgattcaggttttaaaccgaattgtgcgtatggagcggtttcaggaagagttttataaaaagccattggagtccatgctggagctcacaggggatgcttgtcaggttctgcgtcagctttctaccaccctacagtcctatgatagcctgatggagaaactggaagtggacatttccctagtggaaaaggaacagaaaaagattgtggagctgatggaggaatatatcagagaggttcatcagaatctgggaaaaatagatcacaactctacaattacaattcgtgaacgccctgtaaagatgctgaaaattcagctccccgagtgggaggaaaatgaaaatctgtatcagatgcgtctgcaggactttatagaggaggttacgaaaaagggaattgagctttttgagaaaaacgaaaatgcccaggaatattttggaacccatattacaaccagaaatctctacgatgcggtaatcggagtgggaactatacagattcggctttataaaatcgaggaacagagagaatttccaattacatgggcagaagtggcgcggaattcagggggcgagggatttttatctgcatttgtcatcttgtccagtctgttgtactatatgagaaaggacgacaccgatattttcgcagacagaaatgagggaaaagttctgctcatggacaatccctttgcccagacaaatgcgtcccatctgctgaaaccgctgatggatatggcagataagaccaatactcagcttatctgcctgacgggtctcggtggagagtctatctacaatcggtttgacaatatttatatactgaatctgatggctgcatccttaagaaacggcatgcagtacctgagagcagatcaccttagaggagatgacccggagactatggtggtttctcagatagaggtgatggaacagcaggagctggtattttag

SEQ ID NO: 52795 - DNA, 999 bp, Clostridium sp. C105KSO13
atgaaacgtatttctctagaaaaactccttttgcatcagcaaaatttgtcttataatgaacagtatagctatattatggagctcataagtacaggaaagatcaaacctttaaaggcggcgggaacgaatggcaagaagccggctctcttccgcgggtattgggttttggaaaagaagaaggattacggggagctggaggatgaactaaagtaccggttattgccggtgatttctgtagattattatttatctcatccggatgtttatgagcgggacaggccctgggtgctgatgctcaatgattatttgaagaattggaaagaaaaactaaaggttcaggaatcggccaacgagagaagctttgaaatttggaggcgggaaaagttcttaacgagggaacagggaagacacattttaaatcggtgcgggctggatttgcaggtccttaatatatatggaactacggaacctctggcttattactcacacaccagaagtactcctcaaaatctactgattctggagaacaaagatactttttacagtatgcggcggcatttactggagggaagtaactctatactggacaccccgataggaaccttaatttatggtgcggggaaaggaattcttcgttccttccgagactttgatctttgtgtggaaccttatatgaaggaaaaccaaaacaaaatttactattttggggatcttgattatgagggcatcggtatttatgaaagcctggcggagatgtttcatgacaggtgggagattattccgtttgtatctgcttacagggcgatgctggaaaaatcagcagcggcgaagaaggaagattcaatgaaacagcttcccgatacgaaagaaaggcagaaccgtaatatacagaacaaattttttccctacttttcaacagaagaggtggagaaaatgaagaaaatcctggagcagggtaagtatattccccaggagattttgaatattacggacttttaa

SEQ ID NO: 52796 - DNA, 1467 bp, Enterobacter aerogenes; identical to SEQ ID NO: 52610

SEQ ID NO: 52797 - DNA, 4437 bp, Enterobacter aerogenes; identical to SEQ ID NO: 52611

SEQ ID NO: 52798 - DNA, 1044 bp, Enterobacter aerogenes; identical to SEQ ID NO: 52612

SEQ ID NO: 52799 - DNA, 1467 bp, Enterobacter aerogenes; identical to SEQ ID NO: 52610

SEQ ID NO: 52800 - DNA, 4437 bp, Enterobacter aerogenes; identical to SEQ ID NO: 52611

SEQ ID NO: 52801 - DNA, 1044 bp, Enterobacter aerogenes; identical to SEQ ID NO: 52612

SEQ ID NO: 52802 - DNA, 1467 bp, Escherichia coli; identical to SEQ ID NO: 51723

SEQ ID NO: 52803 - DNA, 4437 bp, Escherichia coli; identical to SEQ ID NO: 51724

SEQ ID NO: 52804 - DNA, 1044 bp, Escherichia coli
atgatctggctatcccgactggagtcgacagccaataaacatcgtcttgccgctggtaaggccgcgcgtacagtgaaagctaatgcggtgctggatgaggtattacgcgcacacaaccaggaggccttgagccaggaggtgcctgatttgctgagtcaggctgttacacaactgcttgagagggactggcgggctcagcctaagcacaaagcgagttggcagcgctactggcggggtatgagcctgccaagtacttttgtttacgaaggtgccatcgttcctacgaagacaacatcagaaatagcctggcatccctggttggcccgacgtattacaggacaacttacccagccaatcaaggcacgcttacaacagttgaatacatatctttttcgccaaaccgggggcgacaagtcgctattcccgggcttgcttggacatcgtgagcggtctctgcttatatttggtgacgaaaaagctctggactccttgccacctgatggctggaagcatgtcactctgactttggctgatatgggcgcgtttcgacgtgcgccgcctttaccgtatgagtcatctcgttgccatgatcttccggctatcattgttgaaaactccgatgtgtattatcggctatgccaacttaatcgagcacagactcgctggtcactggtcatttatggcgcaggtaacaaagtttccggtcaggcggaatgcgtgtcacaactccttgaggtcgaacaggtagaacaactactttattttggcgatctggatgttgcgggcttaaaaatcgctcatcagttgcgttgtaagttgcttaatgattacggtatcagcttgcatttagatgaatggctttataataaactgatcttaaatggcctgatgacagcggaagggaacgccaacaacgaacggtttgatttcgagttacagtgtggctggatgccaaagtttgttttacgagaaatgaagactcttctggcgatccaccagcgtctaccccaagaaggtgtggcttctttaggtttatttatatag

SEQ ID NO: 52805 - DNA, 1467 bp, Escherichia coli; identical to SEQ ID NO: 51723

SEQ ID NO: 52806 - DNA, 4437 bp, Escherichia coli; identical to SEQ ID NO: 51724

SEQ ID NO: 52807 - DNA, 1044 bp, Escherichia coli; identical to SEQ ID NO: 52804

SEQ ID NO: 52808 - DNA, 1467 bp, Escherichia coli; identical to SEQ ID NO: 51723

SEQ ID NO: 52809 - DNA, 4437 bp, Escherichia coli; identical to SEQ ID NO: 51724

SEQ ID NO: 52810 - DNA, 1044 bp, Escherichia coli; identical to SEQ ID NO: 52804

SEQ ID NO: 52811 - DNA, 1416 bp, Burkholderia ubonensis
ctgctcgacctgtcccggcaacagcgcaatctcctgctacttcgcccggtattccagcttgagcgctataagatgatgctcggggacgaaagcggtttagaccgcagcctcttccagggtgtcgacacgcattaccttgcgttgtcagcactcgatcagatgatggaagccaccacggtctccggtggaagtacttcgacggaaatcctgacgtatcttgccgaagtcgcaatacggatgaaaccgacactctcggcgcctcaggcccggcgcgtagcggaggtcgtcctcgatgcactagacaacaaggccaacaaccatcgcgagttcagcttcgagtattttgatgccccaagcgggagcaccaacagcattcggttccgccttgtacggttcgagcccgacgccgaagatgtataccggtaccgcccaacggcggaaggctatctggtctacctcggaatgttggatctctcgccggaggactcccaggagctgatggaaaagatgctagaccttctggtccagcgcgggcgcttcgatgcagctctggaaatcgcacgccgcgcgcgcaagctatccatcgagtaccgtcaactcattcgtgatcgcctctaccaagcctaccgcgcaccgggaagcgtcaactggagccgcgacatggccaagcggctcgacgaggcgcggacgcacgtttgtcagcgccaagccgaagacgcccgaatggaggaggccgttggcgaggccctgcttggcgccgatgagccgaagacgcgcgagagtctcgtacagctgaaggaaaccatccgtagcgccggcctcatccgactacagcttgtcactgatatcaacgtagcgcccgagcgtttcatcgaggcacagcgcgcggtcttccgtgcacgcaggcccaccggtctcccggaccttgagccgcaactcctgccgcagctcgtcaaccttccgacccaaatcctctcggcagaagcggacgtcttcatcagtgctctatacccgccggtgtggccgagggtgtacgacctgaactcggtattcgccctgctgctagagcaacgtggggaagatgcagaagtcgcgaccgaccctggctcgattgagaagctcgaacccctgcccgaccagttttcgaaggaactcgtacagcgcgccaacgaatggctggcagacaagttctccaccggccaacggctgcgcatcgaccaactgctggatgccgccgaggacgaaggccttgaccggacgacgcggcggtgcctcgttctcatcctgttccgctcgttcgcgcgctctgagagcgagttcaagaacgtgagcgtcgaactcacgggagacacattccatctcgacatcgctcagggcagcgctctcgagttcgttccccagggagagtcagaatga

SEQ ID NO: 52812 - DNA, 4398 bp, Burkholderia ubonensis
atgcagaagatttcccgcatccacctgggcaactgtggctaccgcaccgcatggtacgacggggtaacctttgagctaaccgaccctgacagcggccaacccaccgacacgctcatcaacctggagaacggcggcggcaagaccacgctcatcgggcttgtgttctcgtgcttcgagaccgctcaagagaggtttctcaaacacatccagagcaagcacaacacgttctctcagtacttcactcacgatggcgcgcctggtttcatcatcgttgaatggctcatgccgtccagaatggcaggaggcaagccctaccgtctggtgaccggtcaggcggtcgcggtaaggtcgcacaccgagccaccggaagtcgaccgcatgttcttctcattcgaggagcacgccgacctcggcctggtagacatgccggccccaggtctggcgcagcccacgccgtcctccatgcaggagttttctcgctggctacacgcacagcaaaaaaagtacccgggtgacgttttcatcagccacaaccgccaagcggagtggcagcggcatctgaaagacgagcgtcttattgacctggacatgttgcgcatgcaggtcaatttctcggcacaggaaggcggtttcgacacgggtttcctcgacttcaagacggagggcgagttcctgcgcaaattcctgaatctgaccagcgacaccacgaaggccgacgaggcacgcaagctggtggttgcggtatgcgaaaagcatcgccgcaagcctcagttccaaaagcgtcgtgatgagctaaccaagttcagggcatcactgaacgctttctccgagtctgctcatctgtaccttaagacacttgccgcgcagcgctcgatgctgattcggggcgctcagatagttcaggccttgcaagcccgggccgtctccttgcgccttgaccacgaccgagaagtggagtttgagcagacccagcgacgactggcctcggctgcgctcgcggactcgaagtcgtatacgaaggagcaggcgacggtcacctgggcctggcaccagaagcgcagcgcgcaggcgaaggcgcgcaaggaggcggccgatggccaggtgaagaacttggagcgggacgaacgactcattcgagcggcacggctgcagaaagaaatcgtcggtgtcgacgaagagctcaaggagcttaacgcgctggccgaagccgagcgcgcgaatctcaaaccaacgaaggaccacgtcgagattcagggggcgctgctgcgccgagcactgttcaacgaagagcagcgactgaaggtagcgctccaagtgctcaatgagcgagctaccgtgcgggagggagaacgaacggcccttcgcaagcagcgagctcaagccgaagctgacgagctccgccaagtaggggaacgctcgaagcttcaagcggccgaggagtcctacacacgtcgcaggcaagctcttgaagtggatgggacctttctcggacccgatgagacgactgcagaggcgcttgaacgactggttaccaaagctgcaactgcggtttccgagcgtgacctgcatcgagcatcgcagcaacgctgcgccaaggaggcacgagagcatcgacaggccgccgcagcggagaacgtccgcgcggccgagttcgccgccaaggcacgggtactcggcgagttcattgcacgaggggaagccgagctcgaacgcctggcacagctaccggctcttctgaatgccgtcgaatccgaccgcgtcgacccgttgtccgcggccttgcctgcccgcctgcgcgaggtcgtctctgagtcggcaagacaagtgtctgtgggagacgttcgcttggcggagctgcgcgccaccaagcaggctatcgatgagaccggggttgctggctacagcatcgacgttgcactcgtcgtcgagacacttctacaggcaggagtacgttcggccaaagcctataacgagtacatctcacgtaccctgccggatgcttccaaggcgcgggcactcgtcgccagcgaccccgcccgcttcctcggcgtctccgtggcgtccacggaacttgataaggcccgggccgtctcctgggaggcacggcggcctacgcgtcctgtggtggtaacagcgacaacccttgagcctgcagcgcaactggcggagcgcctggtcgtccctgccgaggacgattcggcctttaacgtcgaggctgccgcgaagctgggctcgaacctcgagatccgcgtctccgatgaaaacgagcgtcggtccgcgtatcgagagcgccacgaccaaacgctgaaggctatccacgaactggatacgtatgcgaaggaattcggcgacggaaaacttggacgggcacgagccgacaaggtggccctcgaagaagacgctgccgcggcgacagcacgcgcggagtccctcgaatcgctctcgcttgagctggacgagaaggctcaagggctggagctgcaagcccaagccgccgattcgagacgccaggctgcacttctatcatccgcagcagtttgcacgttccagaacgaacacgaagccggccatgcggagcgcgtccgccgactggcggacgtagcgcaaggcatcaccgcagcacaggagagcaagtccacagccgatgagggccttgagcgactgcagggtgaacatgaccgcgaccacggtttgcgcgtgagcactgaccatgagctcaaggtcgcgggcgaagagcgtgcgggcattactcactacgacaaggactatccggctcacgaacagctgttgcagaacccgcgaccggtagagacgttacgccgcatctacagcgatgcagaagcggcctatctggccgaagaaagggagcggctggggctgttggcgcacaagctggaagatgctcgaaagcgccgcgaaaacaaggccaaggagttcacccgcgaatacaagggtgttcagatggcggaccttgctcccttcctggacgcgaaccatgaagatgcgttggccaacgtcgagaccgcgctggatgcggccaagccagagcaggtgaacgccgcttcaaatctgcaggtggtgaacggcgagtcaagaaagtggttggactcaaacaagacgagcctcggccccgcggtacctgctcacgaggctttggacctggatgctctggccgctctcatggccgaggccgagaaccgagtgaacgcggcgttggaacggatgcgtgcggccaacgacgccgcgaaccaggccgcggaccgagccaatcgaaagcgcacggccgcggaggccgacgggaaggttgaggcgctgctgcgcagtagcatggggtttgaagataagcccgacccagtactcattgcagcggaaatcggcgcccaagtgggaatggccttagaggtgccggaccccgacagtctggttctcgaggccgacgccagcaaccaagtcaacgcgctgctaaaggactacacggggaagaaccaaggcgtcagcgaactgcagaccaaggcccgcgctgccttcgaccttgtcaaggtggctgcgtcggagcagtcgttccgcgaggtcgaccccgatgttgcgcagcagatggtcgccaacgagttcggtgccgcgtgtacggacgcgaaacggctcctagagcatctggacgaccgcatcgcgacgaccgaggcaacgctgcggtcgatgcaagctgacttcgatgcctgcgtcgaggaggtactcgccgtcgtccgctcggccatcacgacgctgaatcgcgcgacaagcaaggacaagtcagtgccggtgggtgccccatacgtcggtggcaagcaagtcctgaagatgcgggcaaacttcggctcggtgccagtcgagacgcgacgacaaactctcagcacctacctcgacacgttggttgatacaaacgtgttccctccgcgcggtacagacctcatcgccgacgctgtggcacgcgtttatgggcgtccgctaggactgcaagtcctgaagatgtccatagaggagacagagcaatacgtcccggttgagcgggtttcgaactccggtggcgaaggcgtcgtcatggcgatgttcctgtacctggtcatcaaccagttgcgggctgagaaccacgcgcaagtatatcgcattgccggtgggccgctcatcctcgacaacccgttcgcgaaggccaccagccccgccatgtggcgcgcccaacggctgctggccgaggccatgaacgtccaattgatattcgccacggcgcttcaggacttcaacgctctcggcgagttccagcgattcatccgcctgcgccgcgccggacagaacagcaagacaagacgctggcacctcgagttcgcgaacctgaagctcaacaacgtacccgaggagttggcttga

SEQ ID NO: 52813 - DNA, 1035 bp, Burkholderia ubonensis
ttgagcgagttccttgaagcgctgctgtcatcgccgcgcaagcgtgtgccgctcgacgaactgcgccaacactacttctcgctgtacccagatgtccagaacagtccagaccgtggtgtgctgctgctgagggcgctgaaggagttggaagctgacggtgccatctcgctgccggctaccggaagttgggaacaggctggctcgcccgctcttccactttgggtcacgttgaagagctcacctcgctccaaggtttctgtcaaccatgccgacgtgatctgggcgccggagctggggttctggccggagttgaggccatcgcagttatcagcgctacggcccatcaatgacttcctactccgacgccgaggggctttctcctcggttccaatcaaggagcgttctttggaaatcttcggcgacgagaaacggctcgacaacatgtgtgccggagacttcctctttggtgggcggcttccactctccgtcatcggttgcttccgggtgccccagccgctgccgtatcgcaagattgacgcgcctggcaagtccgtactcgttgtcgaaaaccacaacacgtattggagcttcgccgaatggaatgaggccacgggccaatacacggcggtcatctatggcggaggtgaaaacttcaggctcactgggcgagcgttgcgccaagcgatgcaagaaacaggagcttcttcagcggagtacttcggcgacctggacccgaagggcttgtcgattcccttggacttcaaccgttcagtcgagccaggctatccgaccgtttctgcggcgctcccgttataccgctggttgcttgcgaacggggtgcggcgtgaaaagcccgagtgtgcaacctatgcagcaggactggcggctgcttggctcggtgcagagctggccgcaaaattagaagcagtttggtctgcgggcacgtggctgcctcaggaggcgctgggcactgagcaactccatgctggtgccattggcatcatggctgcacccaccagcggcttgggcggctga

SEQ ID NO: 52814 - DNA, 1416 bp, Burkholderia ubonensis; identical to SEQ ID NO: 52811

SEQ ID NO: 52815 - DNA, 4398 bp, Burkholderia ubonensis
atgcagaagatttcccgcatccacctgggcaactgtggctaccgcaccgcatggtacgacggggtaacctttgagctaaccgaccctgacagcggccaacccaccgacacgctcatcaacctggagaacggcggcggcaagaccacgctcatcgggcttgtgttctcgtgcttcgagaccgctcaagagaggtttctcaaacacatccagagcaagcacaacacgttctctcagtacttcactcacgatggcgcgcctggtttcatcatcgttgaatggctcatgccgtccagaatggcaggaggcaagccctaccgtctggtgaccggtcaggcggtcgcggtaaggtcgcacaccgagccaccggaagtcgaccgcatgttcttctcattcgaggagcacgccgacctcggcctggtagacatgccggccccaggtctggcgcagcccacgccgtcctccatgcaggagttttctcgctggctacacgcacagcaaaaaaagtacccgggtgacgttttcatcagccacaaccgccaagcggagtggcagcggcatctgaaagacgagcgtcttattgacctggacatgttgcgcatgcaggtcaatttctcggcacaggaaggcggtttcgacacgggtttcctcgacttcaagacggagggcgagttcctgcgcaaattcctgaatctgaccagcgacaccacgaaggccgacgaggcacgcaagctggtggttgcggtatgcgaaaagcatcgccgcaagcctcagttccaaaagcgtcgtgatgagctaaccaagttcagggcatcactgaacgctttctccgagtctgctcatctgtaccttaagacacttgccgcgcagcgctcgatgctgattcggggcgctcagatagttcaggccttgcaagcccgggccgtctccttgcgccttgaccacgaccgagaagtggagtttgagcagacccagcgacgactggcctcggctgcgctcgcggactcgaagtcgtatacgaaggagcaggcgacggtcacctgggcctggcaccagaagcgcagcgcgcaggcgaaggcgcgcaaggaggcggccgatggccaggtgaagaacttggagcgggacgaacgactcattcgagcggcacggctgcagaaagaaatcgtcggtgtcgacgaagagctcaaggagcttaacgcgctggccgaagccgagcgcgcgaatctcaaaccgacgaaggaccacgtcgagattcagggggcgctgctgcgccgagcactgttcaacgaagagcagcgactgaaggtagcgctccaagtgctcaatgagcgagctaccgtgcgggagggagaacgaacggcccttcgcaagcagcgagctcaagccgaagctgacgagctccgccaagtaggggaacgctcgaagcttcaagcggccgaggagtcctacacacgtcgcaggcaagctcttgaagtggatgggacctttctcggacccgatgagacgactgcagaggcgcttgaacgactggttaccaaagctgcaactgcggtttccgagcgtgacctgcatcgagcatcgcagcaacgctgcgccaaggaggcacgagagcatcgacaggccgccgcagcggagaacgtccgcgcggccgagttcgccgccaaggcacgggtactcggcgagttcattgcacgaggggaagccgagctcgaacgcctggcacagctaccggctcttctgaatgccgtcgaatccgaccgcgtcgacccgttgtccgcggccttgcctgcccgcctgcgcgaggtcgtctctgagtcggcaagacaagtgtctgtgggagacgttcgcttggcggagctgcgcgccaccaagcaggctatcgatgagaccggggttgctggctacagcatcgacgttgcactcgtcgtcgagacacttctacaggcaggagtacgttcggccaaagcctataacgagtacatctcacgtaccctgccggatgcttccaaggcgcgggcactcgtcgccagcgaccccgcccgcttcctcggcgtctccgtggcgtccacggaacttgataaggcccgggccgtctcctgggaggcacggcggcctacgcgtcctgtggtggtaacagcgacaacccttgagcctgcagcgcaactggcggagcgcctggtcgtccctgccgaggacgattcggcctttaacgtcgaggctgccgcgaagctgggctcgaacctcgagatccgcgtctccgatgaaaacgagcgtcggtccgcgtatcgagagcgccacgaccaaacgctgaaggctatccacgaactggatacgtatgcgaaggaattcggcgacggaaaacttggacgggcacgagccgacaaggtggccctcgaagaagacgctgccgcggcgacagcacgcgcggagtccctcgaattgctctcgcttgagctggacgagaaggctcaagggctggagctgcaagcccaagccgccgattcgagacgccaggctgcacttctatcatccgcagcagtttgcacgttccagaacgaacacgaagccggccatgcggagcgcgtccgccgactggcggacgtagcgcaaggcatcaccgcagcacaggagagcaagtccacagccgatgagggccttgagcgactgcagggtgaacatgaccgcgaccacggtttgcgcgtgagcactgaccatgagctcaaggtcgcgggcgaagagcgtgcgggcattactcactacgacaaggactatccggctcacgaacagctgttgcagaacccgcgaccggtagagacgttacgccgcatctacagcgatgcagaagcggcctatctggccgaagaaagggagcggctggggctgttggcgcacaagctggaagatgctcgaaagcgccgcgaaaacaaggccaaggagttcacccgcgaatacaagggtgttcagatggcggaccttgctcccttcctggacgcgaaccatgaagatgcgttggccaacgtcgagaccgcgctggatgcggccaagccagagcaggtgaacgccgcttcaaatctgcaggtggtgaacggcgagtcaagaaagtggttggactcaaacaagacgagcctcggccccgcggtacctgctcacgaggctttggacctggatgctctggccgctctcatggccgaggccgagaaccgagtgaacgcggcgttggaacggatgcgtgcggccaacgacgccgcgaaccaggccgcggaccgagccaatcgaaagcgcacggccgcggaggccgacgggaaggttgaggcgctgctgcgcagtagcatggggtttgaagataagcccgacccagtactcattgcagcggaaatcggcgcccaagtgggaatggccttagaggtgccggaccccgacagtctggttctcgaggccgacgccagcaaccaagtcaacgcgctgctaaaggactacacggggaagaaccaaggcgtcagcgaactgcagaccaaggcccgcgctgccttcgaccttgtcaaggtggctgcgtcggagcagtcgttccgcgaggtcgaccccgatgttgcgcagcagatggtcgccaacgagttcggtgccgcgtgtacggacgcgaaacggctcctagagcatctggacgaccgcatcgcgacgaccgaggcaacgctgcggtcgatgcaagctgacttcgatgcctgcgtcgaggaggtactcgccgtcgtccgctcggccatcacgacgctgaatcgcgcgacaagcaaggacaagtcagtgccggtgggtgccccatacgtcggtggcaagcaagtcctgaagatgcgggcaaacttcggctcggtgccagtcgagacgcgacgacaaactctcagcgcctacctcgacacgttggttgatacaaacgtgttccctccgcgcggtacagacctcatcgccgacgctgtggcacgcgtttatgggcgtccgctaggactgcaagtcctgaagatgtccatagaggagacagagcaatacgtcccggttgagcgggtttcgaactccggtggcgaaggcgtcgtcatggcgatgttcctgtacctggtcatcaaccagttgcgggctgagaaccacgcgcaagtatatcgcattgccggtgggccgctcatcctcgacaacccgttcgcgaaggccaccagccccgccatgtggcgcgcccaacggctgctggccgaggccatgaacgtccaattgatattcgccacggcgcttcaggacttcaacgctctcggcgagttccagcgattcatccgcctgcgccgcgccggacagaacagcaagacaagacgctggcacctcgagttcgcgaacctgaagctcaacaacgtacccgaggagttggcttga

SEQ ID NO: 52816 - DNA, 1035 bp, Burkholderia ubonensis; identical to SEQ ID NO: 52813

SEQ ID NO: 52817 - DNA, 1416 bp, Burkholderia ubonensis; identical to SEQ ID NO: 52811

SEQ ID NO: 52818 - DNA, 4398 bp, Burkholderia ubonensis; identical to SEQ ID NO: 52815

SEQ ID NO: 52819 - DNA, 1035 bp, Burkholderia ubonensis; identical to SEQ ID NO: 52813

SEQ ID NO: 52820 - DNA, 1416 bp, Burkholderia ubonensis; identical to SEQ ID NO: 52811

SEQ ID NO: 52821 - DNA, 4398 bp, Burkholderia ubonensis; identical to SEQ ID NO: 52815

SEQ ID NO: 52822 - DNA, 1035 bp, Burkholderia ubonensis; identical to SEQ ID NO: 52813

SEQ ID NO: 52823 - DNA, 1416 bp, Burkholderia ubonensis; identical to SEQ ID NO: 52811

SEQ ID NO: 52824 - DNA, 4398 bp, Burkholderia ubonensis; identical to SEQ ID NO: 52815

SEQ ID NO: 52825 - DNA, 1035 bp, Burkholderia ubonensis; identical to SEQ ID NO: 52813

SEQ ID NO: 52826 - DNA, 1416 bp, Burkholderia ubonensis; identical to SEQ ID NO: 52811

SEQ ID NO: 52827 - DNA, 4398 bp, Burkholderia ubonensis; identical to SEQ ID NO: 52815

SEQ ID NO: 52828 - DNA, 1035 bp, Burkholderia ubonensis; identical to SEQ ID NO: 52813

SEQ ID NO: 52829 - DNA, 1602 bp, Turicibacter sp. H121
atgcagtacgattttttacgacactttcaaatgcgtatgaaaaaagtgggtgcttatgcggtcttgtttaagaacagtttagccaaaacgacatggaaaagttatgggtatgatgaatcttatgaacaagtcaacctcatgttttcagtcttactttatattatggagtgctcactcaaagaagaggtgtgcacgatggatgacattgcgaatttcattgatcaacttaacatgcaagcttatcagaagtcactgtcctatgaacaagcaaaagagctggctatttttattgttgatgtagccctttgtaatgaaggacgtccgatgtactttgagagttataattacgaagaaagccagtatgagtccatttatatcagtttcgtcggaaacaaagtggtttacatcgatcaagaattgaaacgaacgtcgtattacttaaccgatgaaggttatgaactgatgttatctacccttgaagtcgacagtcatttacaattaacgattcaagagatgatctttaaactgcacttagagaaggcaacgtacgataaagcggtggatgatgtcaaaaatatctttaatttattgcgcattcaatttcaaaaaattgagggagccatgcgaaaaatccgtcaaaatgccttgctatattcagtggatgactataaagaagttgttgaacaaaatttaagcattattgaagaaaccaaagagaaatttttaggatatcgcgagaatattaaacgtcgaatgcaagaactagaagaaaaagatattacgattcaaaagcttgcagaagatgaacgtgaaaacttagggcatttaaaaacgattgaaagttatttaaatcaagcccttgatgaacatcagcgaattttaaacttacattttgatttgaaaagtttgtataccaaagaacttgaaggtttgacgcaaatggggatgattcaacgatttaacttacgcactgaactttatgaagaagtcttaaaacaaccacataccttggattttatggattatttcttacgtccgttatttatgaaaccattagaaaagacgtataaccttaataaaagtattgagttacaacgcccgatttcaaaaaagaaaaaagaagaagagttttttaccacaattgaggaagaatcaatggaaacctttatccttgaacaaaagcagcaacgacttcagcgttatcgggatagtctaacccttttactgtcatttgtttttaaaacgggaagtattgaactaaatgagatccagcgacaactgaatgacgctcaattacaacagcttattccaaccgttgaaatttttaaagaaattatgattgaattattgcaagcgaaagaactcgatatccaacgcttaaaacaagaacgttccgaaaatattagtgaacaaacctttgaatttcagctgagcacttgtttgcttgatgtactggaagcacaatttccattaaaacgaattgaaacgctgacggtcactcgaacagaaacaaaaaaagtggtgacatttgagcacgttcaagatgaagaagggcgtaaaaagacgattaaatgttctaacattaaattagaggtgaagtaa

SEQ ID NO: 52830 - DNA, 723 bp, Turicibacter sp. H121
atgagttatcaaatagaagaagtaaaacttagccagcaaatcttttatcacttactttcacagcgtgaattaaatgagcaacaagacaaagctctttattacgcctatactggaaatgaaacggtgatgaatttagtcaaaagccaaggcgaaattgccaattgtgtcattgaacgttatggaagtagcatctacttaattccaaaagaggaaaatgaagttctaggattttcaaaacgtgaactaaaaaaagtcctttgtaaatcatcgggaacagataaagattattatttatctcaatttgtcattttaaccttacttgttgaattttatgatggacaaggacaaagtgcaaaagggcgagactttatgcgtgtgggagagttacaaaatatcattgccgagcgtttaaaagaaggcgcaacctactatgacgaagaacaacaacagcaacttggcattgcctatagtaacatgctagaagcctttgaagcgctacgaagtgatgatcgaggttcaaaacaaaaaacaacaaaagaaggatttttacatggaatctttaagtttttacaagagcaacaactcattgaatacattgaagctgatgaaatgattacaacaacgaaaaagctcgatcaactgatggattttaatttattaaatcaaaacaactatactcgagtattacacgtcctaaaggaggccgaaaatgagtcgaattaa

SEQ ID NO: 52831 - DNA, 4413 bp, Turicibacter sp. H121
atgagtcgaattaatcgtatccgtattgtcaacttaaattacaataataacgccattcgaattgatgatgaatgctttgaactagtcaatgaaaatacgctactttctttacggaatgggggcggtaaatcggtgttaattcaaatgttaaccgctccgtttgttcataaacgttaccgtgatacgagtgatcgtccatttgctagctattttacgacgaatcagccaacgtttattttagtggaatggagtttagatcatgaggctgggtatgtgttaacgggaatgatggttcgtaaaaatcaagagctgaaagaggacgaggatcatcgttttgaccttgaaatgattaactttattcatgaatatacgtcagaaaatgattacgatattcaaaacttcccgctactgattcaagaaagtcagcgtaagacgttaaaagggtttcatgtttgtcgtcaattatttgagcaatgtaaacaagataaacaacttaaatttgattactatgatatgaatcagccggcacgtagccgtgcctacttcaataaattagaagaatttcaaatttattataaagaatgggagtccatcatcaaaaaggtcaatttaaaagagtcgggattatctgaattatttaaggatgcaaaagatgaaaaagggctcacagaaaaatggtttttagaagcgattgaaaataagctcaatcagcagcaagaccgcatgaaaaactttgaaacactaataaaaaaatatatcttacagtatcaggcgaacgaaggaaatttcaaaaaaaaagaaggaattttacgttttcaagaagaaatgcagccgattttagagcttgaaaaacagttacttaagaatgaaactcaagtgcatgagtatgaatatcaattggctaaattatatgccattttagatgtcttacaccaagaaacgacacaggcaaaggagcagcagaaccagcaattagagcagttaactcaacaacaacatcgtctagcttatgaacaacaatcccttgtcatttatgatttaatggatcagataacaaccttacttaaggaaacaggtgagcaagaacatcggttaactcaattagaagagcgtcaacaaataaccgtgagacaacaacgcatctatgaagcagcgaatcgttatcaatcgtataagcaagcgtcagaagatgttcagcgttgtgaatcggaacttgccgttgcgaaaaaaagtcaagaagatttactcccacgtttacaaaatcttggatatagtttaagtttagcgtatgaacagcaagtcgaacgtgaacaagctgacttaactcatgttcgttggcaaataaaagatgtgatgcaacaacaaaaacacattcacaagcaattagagatcaagcaagaggatcgtcagcaattttccactcaaatagggcgacttgagcaagctatttcacaatttgatcaagacgaacaacgcttatcttctaagtatgacgaagctattcaacgaaacttagaaggtttttatgcagcgggattgttaaaggagacaatcgactcgatcaaacatcagcttggagaactcaagaaacaaaaaaaacaagacttagaacaagagcttcacgtaaaagagttgcagcataaggtgaatcgtgattcagaagatgctaaagaagcacttgggtcgttaaaaatgatgatcaacgcctatcaacaagaactacaacaattagaagaggaattgaaagttcgtcatcgtattcgtagttacattgcttggcctgaagaagccgttcttgatacagatggcatgatagaggcgctacaccaaaagcgccaaaccgttgaaggacgtctacgtgagtttgaacgtgaaatggatcgtttacaaaaagaaaaacaacaacttcaatcgggagaagttttgccgattcctgatgatttaaaacaacgtctagcggatgaagggattcaatatatccaaggaatagactggttaaaacgaaatcaacgttcagccgaagaaaatcaactccttatttcgaaaaatccatttttgccctacagtttgattttaaatgctacagagatgaagcgattaaaacgtattgaccttcaaattaaaacgccattccctgtaccgatgattctgagggaacaattagaacaagcaccggccacaacgtatttatctggttattgtcaattagatacccttcatttttatgtttggtttaatgaagaattattagacgagcaccgtttgcaacaattgttactgcttaaagaaaaagaaattgccgagattcaagataagtgtgccacacaacgtcttcatcttgaacgatatgaggagcaaataggtgtcttaaaatatcaaaaactatctgccacaacatatgatcatgctaaaaaacaactctctgattccttaacacaacaagatgaattacaacaacaacttcttcattttcaagcggaaaaagagcgtcttcgtggagaattagacgcgatcttgaaacagttaacgacacgtcaagaacagattcactttactcaattgaaacttcaagattttgaacaatttataattgcttatgagcgttatgttcagtttctgaaggagttattagacgtccgtgagcaattaaatacaacgttaagcgagattgatgaggcgatgcaacagcaagcagaacttcatgaatcatacgatcgattaaaagccagtgagcgtgaaaaacaagcgcgtttatcccagtcacaagcagttcttcaacgctttgagcattatgaagaaggagaagaattacgaaaagatgtggaggatttattagcagagtatgaggccattaaagatcaattagatggggtgctacatcgcagcgaggaagacctcatttcagcgaaaaagcgatttaactttgaagaagagcaacttcatacactcatgcaacgttatggactttcagatgctgattaccaacacataacctatgataaatttgcgcatgaagaggtgttacatgagattgaacgattgacgcatgaacttcgtgaacaagaaaaggtgattaatgagttaaagatttcagttgcaaaatatgaaactgagaagaaaaatgcctatgatttattaaaacgtgatttaggtgaaaccgagattttagataaatctgaagtcgtgaagcgggatttcattatattgctgtcacaaaatcaagcacaaattaaaacggtgaagcaatgtcttcatacgctcgagcaatcattagcgttatacgcccgtgagcaatcgaatttagtcgaatataatcaagagttacctgaaacagacgttgtcattgattcaagctatcgaagctatgatgaaaaagcatggcaaacagagagaggaacattacttcgtgattatagacaacaacaaaaaatggtcgaaacattaaaacattcaattagcgatgagtttaatcgaatgagtcgcctccctctatttgaagaggatttctttaattgtccattacagcgatttgctgtatgcaaacatgtcccgcaatcgtttatcgagcagtacgacacgatgcatcaagtctttaacagcctaatgaaaaagttagatgttgatattgaaatgagtgaaaaagagaaaagcaatgtcattcaattgttacttgattatgtcggagaaattcataaacaactcggtttaattgatcaaaattcaagtattccgattcgtgggaaaaacattaaaatgcttcgcatcaagctacctgattggcaaagtaatgccaatgtttatcacgtgcgaatgaacgactttgtcaactcattaacgcaacattgcttacaactcatgcaaaataatgaaaatatcgaagagtttattggccatcaagtgacaaccaaacaactttatgaccaaattgttggaacgtcaaatgttgagattaaattatataaaattgaagagcaacgtgaatatcaaatcacatgggagcaagtggcgaaaaattcaggaggggaaggattcttatccgccttcgttattttaacaagtttactttctttcatgcgtcgagacgaaacagatatcttctcaagctttgaagaaggaaaagttttactcatggataacccatttgcccagacgaatgcagctcaccttttaaaaccactcattgaactcgcaaagaaaaacaacactcaattaatttgtttatccgggctagggggggactccatctatagtcgatttgaaaacatctattccttaagtctcgttccatcaagtttcaaaaaaggctgtgaatacttaaaaagccaacacatcaaaggcgaagtcgaaccccacctggtgattccctcgcgcgtctacgtggaagatgcagtacaagaagcgttattattttaa

SEQ ID NO: 52832 - DNA, 981 bp, Turicibacter sp. H121
atggacttttttaaacactatcctcgtaaaaagattgacttagcaactattgaggaacattacaagctaggtaactatcaagagttatatcattttatacaagaggcactaaaaacaggagtcatcatcccaatcaaaagtagtgggagtaatgggaaaaaaccagcattgtataaaacttaccgaattcaagtcacgatagaaaatgaagcaactcttcgtgaggagttactctatttaattcatcccaaactaaaaaacgattattacctgactcatttaacgcaatatagcaacgatcgtcaagccatattgaagctcagttctttttttcaaacgaaatcatctgatttagaacatcccactgcaatcaatgaacgcagttttcagatttggcaacaagagaagtttctcttagaagaaggaaacagacttttaaaaaatgttggcctatcaatgactgatttaaatatttatgaaacagcagaacccctggcgtattttagtgcttgtaaagagacgcctcaaaatattttaattattgaaaacaaagatacgttttatagtttgcgtaaatatttaattgaggggcataaagagattcttgggtgtcgaatcagtaccttaatttatggaggcggtaaaaagggcgttaaaggatttcaacattttcacacgagcgttgaaccgtatttattgcaccaagacaatcgattttactattttggagatttagattatgaaggaatcattatctatgaaagtttatgcgcccatttttactgtgagccattggtgtcagcatatgaggcgatgcttcaaaaagcagccaatcttccattaccaaagacgaaagaaaaacaaaaccgtcacgaacaaggcgttttctttagctattttaatgaggtgtcagccatgaaagccattttagagaatgagtattatattccacaagaaatattgacgatggaagatttttag

SEQ ID NO: 52833 - DNA, 1509 bp, Paenibacillus jilunlii
atgaactggagtgattttggagaacggaataaacggctgaaccccttatggactctgggggcaggcatgaatctcggcgagctgcagccctataaggaaatgattgcgctcagcgtgctgcttcaggtctattatctggagctggaatccaatgagcagagggccagggaggatattgtggagctggcctggagttcattggaacggttcaatatcacgaagctgggcaccgccgaatccgtggagcggctggtggacggtctgctgtggagcggaagcggcggggatttcgaagcctactattatgatgatctgtcccggcagatggccgtgcagaaatacaaatattttacggtggacgaggatgctacccgcaccagctgggaggaaagcggcagaaccgtctacaggttgtctgaatatgccatggagctgatcttcatgagccatgagattattgaagaatttcagatcagcatcaagctgctggaaattcagatgcacatcaagcatggacgggtcacacgtgcgatgcaggatgtgggcgaactgatctcacgggtgcggaagatgacacagcagcagcaggaataccgcaatgcgctgcgccgcaatcccaagcatatgttcagtgaatacggtgtgctgcggcatcggcggctggaggaaattcacctgcagtttgacgaagagcgcaggcatttcgataacattcaccgttcgctggcccggcttgccaatgatgagaaggatgttatcgacttcaatgagctgcgccagctcgcggagagagtggagctgtccagacgggtgcatgatgagctggctgaggtggtgctgagcatctttgaggcggagacgaatctgcggctgaatttcccggagctattctggggagccgggggctttaatttccgcacccatatctgggaggaatgggtgaagtccgaagggctgccggatgcggacagcctggagctgctgatcggcgggctgttcacgcccggccaggattttatctatccgctggcctgggcatgggaggagcaggaggccggctttttgcccgaagatgttttggacgagccggacgaaggcggggaagaagagagcagcgcctataccccgaagtctattccctggccgcaagtttccgagctttggcttcctgtttttaaaggactggcggaaataggaagctttaccttcgccgcggaagcatttacggaagaggaacagcgcaaatggtcgggcactccggatgcggttgatctgtgggcgcagtttttccacacggaaataactgtgcaggcgcaggacgcggacagccaaggcggggcggcagatgaatgccagaaattaatccagcagctgctggcggcaaatccggtgctggaggttctgcgcggcaaggtgctgcgtacaaccattcagggcagccatcgctctagcgtcacctggcccggtctggaaatgagtccttataccataactatcatagagaggtga

SEQ ID NO: 52834 - DNA, 759 bp, Paenibacillus jilunlii
atgaactattcgctagaacaattacagcaggcttcgcggctgttttttgacctgctacgccggaaggtgatttcgctggatgatcccgcagccgctgaatgcctacaggacaacggagcttatgacgccctgcagtacatggccaaagaaggaggctgccggataatgaattccggacaccgcctccacctgctggttaatccgctgggctcgggttttgccagcaacttcacgcagctcaggaacaaatattcacggattgagcgcaaaacccatttacatatcattaacattattattctggtgttcctggccgagatggaccaggatgagcaccatttcaagccgggacaggacagcatgtcctatattcaaatctcagatcaggtatcctcattgtttcaggcatgggtcgaaatggacagcgagggcggattcagcaggcagtggcgtctggatatccaggcgatgcataaggtctggacaagcctctacatgcagaccaaaagccaggaggaagccgattctctaagcagaggagctagttcccggatcggattaatacatgagggtatgaagctgctggaggaagagcatctggtctttatctcggagaacgagaagcggattttcccccgcgaagaattatatgaaagaatgcgttatctgtaccatgatgttgaccgttataaggaactgaaggcactgatcgggcgcaccttgacggagaaggagggggaagcccatgccgcgtattga

SEQ ID NO: 52835 - DNA, 4497 bp, Paenibacillus jilunlii
atgccgcgtattgagcggatccggattaccggacttaaatatgaaaagatgctcaaaaagtatgacgatatggttctggacctcagcaatgaggaagggccggccaacacgctgattaccctgatgaacggcggcgggaagggtgtgctgctgcaatcgattttccagctgctgattccgaaagcggcctggggcaaggataatgagaaccaggttgaggctttttttcataatcacaaaaaacagctcaagccctataccttccacgtggccattgaatggcgcctggataataacgaccgcaatgagtacatgaccaccggcatcgcaatgacggcccacagctctgtggaccagctggaaatcaaggtcgattatctgctctatgcgctgctggactatgaggaacatgctgagcttacactttccacattgccgctctatgatatcgatgccgctggtcctgttagtttcgagagcattcaacagttcgtgcgggaccaccggggagaaatggcttcctttggaagccacagctcggatctgaaaaaatactataatttcctggcggaacgggatatccatatcggcgagtggcgcaacatgcggcggattaacggtgaggaaggcgggattaagggctatttccagaaaaatgatgcctttacgaaccaaaatctgttcgaaaagcttattattcccgaaatcggcaccagcctgaacgaaggcctgcctgagcaggaaggctcgcttcagaaaatgttcatggatgcggcgaccgttgcgcagagactgccgatgctggagcagcgcgagaaggcttttgccgaatttaccgtgctggccgcaccgctgcatgagctggtgaagcaggggatggaagcggaactgcgctaccgcgaaacagagctgcttggacggcaaatgtacaccgtgatccatgacgagctgaaaacagccgaagaggggcgccgcaaaaaagcagacgagctggtacagctccatcaggaggcgcggcagctgcgttttgaagcagataacctgaattacctgcgcagcaaagaggaggccgaccggaagcaggaggatttcacaaagataagcgataatcagagccgtgcccgccagcgtctggaagattcgaaagcgaaggaaaaagagctggaggtggcccattatctggcccggcggaagcttcagctccgccagatggagcagtggcagaaggagattgaagccatcgaagggtcgcttgaaatgaaggagcgccaagaggtggtgcaagctgcgaaggaagaattgcgccagcagtggcagcaagtgtccaagctgtggcaggggcagattacggcgttcagccgccgccagcaatccttgagtgccgatgaagctgcccgccgtaaggaacgcgaaagctgtctgctggagctgggcggcctggacagccggattcacgagctgaccgcctccatccgccaatacacggaagcgctcggggcattcgccgcccgccatgggcaggaagccgcccattcaccggctgcatcgcttcagcgggccatcgctgctgccagaggcttcgccgagaatattgttacgctgaatgaacggcgcaaggctgcggacgaagaacgcttcaagctgcatacgaagcatacccaggtcagcgggaagctccttgcccatgagcagcaggagggggagctgcaggaacagctggatatccagctgaaccgggaatcgcagctctggtcacagctggtcgtgctgctggagctgtatgaagagcataaccggctgggcgctacgggtttgttcgaagcgaaggctgctgtgcaggagcgcttcatccgcaggctggacgaagctgaagtgcagaccaaacggctcaggagagattattatcatcaattgctggatgttgagctgcagcatgaagcctactggctgccgaatagcgatctgctgacagtgaaggacaggctcgacgcgctgaagatcagctcgatgctgggcagcgcctttctgaacgatcagccttatctgatccgcgaggaagagctggagcggcatccgctgctgccttacagcctcattgtcaccgaacgcgaggcggccaagctgcagccgggaatgctgaaggacctgctgctcaaatcagcggtgccggtcttcatccgtgagcagatggcgcagcctgcggagcagcctttcctgctgctgggcggacaaggcccgcagatggtgctgcagccggaccgttttctggagtggaagcaggggatctctgcaagactcaaggatcaggaagcggagctgcaggatgcggagggatatctggcgaagctgaaatccgctaggcaggagtatgagcggttgttccagagtgagcattcggttagcctcaagggcaagctgaacgctctgaatggcttgcagaacgagctgcgcataagtctgggcgaactgaacactgaaattagcgaaaatgcagcggcaatgggggagattatgcgggaaatctccgaatgcgaagccggcaaagtggaacacgaggagaaagcagcagcgctgcgcgaatggaatgaacggacccataaacaggagcaggactataaagacaagcaaagggcggttgaccgcagaagcgagctgaacaaagagattacaggcaaggagcagcagctggcacagctgaaagccgagctggacagtacagccctggaacgggaaaaatgggttggagatacccggtattcattgtttccaaggctgcaaacctggttccctgagcttgtcttcccggccggaccacaggcttcctcaaccggacatgcagaggatcagccggagttcccccttgatgcttccattcaggacaaactgcttcagaccctaagtactctggagagcctccagcaatccttgagccggaatgagctggaaatccgtacaagggccgcacagatcaaagcagcggctgaacagctggccgagcttgaagcagccgtccagcagattgaggcggattggcgcaatgtaccggagccaagcgatacgcctgatgcgatcatggcagccagaacgcggcagaagagcgacactggaatgctggacgaggactatcagcttgtccgggattccttcgtccgctgccagactgagcttgacaatctgcacaagcagctggccaaagcggagaaggcgatcaaggaaaagcacgagcgggctgtggagctctggaatgaaccgctggacccgaaagaagaagagatcagggaacggtcccgtgagaatgagtatgcactgaacggctgcaagcagaccctggcttcactggatcagtggcttcagacactcgccagccagagcaaagtcatggaaacccatgtggaagggcggctgcagctgcgtgacatacctgaagaggtgcagctgcgcacaagagaggactgcgagcaggctgtggctgagtggctgctgcgcagcagagagagccgcagtgaacggaatgaaatatcacggaaagtcaaggaagagaagacggcactcagcggcaagcttgccaaaagcggctggaatgccgagcttgcaaccaagattcaggaacggctgaacaccgtgcattgggaggacttctctattgcactgcaagtgctggactcgatgcttcagagctcgcaggatcagattgagagcatccgcagcgataaggaaggcatggagctgtcacggaaaatgtgggttggccgggctgctaagcgggtagtgcagatcgttgatattttgaagcgtatggagcgccggatgattatccacaacgagaacggccatgcgttcccgctggtgcgtttgaattacaaaaacatcaatgtgcccaagacaaccgaagatatcgaaccgctggtgagcgagtacttcaaccgctgcatcagcagcctgctggagaaattcccgaagatcgagcaggtaccggcagcggcggtcaaggatctgatcagtgacggcatgattgtctacgccgccctgcagaaccgttttccggtcttgcaggtctataagccggtgacggagaattatttcctctatgcggctccggaagagtatcactactccgattgggaagtcatcaaccgcggagcattggatgaagcagtcggcagcggcgggcagcgccagtccgtccagctgctggtggcgatgatgatcatgacccataaacgggtcaaccgcgagaataaaggctggacagtctttttatatgacaatccgttcggtgaaatggtttccaataacgtgcttgatccggtatttgagatttccaaggcattacgcttccagtggctgatcgttaccccgccggagctggtgaaaaatgatgtcagcgtccgcttcggcgtctactggcagctttattttggcggtgaaaagggtgacatgctggagtctacgctcattaaaggcggacgtaagctgattccggcctcattgttctga

SEQ ID NO: 52836 - DNA, 1509 bp, Paenibacillus riograndensis
atgaactggagtgattttggagaacggaataaacggctgaaccccttatggactctgggggcaggcatgaatctcggtgaactgcagccctataaggagatggtagcgctcagcgtgctgcttcaggtctattatctggagctggaatccattgagcagaggtccagggaggatattgtggagttggcctggaattcactggaacggttcaatattacgaagctgggcactgccgaatctgtggagcggctggtggatggtctgctgtggagcggaagcggcggggattttgaagcctactattatgatgatctgtcccggcagatggccgtgcagaaatacaaatattttacggtggacgaggatgctacacggaccagctgggaagagagcggcaaaaccgtttaccggctgtcggaatatgccatggagctgatcttcatgagccacgagattattgaagaatttcagatcagcatcaagctgctggaaattcagatgcacatcaagcatgggcgggtcacgcgcgctatgcaggatgtaggcgagctgatctcacgggtgcggaagatgacgcagcagcagcaggagtaccgcaatgcgctgcgccggaatcccaagcatatgttcagtgaatacggtgtgctgcggcatcggcggctggaggaaattcacctgcagtttgacgaagagcgcaggcattttgacaacatccaccgttcgctggcccggctcgccaatgatgagaaggacgttatcgacttcaatgagctgcgccagctctcggagagggtcgagctgtccagacgggtgcatgatgagctggctgaggtggtgctgagcatctttgaagcggagacgaatctgcggctgaatttccctgagctattctggggagccgggggctttaatttccgcacccatatctgggaggaatgggtgaagtccgaagggctgccggatgcggacagcctggaactgctgatcggcgggctgttcacgcccagccaggattttatctacccgctggcctgggcatgggaggagcaggaggccggctttttgcccgaagatgtattagacgagccggacgaagccggtgaagaagagagcatcccttatacacccaagtcgatttcctggccaagcgtttccgggctgtggctgcccgtatttaaaggactggcggagaaaggaagctttaccttcgccgcagaagcatttacggaagaggaacagcgcaaatggtcgggtactccggatgcggttgatctgtgggcgcagtttttccatacggaaattactgtccaactgcaggatgcggacagccaaggcggggcggctgatgagtgccagaaattaatccggcatctgctggcggcaaatccggagctggaggttctccgcggcaaggtgctgcggacaacgattcagggcagccatcgcccaaacgtcacctggcccggtctggaaatgagtccttataccataactatcatagagaggtga

SEQ ID NO: 52837 - DNA, 759 bp, Paenibacillus riograndensis
atgaactattcgctagaacaattacagcaggcttcgcggctgttttttgacctgctgcgccggaaggtgatttcgctggatgatcccgcagccgctgaatgccttcaggacaacggagcttatgacgccctgcagtacatggccaaagaaggaggctgccggattatgaattccggacaccgcctgcacctgctggtcaatccgctgggctcgggttttgccagcaatttcacgcaactcaggaacaaatattcacggattgagcgcaaaacccatttacatatcatcaacattattattctggtgttcctggccgagatggaccaggatgagcatcatttcaagccggggcaggacagcatgtcctatattcaaatctcggatcaggtatcctcattgtttcaagcatggatggaaatggacagcgaaggtggcttcagcaggcagtggcgcctggatatccaggcgatgcacaaggtctggacaagcctctacatgcagaccaaaagccaggaggaagctgattctctcagcagaggagccggttcccggatcggattgattcatgagggcatgaagctgctggaagaggagcatctggtcttcatctcggagaacgagaagcggattttcccgcgtgaagaattatatgaaagaatgcgttatctgtaccatgatgttgaccgttataaggaactgaaggcactgatcgggcgcaccttgacggagaaggagggggaagcccatgccgcgtattga

SEQ ID NO: 52838 - DNA, 4497 bp, Paenibacillus riograndensis
atgccgcgtattgagcgaatccggattaccggactgaaatatgaaaagatgctcaaaaagtatgacgatatggttctggacctcagcaatgaggaggggccggccaacacgctgattaccctgatgaacggcggcggcaagggtgtgctgctgcaatcgattttccagctgttgattccgaaagcagcctggggtaaggataatgagaaccaggttgaggcttttttccataatcacaaaaaacagctcaagccctacaccttccacgtggccattgaatggcgcctggataacagcgaccgcaatgagtacatgaccaccggcatcgcgatgacggcccacagctctgtggaccagctggagattaaggttgattatctgctctatgccctgctcgactatgaagaacatgctgagcttacactttccacattgccgctctatgacatcgatgccggggggcccgtgagtttcgagagcattcaacagttcgtgcgggaccaccggggggaaatggcttcctttggaagccacagctcggacctgaaaaaatactataatttcctggcagaacgggatatccatattggcgagtggcgcaacatgcggcggattaacggcgaagagggcgggattaagggctatttccagaaaaatgatgcctttacgaaccaaaatctgttcgaaaagcttattattcccgaaatcggcaccagcttgaacgaaggcctgcctgagcaggaaggctctctccagaaaatgttcatggatgcggcgatcgttgcgcagagactgccgatgcttgaacagcgcgagaaggcttttgctgagtttaccgggctggcagcgccgctgcatgagctggtgaagcaggggacagaagcggacctgcactaccgcgaaacagagctgctgggacggcaaatgtacaccgtgatccatgacgagctgaagacagccgaagaggggcgccgcaaaaaagcggacgagctggtacagctccatcaggaggcgcggcagctgcgttttgaagcggataacctgaattacctgcgcagcaaagcggaggccgaccggaagcaggaggatttccaaaagataagcgataatcaaatccgcgcccgccagcgtctggaagattcgaaagcgaaggaaaaggagctggagaccgcccattatctggcccggcggaagcttcagctccgccagatggagcagtggcagaaggaaattgaagccatcgaagggtcgcttgagatgaaggagcgccaagaggtggttcaagccgcaaaagaagagctgcgccagcaatgggagcaagtgtacaagctgtggcaggggcggatttcggcgttcagccgccgccagcaatccttaagcgcagaggaagctgcccgccgcaaggaacgggaaagctgtctgctggagctgggcggcctggacagccggattcacgagctgaccgcctccatccgccaatatacggaggcgctcggggtgttcgccgcccgccatgggcaggaggccgcccattccccggctgcatcgcttcagcgggccatcgctgcggccaaaggcttcgccgagaatatcgctgcgctgaatgaacggcgtaaggctgcggatgaagaccgcttccggctgcatacgaagcatacccaggtcagcgggaagctccttgcccatgagcagcaggagggggaactgcaggaacagctggatattcagctgaaccgggaatcgcagctctggtcacagctggtcgtgctgctggagctgtatgaagagcataacaggctgggcgcgacaggcttgttcgaagcgaaggctgttgtgcaggagcgcttcatccgcaggctggacgaagccgaggcgcagaccaaacggctacgaagagattattatcatcaattgctggatgttgagctgcagcatgaagcctactggctgccgaacagcgatctgctgacggtgaaggacaggctcgatgcgctgaagatcagctcgatgctgggcagcgccttcctgaacgatcagccttatctgatccgtgaggaagagctggaccggcatccgctgctgccttacggtctcattgttactgaacgagaggctgccaagctgcagccgggaatgctgaaggatatgctgctcaaatcagcagtcccggtcttcatccgcgagcagatggcgcagcctgcggagcagcccttcctgctgctgggcggacaaggcccgcagatggtgctgcagccggaccgttttctggagtggaagcagggaatctctgcaagactcaaggatcaggaagtggagctgcaggatgcggagggatatctggcgaagctgaaatccgcaagacaggagtatgagcggttgttccagggtgagcattcgattagcctcaagggcaagctgaaagctctgaacggcttgcagaatgagctgcgcataagtttgggcgaactgaataccgaaattagcgaaaatgcagctgcaattggtgtgattgtgcgggaaatctccgaatgcgaagccggcaaagaggaacacgaggagaaagcggcagcgctgcgcgaatggaacgaacggacccataaacaggaacaggactataaagacaagcagaaggcagttgaccgcagaagcgagctgaacaaagaaataacaggcaaggaacagcagctggcacagctaaaggccgagctggacagtacgtctctggaacgggaaaagtgggttggagatacccggtattcattgttcccaaggctccaaacctggttccctgagcttgtctacccgtccggactacaggcttccccgaccggacatgcagaggatcagccggagttcccccttgatgcttccattcaggacaaactgcttcagaccctgagtactctggagagccttcagcaatccctgagccgcaatgagctggaaatccgcacaagggccgcacagatcaaagcagcggctgaacagctggctgagcttgaagcagccgttcagcagattgaggcggattggcgcaatgtgccggagccaagcgatacacctgacgcgatcatggcagccagaacgcggcagaagagcgacactggaatgctggacgaggactatcagcttgtccgcgattccttcgtccgctgtcagaccgagctggaccatctgcagaagcagctggccaaagcagagaaggcgatcaaggaaaagcatgagcgggctgtggagctctggaatgaaccgctggacccgaaagaagacgagatcagagaacggtcccgtgagaatgagtatgcactgaacaactgtaagcagaccctggcttcactggatcaatggcttcagacccttgccagccagagcaaagtcatggaaacccatgtggaagggcgtctgcagctgcgtgacattcctgaagaagtacagctgcgcactagagaggactgcgagcaggcggtggctgaatggctgctgcgcagcaaggaaagccgcagtgaacggagcgaaatttcacggaaagtcaaggaagagaaaacctcactcagcggcaagattgccaaaagcggctggaatgccgagctggaaaccaagatccaggaacgtctgaacaccgtgcattgggaagatttctccattgcgctgcaggtgctggactcaatgctccagagctcacaggatcagattgagagcatccgcagtgataaggaaggcatggagctgtcccgcaaaatgtgggttggccgggctgcgaagcgggtagtacagatcgttgacattttgaagcgcatggaacgccggatgatcatccacaacgagaacggccatgcgttcccgctggtgcgtttgaattataaaaacatcaatgtgcccaagacaaccgaagatatcgaaccgctggtgagcgattacttcaaccgctgcatcagcagcctgctggagaaatttccgaagatcgagcaggtaccggcagcggcggtcaaggatctgatcagcgacggcaagattgtctacgccgccctgcagaaccgcttcccggtcttgcaggtctataagccggtgacggagaattatttcctctatgcggctccggaggagtatcactactctgattgggaagtcatcaaccggggagcattggatgaagcggtcggcagcggcgggcagcgccagtcggtccagctgctggtggcgatgatgatcatgacccataaacgggtcaaccgcgagaataaaggctggacggtctttttatatgacaatccgtttggtgaaatggtatctaataacgtgcttgatccggtattcgaaatctccaaggcactgcgcttccagtggctgatcgttactccgccggagctggtgaaaaatgatgtcagcgtccgtttcggcgtctactggcagctttattttggcggtgaaaagggcgacatgctggaatccacgctcataaaaggcggacgcaagctgattccggcctcactgttctga

SEQ ID NO: 52839 - DNA, 1422 bp, Bacillus sp. SDLI1
gtggaaaaagtggatcaatcattaatttcgatctttgctgttacagatgataaacctgagctactacaatcgatgcgtgatattgcccaactttcgggtgtattaacggaattaagtgataaggaatattttcagtcaccaatccacgtacttcgtttcctccgagtgttaaatattattaatctagaagcactcggtatcgcagaaccaattgaaagcgaggaaacgttattttatcgctatcgcaatgtatatggctatgatgaagcaattacgcagggttacatgaaacatcttgtgttcgttttgggaaaattcaattgggtagcaaaaacagcaaaacgaattaaaatgcgtgatgtaggaaaacgaatgatggatgtactaattcgtttagctaatgattctcttgcttattatcttaatgatgatgtggcaaggtctctctttcaagcaaaaagagatgcagaactaagtgaagcatatgatgataaagggatttctggcgggaataagcttgctagtatgattaaaaacgtggaagaagctgtattgcttctctatgagagggagcttgagtatttagcagaccgaaatgcattaacacaagtagaagtgattcatcatctgatgacagagctagaaggtaagatggcagaacgaatggagaaatttgaaacagtagatcaagagcttgtgttttccgatataaaacaacgaggtacggctgcgattagtgatgggacaaaaattagccttgggacaattaataaaattctaaagttcgcccacctacaagaaacggattttaaccatagaatcaagccagaagagtttcgcacgttcatcgtaaaatcgtttgatccgcctcttggttcagaaataccgaatgcacatcaaatactaagcttcatggaacaaggacaatacgaggacgaaaatatagatggtctatgggcgccagtgaaatttgctagcccgctatcaccgagggccattgatgagggaattaactatatcgaaaattatgaacctattacagaagagatagaggaaacagtggaagaagaatttacaggcacagaagaaataatggaaaatcagttggatgaaataatgggtgattcgaaatggcaaatgacgaaacaaatgatacacacagagcggattgaagcatatctggaggaagtagaagaagcgggccttgacgaactaattattcggtctggatcatccaaatggagtgacgtactcaacggattaattggtgtttcagcactagtggctaataaaaaagctgacattgatgaatatgcgaaaaagaaactgcttgataacaaagatcaacgtgattggaggtggagtgaggatgaacaaggaacatatggaattagaaaacgaggaagaaatcacgaacgttaa

SEQ ID NO: 52840 - DNA, 708 bp, Bacillus sp. SDLI1
atgaacaaggaacatatggaattagaaaacgaggaagaaatcacgaacgttaatccgttagcaaccctacaatcgataaaaggatttttaactacagaggaagagcttgcatttatgcaaatcctattctcatcgtctgctacaattcgaagtgggaattttggactttcacgtaaggaagtagaaaaaataattggtattacagatgatgatcaagcatttttttcttttctcaagcgagtaaaccaagctgttagtcgttatatgaaagtgatttatgatgagcggagaaatcaagtggtagtcctcatgcgcgtgcccgcaaaacaagcaaaaacactattaaataaacaaagtctagctattctcatgtttattttttatcaccaggaagtactacagaatgaatatacactcttttcccaattgattaatagttttggtcacgaatcattgcaggtaacacgaaaaattcaagctaacttggatccgctgaaaaagattggggcaattgaagtatatgatacgagctcagaggaagaagcctatcaacttacatctatcggtgctcatttgttttcgaattcctttttacgaagatacaccgagtttagtcaatcgaatcagttgcacatggatgatatcttgcggttctttaaacgctacaacatgaatggaggcacaagtaatgattccatggagacttaa

SEQ ID NO: 52841 - DNA, 1323 bp, Bacillus sp. SDLI1
ttggtttctgtggagttacaagattatttgcaataccatattgtattaaaaaatgagagtttacatgttagggatgcatcggaagagaatggcattattcatatatcagtaattaagcgaacggcgagaacaagaaggattgttgcaaggctaatggttgggattaatacggacttacagggaatagataaaattccaacaaaactaaccaacagttttaaaagtccgaatacgaaaaagcaggttgatctttctgatgaaacctatgaatggattcgttttgggtggataattcgtgaaattcgtttagaaaaagatgagagaacagtaaaaacagaacgataccgaatgggctttatactttatcaactgagcttaaaggcagaactagaatcagaaaaggagagtagaaactggataagtgattggaataagcagtgggaagttgccaggcgtagcaatgtgccaggttttgaacaagaccagcgcgcagatgttgtttccctattagcaaagcacttagatgaaattgcaagtgagacagatagggttttagctggggaggcaaaattaattaagagtattcatccatcttggcgtttaaggaaacaagtagtattcctacattttttgattgctttataccaactgtcatgtacggaaaaacattttgattggaagcaaataggtgccacctactatcggataataggtggatcaaagcagtttgatgcttataaaaaggaatttattgaagaaacagaaaaccttcttcagcgtccaattcaattgttaggtctggcaagtatggggacaattacaccattgttttttactgggccaatgcaaggggactacgtggattatagttatggtactgtccatgcaacgacagatctagctgttttttcggagacgtttaatacgaaagcagacgtgttgtggctggttgaaaatagaggtgtgttaacacgtatggcctacgaggaagaatttttaagaggtacgaaaagctttgtattaggtgtggatggacaagttaggtctgcacatagactactaatttcgcaagtagtaacgtgtgtcagtcaagttattatttggaccgacgttgatgaagcaggttatcagattgccgagaaattatataagttaacacaagatgaacatgtcctaacaaaatggatagtgccaccattaaccgtggtgactgaatgggaaacttttgcaaataaatatcaacaatccatacaaatgaggaaagaagagcaggaacaagaaattggaggagtagagctgtggaaaaagtggatcaatcattaa

SEQ ID NO: 52842 - DNA, 1467 bp, Salmonella enterica
atgtcactagggtttttggagcaggctcgtaatgaatctatggcacgccgcgagctgacgattcaatctcacgcgttgctggtagttcggacgctggattcaatatacagcgccctacagcgcaatccgtttgatggcttcgagcttgatgcactggcggcaattatgtatctctttgacgccatgctttattatgctgaccgcgagcgccagccaggtatgacgcgtaaagaagcggaactatgtctggttgggcacctcaatgaagcctatccgggacaagaagcgtccgactacgcgcaagttgccagcaagatttttgcggcgatcaaagaccctttccgtctcagttattacgacttctcgcaacgaacgcattccgaagagcagatagtccgtctggtacgctatgaccagctatccggctcagatgatattctctggtcgctgaccgatgaaggaatgctgttctataccctccgtttggatgaaacaccgatagaacgcgctgcgattctggcctggcgcacgcttaaaaccatccgtcgcggtgagatcgacaaggcagtacaccagatccaatcaacgcagcggcaactggagcaatatctgattgggatgcggatgaaagtgcgtgctgcccagtctggtgatttgagtgcatcttatgcacacgatatccgtcccgtactcaatgattcctttgataaaacccgagaggttttggaacatatccagaactcaatgtcggccattaccgaaatgttggttgaaggaagttcgaaattaaatcccgacaaattaaataagctacgtagggcacaggagatttttgctgaggtctgcgcttttacgcagcgctatcaagactgcttacttgatgttaacaaagattttgagcgagctcgtctgaaactcattattcccagagataataccctcttccgggaaacactggaaaaaggtgcactcaagcccttgctgtctcattcccccgacactgtcgaaaaggaaatcgatggtctcaccgcacgcctgttggctccccgaagacaggatgatgatcggcacattctgtttgaccttgaggcgctgctgaacctttatctcgatagatttgaacaggcgcttccacatgagatacaggaccccactgatcagcctgtagctattgaaaccaacctgcgaggtattcctgaatctgtcattaaaaaatgcagcgattgggttagtgaccgattgaagaattgggggcatgtgagctttagagatgtttttgacgcctatgaatgcgaagaattatccgaacaagaacaacagatttgtttacttcatattggcagcctggcagctaacagcgatcccgcaatagaagtggagatagacgacgctatcgaaacaacgctctggcgggctaacaatgtcaaactgttaacggtcgctcccttatacccctttgaggagtag

SEQ ID NO: 52843 - DNA, 4437 bp, Salmonella enterica
atgtggctgattaaacgggtttatatggatggcgcaggccatgaagaagctttctacaaggacctcacactggactatattggcctgtctcaagcggtcggtagccctgttgttgaaggcctgcgctcgcccgtcagaaatgcgaaggtggtgaccagtacttatcagcagcttgtaaatgggggcggtaagtcaacctacatcgcgctgctgttatcgatttttgagccgtccgttagtgacttcacccaatatctggcaaatcatcgccagagtgaataccactaccgcaattacttctataaagaactctctgttgttttggttgagatggtcaatgaatcaggacaaacgttattactgggacatgctcatcagcgtaatggagatgatgttgaccgcacactgtttatttgtgatgcgcccgactccctgatgggcgcgccgtttgatgaagtcccttcttattcccgcgcggaacgcaattctgagctgcgcccctatgccaatagcctgcgcagttttgatagctggcttaatctcaaggccggtagtgaaggcggtatgcattggcgtaaaaccaccagacagaacgagtggcgcgcatttttactggaacaacaaattaacgttgatcttatcaaaacaatggtgaccttcaactccgaagaaggtggcctgacccgttttattgaatacaaaactgaacatgatttccttggcgcgttcttcgcctgcaccatgtctaaagatgcggctgagcggctgcgggaactggtagcgcatgaagttgaacgtcagggagagttagaggggatccgtcgtaacgagtccttcctgaaggatgtgctggctaactggctggcatttcttgatccggctaaacagctggaaagcatccaggcgcagcagcaactgctggatgatggcttccgagaagcaatgcgcgatctcgcagcctttgtcggggatgctcaggttgaacagacgcagcttgaagataacatggatagtttgcaaacgcatattggccaggcgatgtctctgcgtgagcagttaggtaagcgcagagcactgcttgaatatgatctcgtgcagcatcagttcgacaaacaaaaagcgatagtcgatgcgcttcaagacgaagccgataccaatcagcgccagattgagattactcacgctgctatagactacaaagcctatgctaaggccctgaatgagtaccgccaggcagatgaagatctgaaggtattccaaagtgaaacggaaaggccgctacaggtgattttcgagcgtactgctggcgaagccttgggcacattagagtgggcaatcgacagacatcgccagcaggaggctacgcttgagaaagaattagggcagatggatagggaaagcaatacccttaaacaatcatacgacgatctacaaaagatgttgggtggcctggaggcggatcgtgagaggtataaaagagacaaacggcagggtgaatcgcaacggaatgaattatgtgaagcagggttgatccaaaagggtgaaacaccggtagcagcccaataccgactggaattaaccttacgcgatgcacagcagagtgaagaattggctaatacaattcttcatcagaaagagcaggcgctggaagcacagctgaatgttgtgcgggaggcatcaattgagaaaagtgaggcccagcaaaaactcattctggctgaacaaaaacaccagtcagctgtggatagtgccttacttttagcaaaaacctatcaaaaactgccaacgtcaacgcaacatgatctagatattgaagacacgagttggcacagcgagctgtgtggattgcagctcgacaaagtattgaatgcgaacgctcaaacgctgaatggaatgaaagagcgtttactgcaagcccggcacgaactggacgagttaaggatgacgggacatgaactggtcgctaagctggtcaatcaggcacttgaagcgttttatgcggcgggcattggacgggataagctctggacatttccacattatttggcctctgtttacaacgatgatgcacaaaagattgcagcggtgatcgatcaaaaccctggccgctacctgagcctggtcgcactcgacaatgtaacgtttgaacaggtccataaaattagtgagatcctgccctggaagaaggcacctattgctatttacttgctggatgaagcacaagatctccgccgagaaacgtctgaattagtacaggtcgtcctctcaaaccccgataagcacggatatagtcaggccgcttacgaagcccggctgcaagacctggagaatatcgtagcgtcgcaggaagtcagtgtgaaggctgcggagagcgcccttaatgtactgaaatctttcaggaatgactggcgtctgcattacgaacagtatggtaagcattgggcgggactgcttgaccaacgggagctggctctcttaatactggaaaatgctgatgcagcacttaagcaagctgagcatgatgagcaaacactgcgtgacgagaagagagatgtccaggtgcggttaaacaacgcccgacagcagaaaattcaggcagaaaaagcgcatgataaactgagtctttttgtagaaacagaatgggcgaagcgtgaaacggcgataatgaaactggagcagttagctgcacagattcaacgaagcaagggcactctttgcacccagagagagaaactggaacgactgagcgagatcgagaagaacaagctctccgagaaaacccttttaaatatccagatgggcaactggagtaatctgtgtaacgagccgttctattcagagattacggcgactgaaggtatggaaggacgaagccccgaagatgcccatgagatggcagctcaggcgcacaaaaaattgctcgaagcagccaacggtgatcaagtgaccgctctcaagcaacaactgaaagatgctgaacaggcacaacgttacgcctctgagcgtttgaccgctcaacccacctacaatacatatccggacgaggtaaaagcggcggccatcaatgaactaacggtaattaataatcgcatcgtacgcctcaacaaacagcagaagcaattcacgcaaaatctaattaattctcaggtaactctgcaaaatttttcccaaagctgtgaggaggctagtaaagcaattgacgaggattttgtctgggaagagaagcccattgagatagagacaatccaaacgtctctggctgaaatcgtcaacagcctccatgaaattgaataccagctaaaacttcaactggagcaaaagaagctgcagttgcaaaagatggaaaatgtgaaagagcggctgcagaacgccaaaacagctcaagcgatgattcagcccattacgccgacctctgcggcgggtctacctggcaggatccagagcatcactgaatatactgacgatctggttacacaatgccaaaagtatgccggtctaaatgaaacgctaaaacagcaaaatatacgcgtctctacggtctggggaaaattccgcaaacggatcgaagaagagttggccaaggatccagatgcccgagccagtcaggaatacttacggcagttggactcaatcgcaacttatcatgaagtgctgggcgatttggacagggtcggtacagggatcacgcaggtattcgaagctgtgcaggacagcctggaacaattccagcgttcgattgatctgactgtcacccatctgactgctcatctggagggggcgattaaacttctcaagcgcgcgatgtcggtcaaaattcctgaggattgccccgtactgcctggtcggcccattatcaaaatgaccgatcggctgaatgatgttgccgctgatctcaggggttttgccagcagccgcctgcagcagtggatagccaagggacagataccccgagcgcccaatcgggacgccttgacagctgatttggttcagtcggtatttggcgaaggggagctggaggtgcgtttgctgaagacgaatgccagccgtccacaatggactcctgtcacccgacttgaaggttcgggtggacagcgccttacatctgcctttttactgtttgtgacggttggtaaagtacgagagtacgatacgggtatttcaagtgcaggattcttgttagccgataacccgctgggtaaatcgaatgccgatgatctaatgcgaattcaaacccaaatggccaaagcctataaaatccagctcatctacctgactggtatttcggatgaaaacgcccaatcaatgtttgataaccatctcttcctgaataaatttcaaaaactgaggcggcgcgatttggtaaccgttgataaagaacgccatgccctgtgggcggcttctctggctgctaagccacagttcgctcccgtcatttaa

SEQ ID NO: 52844 - DNA, 1044 bp, Salmonella enterica
atgatctggctatcccgactggagtcgacagccaataaacatcgtcttgccgctggtaaggccgcccgtacagtgaaagctaatgtggtgctggatgaggtgatacgcgtccacaaccaggaggccttggctcaggatgcacctgatttgctcagtcaggctgttacgcaactgcttctgaaggactggcgggctcagcctaagcgcaaagtgagttggcagcgctattggcggggtatgagcctgccaagtacttttgtttacgaaggtgccatcgttcctacgaagacaatatcagaagtagcctggcatccctggttagcgcaacgtattacaggacaactgacccagccaatcaaggcacgcttacaacagctgaatacatatctttttcgccaaaccgagggcgacaagtcactattcccaggcttgcttgggcatcgtgagcggtctctgcttatatttggtgacgaaaaagcgctggactccttgccgcctgatggctggaagcatgtcattctgactttggctgatatgggcgcgtttcgacgtgcaccgcctttaccgtatgagtcatcatattgccatgatcttccggctatcattgttgaaaactccgatgtgtattatcgactatgccaacttaatcgagttcagactcgctggtcactggtcatttacggcgcaggtaacaaagtatccggccaggcggagtgcgtgtcacaacttcttgaggtcgaaaaggtagaacagctactttattttggcgatctggatgttgcgggcttaaaaatcgcccatcagttgcattgtaagttgcttaacgattacggtatcagcttgcatttagatgaatggctttataatgaactgatatcaaatagcctgatgacagcagaagggaacgccaacaacgaacggtttgatttcgaattacagtgtggctggatgccacagtttgttttacgagaaatgaagactcttctggcgatccatcagcgtctacctcaagaaggcgtggcttctttaggtttagtcatatag

SEQ ID NO: 52845 - DNA, 1491 bp, Halanaerobium sp. T82-1
atggatcgagcaaatactggtttaaatgaacgcctaaaaaagacaaaagcaatagcagaactgggacaggggatggatgcaggtagcttaaacgaatattcccaccagatctctctttatcttctgctaaaagtttttaagcgtgagataaataataacgagcagcggagccgcagtgatttactccagctgacagttgaaattttaaaagaaatgcgtttagaaataaatatggaagaagtcgaaagactggtagatggagttctctactctggggatcccaaacagcagtcatattttcatgtcaaaatttatgatgagactgccggtgactttaaagattttaaataccgctatttaattccggaccgggaggcctcaaactggcaggaaggtgggagcacagtctacaggctctctgagatttcacaggagataatttttattaccagggaaattctgcaggaattcggttttgacttagagcagttctacactctgcagctgattaaaaatggtaattttaaagaagcaaagggcagtgtcagcaacttaattgcccgggtccgtaatctgatcaaaaaggaaaaggactggcgggaggatatactgcgcaacccggggttgattttttctgcctataaagaacggcgccggcggacagaggccgaggtcagagaacagtttaaagaagaaaagaaagttttcagtgatatctttgtctggcgggatagacttgatacttttgaaaatgctgatcagaaagaaggagaactcttatttgaagaactggagcgggcaaggtccctccatgattatctggcagagctcacagtttccaatttatcactggagctgcagctgcggcgggaaaatcccgatattttctggcagacttcgcgcttgagtttcaaaaaagatttctggcagaatacagtacttaaatcaggactaccccaaatcgatgatttagaaaaaatgctgaatccactcttttcaccggagcaggactttatttttcctttagattgggcctggtcagaacagcagctttacagttatctcgaagagagtgaaggcgaaatagcaactctggaaattgagtcagcaccggagcgggaaatagactgggggctggtggttgaactctggcagcatgtttttactgagctttttaaaaaaggagaatttaagctgtcagcattaaataagcttagtccagagcagaaggaaaaatggctcagtcaacagcttaatctggagctgtttatgatgtttattattaccgatatcaaacttaaaattgtggaagagtatccgggcctggatgaacggctgcttttattcaataagttagtaaaagttgagcctgaattagctgaactggaaggcagaaaaatttctgccaggctgacaggcagcagtaaaaaagtaaatttacttgatcagtttatcatctcaccctataaaatttatctggaggaagattaa

SEQ ID NO: 52846 - DNA, 780 bp, Halanaerobium sp. T82-1
atggcctttaaacaggaagaactcgaaaatggagccgccttattttttaaattattagaaaatgagattctttcagtctccgatccactggctgaaaagtacagaactaacagtgaaatacataatatagttaacaccatggcagctgaggcaggtctaagagttttttcaacagctaaaaatgtgcaccttgtctcaaaggccagaggctcaagttttgccaattcctatactcagatgaaagaaaaatattccggcttaaagcggaagcgctacttttatctggccaatatcattatttcagtttttctggctgaaattgataaagaaagtcatgtccggattcgctgggaggaagaagggatttcctatcaccgcctctctgacctggtaactgcaactttagagagctggctggagcgcaaaaaagaagatgaaagctttacccaaaattggtcaattgccgtggaagaggtggctgagctctggctgacagagttcagtgaatacaggttaaataaaaatgagaaggtggatgtaacgagaactaagggtaaccgcctttcttttatcaatacagcgctgaaacctttaagtgaacagggcttgattattgaccagagtgatgagctgaagctgattcccaaggcagagctctatgaacgcttagatgagctctaccacagccagaagcgctacaataaatttatggacttaattttagcaagcagaaaagagatagaggaggaaaatcagcatgcccagactgagcaaaattag

SEQ ID NO: 52847 - DNA, 4485 bp, Halanaerobium sp. T82-1
atgcccagactgagcaaaattaggattacaggtaacaaatatgatggttttcaaaaacagcaccgcaactcaatttttgatctagaatctgaccacagcctttttaccctgcagaacgggagtggtaagggagttatgctgcagctaatctcccaacttttgctccccggaacagcctggggtaagcggaatggcaataagctggaaggaatgttttatgaccgctaccaggtcttccagccttataccttccatgtggtgctggagtggcggcttgacggcagtgaggataaaaaacttttaactggaatctgtgtttccgcccacaaacagcagagcacaactgatgaagaaggaaaagtgggcctaaaatattttctctacacccatgaataccagggcagcagccgcttcagcctgactaatcttcctctctatactaaaagcagtgatcaggtgctgggatatgaacggctggaagaatttattgatcagaatcgggctgattttatcaaatattcaaaaacagcagtttccagcctcaactcagaatactatcagtatttaagcagccatggtatttaccgttctgagtgggagatcatgaaaaatatcaaccgcagtgagggtggcctggagaaatatttttctcaggctaaggataataaagccctttttgatcggctgattattcctgctgtcagtgaaagcatcagctattacaatgaacgggagaaaaattcgctgctcaatatttttgtggataatgtaaagattgcccgcaacctgcctgaactcttatcccggcgtgaggatttaaaaactctctctcagatggttgatcctctcttgagtaatgccgaacagggattgaggcttaaagaaaccagagagatgatcagagagcggggtaataattatctccgcggaattgcagaccgcagaacttttttggaaaatgagctccgccgcagtcagcgggaaaagaaaaaaactgaaagcaggatcagagagcttaattttgaatcagagaacttaaaatatgttaaaaagctgagggctttaaatgagcttaaggcagaacaggaagaggcagaggccgagcagcagaaattaaataagcagcttgaaaagctgagggaagaagaattacagttaaagctgaaccagaaatatctcaaattagaagatctcgaaagtgaggctgagggcaaaagagataagataaattccctgaaagagagatcagaatttaaggagctggaagcagaaatcaggcagctaaaggaggagacagctgcagaaatagatgagctaaattctaaagttaaagagtcagctgccgattattattcctatcagaaatatttagagcagaagctgaaagagctggaggctgaagaaaataagatagaacaaaaaattagagatgagcagcagtttaagttagaatacgaacatcaggagcagaaagttgaagccgaaaaggagaagctggctcacttttttaatccgctggagctggaaacaccaaaatatctgctgcagaatctcgataatgagacagctgagttagattctaaactggaaaaactggaagaaaacttaaaagaacaggaagggcagaaagaaaaactgcagggtcaaagacagcagactgcagttgaggcagcggctcaggagacagtggttgaaaatctgaaggaagagcttaaaaaacagaaagaggctgaggaggagctgttttctcagcttataaaaagcttaaatctggacaggtttgaagaattttacagcaagcagtggctgcagcagcagcaaaatgaacttttaaaactgattaacgaaaaagaggaaagtctgcaggagctgaatgcagatcaatttgagctccagcttgatttaaatctaaatgacagagaatactgggtggccagtctggagcagaaaagactctaccagaagattaaagagcttgatattcgcgtctattatggcagtgaatttttatttgagctggtagaggatcgtcaaaaatatttaaaggattatccgctgctgccttatggactggtggtagtttataaggcagactgggagaagattaaggccaatatttccttagctgaaatttctcactttgctgtgccgatttttatcaaccaccagctggacggtagtgattctgaactgccctttaaactgctgacaggtaaggaaaagaattttatcgagaataaaaatgattttgaacagtggttcagcggtctgcaaagtaaagaggctgagatcagagagacaatatctattcttgagcggaagctgaaaaatctaaatcagctcaactaccgggcagagaccatgctggcagcagaatcagcagctgagataaaaactaaactggaaaaagaagaatctaagctggaatccctgcaggctgagatcaaaaaatatgagcagaggctcaaaaatacagcggcaaagatcagcgccttgaagcaggaatatcagataaaagaaaaaaagctgactgaacttaaggaaaatcgcaagcaggttagagaatatctggaggcaaaaagagatttagataaaaaagaaagcagctatcagcaggcactggctgagatagagcatctggacaaactgcttgctgaaaataaaactgagcagaaaaagaaacagaaagaagagctgaggctggaaaataattatgagaactggcttgaggcttatcggaaattcaccagcagtctaaatgaaatgcttagtgatcagcaggctgagcttaaaagtgaattcaaaaaagatgagcttaatatttcgcccagagagcagtatcctgaactttttgcttttcggcagcacaatagttatcaaaactatgagaagataatttctcttcaaaaaaaagaagaagaaagagcagccgagctcaaatatttagaagagagcctgcagaaacttttaagtgaaattaatgaattaaaaactgaattaactcagctggcagctgactgggaggagcgggattatgattttaaaaatcggagccagctcaaaaccgctctggaggaaataaacgagcagcttaaaaagactgaaaaagaagctcagagtttgaaggaagaaattttagtccgccgcggtcagctggagacaagggaaaatgagcttgaggaaaaggcggctgagattaaagagcgttttcagcgttcggttcagagctgggataatgtagaacttaaagttaaggaattggagattaaaaaagagctgagtgagaataaagattatctttccaaactggaaaaaatgattttaaattatcaggaaaaactgcaggcccataataatctggccaataagcttcaatattaccagctggaggcagcaaagggtgagcttaatgctggaattaaagaggaacttaaagattcaccagcagcagtaattgaaagctgggaaaatgattatcgcagtattgaaaataagcttaaatctcttcgagaaaagactgaagataatttttatcattttaaaaatgatgtcaaagatgtggtagaaaatattaccttaaaaaacagtatcaacgaaaagctgctccataattttagagccagtgactaccagtataactatgagatgctgaattcctttaaggaatatataaataatgaactgaatacgattgaccgcaacaaaacggaggcagaagaggccagacagcagtgggccgagcgctcgtcaatccatgtgatgcggctgattacctctatgaaggaaatgatcagcaatatggtctaccacaatcagcggggttttgcttttcccttagtcagactgcgtcgggatgatctgctgcctgatgatgaacaggaggtaattgcagagctgaaggaatatttcttagaattgatcaataagtttaaccgggaggaaatcgatgttgagcagctgccggactataaactgaaggaatactgtggtgatgcagctcttttctcaagagcgctgcgcggccgctatccggtgctccaggtttataaaatgactgaaaaaaatgaatttctccatgcccgtccccaggattatttttattctgactgggaatcggtgattcagggcaagggaaatggacctgagggaagtggtggtcagtcactttcgatcaatgcttttatgatgatgatgcttttaaattacaaaaaacagcgttttgacaaatcaaatccctggacagttcttttccttgataatccttttggcaaggcttcggcagcccatgtgctggatccaattttcaaaattgccgataagcttaatttccagctggtggcctttgctgctccagagattatcaaaactgaaattagtgagcgcttcccggttttttgggccttagagataggtgataccgagcgcaaccagggagttgtacagggtcaggtgatttatggtgaaagacgagcaaaagtggattag

SEQ ID NO: 52848 - DNA, 1108 bp, Halanaerobium sp. T82-1
atggtgaaagacgagcaaaagtggattagattatttaaaaaatataaaagaaatgagcttgaggacaggctgcgctttcagcttgctgatttagaaaattttattaaagctagactgggaggagcttctgcctatcaggcagccggtggttatcagaatttatatcagcttttaaaaaagatggaagctgaagaaaaaattagagcaatcaaaagttctgatttcaatcagcggcagccccggcttaaaaagcgctggagtctggttaaaaaagagccggcaggttggtcagataaagttattttaaagctctcccgtcagcttaacctaagctattatcttaagaggccggctcagcagacaggggagttaaagcagcagctttttcgactggctgagtttttaaataataaatccgagcgggaatggaccagccgggaggagcgctccctggagctgtttgcagatgaaaaatatttaagccggactgcaggaaagaagctcctcagcaatttaaaattgagcctggctgacttaaaggctcagcagtacaatcatctttttgtttactggacaaaagatccaactcagatcaataatattttgattatggaaaaccattcagcttttatcggtgccaaaaaagccctggcagcagggattgatatttttgctcagaattttgatactgtaatttatggtcagggcaaaaagataatcagaagtttttcttttctagaggagctgttggggcttaaggcagcagacgagaattacagtcagcggcagcagctgcttaatggtctaaatatctattatgcaggtgacctggatccagaagggctggcaatttatgtgggtttggaaaataaatatcctgattttaaaattaaactgctggcagaatattatcagctgcttttggaggagagtgagagattttatccctgtcggaagcggcagaataaaaatcaaaatgttctggcggaggtattgatagaatttgaagctggaggatataatgatctggctgcagagctgcagcgggcctgggaaaatgatctcaggctgccgcaggagcttgtgacactggaagtttataaaaaaa

SEQ ID NO: 52849 - DNA, 1644 bp, Clostridium perfringens
gtgattaaattaaatgagatattagatggctattctaataggatttcaactattggttcgtattatttcttagtgtcagcagtaataaatcgtaataaattaaataagtttagtgaatttactaatgaagaatttttcaacttaacaattcagttgttatgtttcatttttgaaaaatcattaaagagagagaactgtttaaaagaggacctttattattttgtagaaagtttaaatttaaatatatataaaaagaatatatcatctgatgatataagcttattagttggttatctaattaatagattaactaacaatggtaaagtatatgaatttgattattatgattttaataaagaaacttttgataaatatacagtacagctaatacaaacagagcaaataaaactacctaataataactatgtattatcttattctttaactaataaaggatataagcttttattatcaacaaaagaatatgatgagatgtttcatatagaattaagtcaaataatagcaagagtaagaatagaaaaaggtgattatgcaggggctaaggaggacatacaaaatattatagaggctttaaatattcaatatcaaaagatagatgactatataaaggctattaagaacaatatttattatataaaagaagtccaatcagtagatatatttaatgattctatgattttattagaaagtgaaattaaaaaatatgatgaattaaagaaaactgttgaaggatttatattggataaagaaacttgtttgaataataatttaattgataatgaaaattacatgttaaatataagaaaagaactatctatgatgaagtcattaatagaaggtgtcgatgaagctaaacattattcttttaaattaattaatagaatacaagcttttagagttgaatattcagatatatggaagaagctcttaaaaagaggcagttcaagtaagtttagttttaaagatgtagttcaaagcagaattgaaagtccaaacctaaatttttctaatctttttagtctgtacaagcctttgtttctacctaaagttaataatgttttttgtattaacactccataccaggaacagagaataaagaactataatcagaatgataaagtaattgaatatggatttaactctgaagatatagataatagcttagaggataataataaaagaataattgaatataatcaatcattttatctaaattttattaaagaattgttttattatggattgaagcatatagagttttctacaaaagaatttctaaattattatttgaaagaagataggaataaatatattgagttaactcaaaatgctttattattaagagatttatttctcaatatatgtaaattagaaagagttgatttagatattatacttgaaaaaatagatacctctacaattaattcagatagagcttttcaaatagaaagaattattgattcaatgattaattgtgatgaaaattttataaaaatatttaaatctatttcatttaaagaatgtgtagaagaaataactataaattcggaaattgatattgaaaatatgacagctataaaattaacagtacctaatataaaagttactgttgaatataagtaa

SEQ ID NO: 52850 - DNA, 723 bp, Clostridium perfringens
ttgaataatttattaagtttagaagattatagagtagctcaaaatatattttgcaaacttttaaaatgtggtgagttgaaagaaaaggaagataaaaaattatacttagcatatataaatcaatcaggagttagagaagctttaagtataatatcagaagaatccaacgtaaatatagttttgatagatgacacaatatatcttatacctaacatagataatgatgtgttaggatttgacattaaaagagaatttgacaataaaaatatacttggctctacaaacgatgaagtatatttaagctatttgataataactgttatatttgcagagttttctaatgatatagcacctgctacatatatagagatacctgatatattagatttagtttcagaagctatgaatagagctttagcaagagaagatatagctgaagcagaggttgaaatggcttttaatattaaaagctcatttgatatatggaattctaaaataaaatgggatgaacacgataaattaggtgtaaatacgaaatcaacctcatgtcaaataggagtagttagaagaataataacatttttatctaagcaaaagcttgttaatgtcatttctgatgaagataaaatagttccaactaaaagatttaaagatttaatgaatggatattttttaaatgatgatagaaaaaaagaagttgaagagttattaaaaataagatag

SEQ ID NO: 52851 - DNA, 4353 bp, Clostridium perfringens
atgccaagaataaataaatacaaaatagttaattttagatatggagataaacatagtagattactttcagatagaacaataactccattgggaaataatgtacaaatggaggctacaaatacattgggaaaatctatgtcaattcttgcgttggtacaagcgatatgtccactttcagatacaggtagaaaggcaatagatgtatttacttgcaaagaaccagtatatgttgctattgaatggcttttggatgatgatactactaagctgttaacaggtatagctttagagcgtatatctactgctgatgaagcaagtgtaagtaaaaaagatgatttatatagattttttacattcgctattgaagaatgtagtgatatgaatatagatatagataatttaccctttattaaaagtaatggtccagggggaaaagatatattaaattcaactaatgactttgagaaatttttagttgatttaaaaaagaattttaaaggaaaggtaaatatatataaacaaactcatggaagaattaattatagaaataaattaagtgaatatggtataaatcaaggtgaatggaaggatataatacttaagcttaataaagatgaaggtatgctttctgttatgtttgaagaatgtaatactactgaaaaattattaaagaaagaaatactaccattaatagatgttaatttaaataaaaatcagattggtgatataaggataaatcaattaaaaaatgaagttaaaagttttatagagcattgtttagcaaatgaagaaaagattaattcacaaaaagattttagtatgttacttaaatttatagatgatatttatagtaatactatgttattaaaagaaaatgaagataaaatagatgaattaaaaaagaaattatcttcattatactattattgtgaaaatagtaaaaaagaacttgaaaacaagatagagctaaaaaaacaagaggttgatggtattgtccttgatttaacacaagttgattatgaagaggatagctacgaatatataaaagaagtgttagaaataaaagaattaaataaattaattgtagatatagattgtactatagaagatatagaaaaagaaataataaaaaatcaagttgttgatatgaaaattgattttcaatctaaaactaatgaattaagcactaatagagaagttttagccaaatatatagcaaagaaaaagaaattatcattagctaatgaagaactaaattcacaaataaacaacttaggctattcaataaaaattaataaagaaaatgaaataaaaaatattaaagaaaaacaaaataaatataaaaatgagtatgaaatattatcaaaagataataacaatttaaatgatgaactaataaatttaaataaagataaaactaaattatctgctgatattaaatttaaagaaatggaattatcagaattagataaaaaaatgaatttgtttatatctaaaaatcatattgttgaagaatacataaatgacacgcttatgggtagaaatataaattttgataaattaaacaatgatactttagataaattaaaaggtgctaatgaagttgtttcagatattaataatagaattaatgaattagatgataaaaaagatagtaatgagaaacttataataatgttaacagaagataagttcaaaattcaatcaaatataaaagagttaagttctaagagaaatcaacttttaaaaataaatgatttaatagaaaatacatttaaagatttaggtatagaagttcatttattaaatactgcagatagcataaagaagcaaattaacttgaaaataaatcagcttaatgtagaagaggagaaattaaatgctataaaattcaataaaataaatgaacttaataaagtagaaaatagtacggatataaatatagacccttctttagaggcggccttaaaattattaaatatagaatttgaatttggctttaactatcttatcgacttagactattcttttgagaaaaaaatagaattaattaataagtgtcctttactgccttattccgtaattatttctgaaaaagactttgagaaactgaagaaaaacaaattagaatgtcatataaattctactacaccaattttaataagagaaacttcaaacaatattgatttagaaattagtaataatatagtttcaagtaaatttataaatttaattgcatcatttgattatatgttattagatgaaaacaaaagagctgaaatagttaaaaatttaaatgacaaattagaaaaaatcaataaaaatatagaatttataggaactcaaaaaagaaagcttataaaagtattatcagtaataactgatgattttgataaagataatattaatctgtatgaggataaaataaactcttatgaattagaaattaatgatatagagatgagaataagtaattgcaataaagataacatcaaaataaaagaggataaatttaatttaaataatgaaaaagataaggctatagggcttattaatacattagaaaactttttaagtgatattgaagttatatgtaatgaacaagataaattatcccatcataaagaatatatagttttattgaaagataaaatgcaaacgacagaaaatgatattaaaaatataaaagaaaaagttgccttaatatctgaaaacttgttagatttaaaattcaatcttgaagttttagttaaagatgagaaggaagttaacaagatattactggaatttaaaaattacgttgatggttcattaattaatatggatataaatgatatgataaatgaatttaatgaacttaagaaatcatctaatgcaaatgacatacttgaattagataatttgatatcaatacataaagaaagaataaatgttttagaaaatgaattagcagttttaaaagaaaaaatagatattgaagatgtaagtatgttgattaatgaaagtataattgaaacaaaagaagaaataaattctaaaatcaattcattaaataataaattaaatgaaaaagtatctaaaaaaaataaaatattaaaagataaacataaaaaagaaggttctatagaaacattatctcaaaaaatatgtaataaatataataaagctcctatagaatatcaattaattgaaaactttaattttaaagaaagaaagaaaatattaaaagacaataaaaaagagatatcaaatataattaataaatgtaaaaatcaattaaacaatatgaatggatggataaagttacttgctgaatataaattagagaaagatgatatttataattatgacaatattgatatacaaaagtttgttgatgaaagcaagaagtctttgaaaaagattagtatagaaatgttgaaattaaaagattctcaattcgaagtttgcagaaatataaataaatttaatgttgaaaatgaaggtaagtatgattatattacagaaggtttgagtttagagatttctataaattctcaattagaaagaataagtataattaagcttcatttagaaactgaattaaataacttagctaaagaaactgaaagcttaagcatagaaagaaatataatttcaaatcttacaaaggaatatgtaaaagatataattaatcaattaagaataatagacaaattaggcaaattaaaagaagataaaatattaaatattagattgcctaaagaggagaatatctattattcaaaaattgatgatatgatggaagctatatctaatgataaaaatataagcaatatagaatatatgataaattcattctatttattaaatacagtagtaggaatatctcaaataaaaataagagttatgaaatatgagcttaataataaaaaatcaatggttgattgggaaagggtatcaagagaaaaatcaggtggtcaaggattttgtataggctttgtattgttatcaatactaatggagtataaaagatataaccctaagaatttaactaataaatttactggtaaagttttaattatggataatccatttgcaaaagtatcaaatcctggactattaaaagtggtgtttgaattagccaagaaatttaaagttcaaataatatcatatactcacatagaaaatcaatctgtaagagagccatttgatttaatatatactatgaaggtcgtaaataaactacaatcaaatggggaagtagtaattatagaacaattaaagaatgatataaatgaacttgtaaatacttcaaaatatgaaattaatgaaagagaagttcaagagaatttatttgatttaataatgtaa

SEQ ID NO: 52852 - DNA, 1020 bp, Clostridium perfringens
ttgctaagtgattttaaaagaaaaactatatctttagatgaacttaaggatttaagtcaaaaatatgaacataaagagatagttgaattagttgaaaaacttatttcttcaaataagataattccaataaaatcttcaggtaaaacagtaaatatcccgaatatatataaaaaatataggatagttaaagaagcgaattttgatgaagatttattaaaagaaataagtaccttttatttttcattatcaactgaatattatagaaaaaatttaaaggtttatataaaacatagagaacatgtaaaaaaaataaatgattatttgataaataagtcagagtgcttgaaatataaggtttctgtaaatgaaaggtcttatgagatatttactgatgaaaagttcctttcaagtgatgaaggtaaaaagattttatcaaatttaaatatagatttatacaagtttttaaatgtctataaaactccagagcctttctgttatatatccctttcaaacaaaacaccacaaaatatattaatagttgaaaataaggacacatttgtgtctttaatgaagttgttaaatgaaggaataaacaatatattaactaaagagtttaccacaattatatatggagaaggttataaaatacatagtagttttgattatatatatgaagatgtaactttacgttttttaactaataaaaataataaatttttatattggggagatatagataaagaagggtttgcaatttacagcttatttaaagataagaatgttaatttgaatatatctttatttaaagaagcttaccaatctatgattgaaaaatcaaatgagtttgagttaggttttatgaaaaagaagcaaaccaaagaatacagagaggttttacatgagctaccaggagaaactcaagtttttataaacaatatattggactttaacaagtatatacctcaagagatattaaattcaaattatttaaggaataggagtatgataaattgtgattaa

SEQ ID NO: 52853 - DNA, 1368 bp, Bacillus coagulans
gtgctgcaatctatgcgggatattgccactttatcgggcgtcttaagtgaaatgggctcacaacgcgtctttgattcaccagccgagattttacgttttctgagaattcttcagctcttaaatgaagaagcgctcggcatcggagatcgcattcccaattcggatacactgtactaccggtatcaaaaccgttttcctgacgcagatcctccgtcaaagaaaaaagtggcgcatattgtcaatgtgcttgtgaataacaactggctgtcgaaacagacaaccggtctgaaaatgcgggatctgggaaagcggatgatggatgtactcatccgcctcgccaatgactcactcgcttattatctggaagatgacattggccgttcccttttccaggcgcgccgtgatgcagaattgagcgaggcatacgatgatcatggcatttcaggcggaaacaaaatcgcaagcctgatccgcaatgtagaaaacacaattcttatgctaaaggaacgcgaattagagctgcttgccgaccggaatgccctgccgcaattacaaaaaatccacgatttaatggctgaattgcaggaaaaattgagcgagcggttccgcatgtttgaaacaatggatgaaagcctgattttaacagacctgatgcagcgcggaacaacagcgatgtctgaaggaacaaacttaagtttaggcatgatcaacaaatacctgaagtttacaacaatgcagaaaacacctttatccagcagtatccagccggaccttgttcgccaatttatcatttccatgtttgacccgcccattgattctgacattccgaatgcataccaaatgttcagctttatggagcagggccagtatgaagacgaagcgatggacgggatttggattccggttaaatttgcatccccgatttcgggaagcgggatttccgaagccattgactatcttgaaaattacgagcccgtcaccgaacctttaagcgagaaagaagaaacaatcgaatacgcagcagaggaaggctcaaaagacgagatggacgaactgctggggaactcaaactggatgctgaccaagtccatgatccagacggaaaagattgaaaactacttggaaaaaatacacaaggcttctatggaacaggcggtcattgaagccacttccggcgaatggagcgacgcagtcaatgcgttaactgcacttgccgctcttgtggcgaacaaaaaaattgatatccagccggacccgggtgacaccgaaacaaagacttatgaaaaaacgtgggaatggatgaatcaacaggacgccaaacaagtgattacaaaacgaaagcaaggtgaaccaattgatcaaggatga

SEQ ID NO: 52854 - DNA, 690 bp, Bacillus coagulans; identical to SEQ ID NO: 51794

SEQ ID NO: 52855 - DNA, 3198 bp, Bacillus coagulans; identical to SEQ ID NO: 51795

SEQ ID NO: 52856 - DNA, 1302 bp, Bacillus coagulans; identical to SEQ ID NO: 51796

SEQ ID NO: 52857 - DNA, 1410 bp, Bacillus sporothermodurans
ttggaaaaaatggatcagtccttaatttctatttttaacatggatgcggacaagccagaacttctccaaacgatgcgggacatggctgcattagcgggtgttttaaatgatttaagtgataaggaatcatttcaagctccgaaaaatgtactgcgcttcatacgtgtactgaatcttattaatcaagaagcacttggtatgacggatccaattgaaaacgaggacacacttttttatcggtatcgttacacatatggctatgacgaagaaatgacgattgaatatatgaaacacttaacctatgtattagggaagtttaattggataacgaagacagcaaagcgaattaagatgcgcgatttaggaaaaagaatgatggatgttttgattcgattggccaatgattcgcttgcttattatatgaatgacgatgtggccagatctttgtttcaagcgaaaagggatgcagaaattagtgaagcctatgatgacaaaggcatttccggtggaaataaattggctagtatgattaaaaatgtagaggaagctattttactgcttactgaaagggagttagagtatttagctgatcgcaatgcattgtcccaagtagaagtcattcatcaattgatgaaagaattggaatcgaaaatgatcgaacgtctggccaaatttgaaacatttgatcaggaattagtctttgcttctattaaacagagaggtatgacagctataagtgaaggaacaaagattagccttggtaccattaacaaaattctcaagttcgcacatttacaagagacggatttcattgaaacgataaaaccggatttactaagaaactttatcgtgcaatcgtttgatccaccaattggttcagatattccaaatgcattgcaaatcctcagttttatggaacagggtcagtacgaggaggaagagttggatggactttgggtacccgtaaaattcgctagccccttatctccgaacgcgattgatgaaggtataaactatatggagaattatgaaccagttacagatggaattgaagaagaggtggaggaggattttcaagagacagatgaaatcatggaggatatgttagacgaaataatgggtgattcaaaatggcaaatgacgaagcaaatgattcataccgagcatattgaaaaataccttgacgaggtagacgaagcgggattagatgagttagttattcaagcagggtctgacaagtggagtgatgtattaaacggtttaatcggagtgtctgcacttgttgcaaataaaaaggcggatattgatgaaaaagcaaaccgaaaattacaaggaaatatggaagaaagagattggaggtgggaagatgctgaacaaggaagctatggaattagaaaacgaagaaaatga

SEQ ID NO: 52858 - DNA, 711 bp, Bacillus sporothermodurans
atgctgaacaaggaagctatggaattagaaaacgaagaaaatgaaaactttaacgataatcctttaagtgctttacagtcgattcagggatttttaacgaaggaagaagagcttacatttatgcaaatattattttcctcctctgcaacgattcgaatggggaatttcgggctttcccgtaaagaagtggaaaaattacttggagtaaatggtgatgcggcgtttttttcctttttaaagcgagtgaatcaagcggttagccgttatttcaaggtaatttatgatgaacgaaagaatcaagtagtagcactaatgcgcgttcctgcaaaacaagctagaaacgtgttaaatcaggaaagcttggctattcttatgtttattttttatcatcaagaagtgttacggaatgagtatacattgttctctcaattgattaatagttttgggcatgaatccctgcaggtaacaaggaaaattcaagcgaatttagatcccttgaaaaaaatcggtgcaatcgaaaactacggcactaactcggatgaagaggcatatcagctaacaacgattggtgcccatcttttttccaattcgtttctacggagatatgccgagttcagtcaatcgaatcagctccatatggaggatgttcttcgattcttcaaacgctacaacatgaatggaggtgtaccggatgataccttggagggttag

SEQ ID NO: 52859 - DNA, 3198 bp, Bacillus sporothermodurans
atgataccttggagggttagattttctgggattcgggattatattccgaccgtgttggatttatctggggagcatgatcatgttcttatttccgggcctaacggagcgggtaaatcaacggtaaccttttgtatgggtggggttctttattcaagtaaagtggacgtggaaggattaaaatctaataatctatcatccgatcagacgtggcgagcaaaaattgatcttctattcaaaaatgccgggaaaatcaaagtggatgcacctcaatatgtacaattccgcttggagattgaacaaaaacctggtgatcccattaaaagggagttttatattgaagagggcgacgaaattgacaaatgggagcgtaccacgaaatttaccagtggcggcaatctgaatttttcggaatataaaaatcaagtgttttacaagtatgctgtcgaccccgatgccttttatttgatttggtatcaaaaggaagttaatcaatttgccatcatgcatccagaagagcgtttccgaatttttagtgagatgaacggcatcgataggatccagaaaaattgggaagaaagtaaagagcttgttaaggatacggagcaaagcttgcaagaagcggaaagcaaacaaggtcttaataaaatgcatttaaagcaaaagaaaatggaacttgatcggtactataaccgcaatcgtcgacgtgaggaaggctttaaccaatattatcgaggaataaaatggttggaaacctactacctaaatcaaatagactccctgaaagtacaaattgaagaattgttagcaaataaaaaggaaaagatggatgccaaacgggagtcggaaattcatttcgttgagaaaaaagaagagcttgaacagttcaggatactacttagcgaacttcaaaatcaagaagatgtattgggccaagaagtacagaaaataaataaacagctaaaagataccaacgaaaaaatagatgcaatatctgaacaaattgccgagatcaccaaacaggtcgatcgtattggtttgtcagaggatgaagtgaaggtaagattaaatgaagcggaaaagaaatataaagagatagatacatctataaaagcaatggttacaaaggcaaataatctatcgaatcagttaaatgatctaatttcgaaaagggcggaattatctgtaaaaattgaccaggataaagctcaggaaagaaagtataatgaattgatagacacttatcacggtagtaatgctattcaaactgagatggataaaaataatcttgaaatagagaacaataaagatagattccgtgttttaaatgaaaaggaacagaagattgaaaaagaactgacactactaaaaaataataaagtctacaacccccgtcaggaacagtccatccgattttttaaagcgaatcaaatcgaagtttacccgttacgagagcttgtggaattagatgagactgcgggtcagcatgatgaatatgtattcgatacgatcaaatatacattattcgttaataaaaaagtatttaaagcgcctaacgacctttatcatgtttcattacctaacctaattcctgacaaaacaattatgcagttgccggacaagcatctaaaggttaaagataatctagatgaatgcctatacccatatgcaataaaagccctttggtgggtggagtcattttttaaagaagaaaagcctttaattgttaatggtcagcttgtggatgaaaaaggggttcgtggaccacaagaggaaaagaaaattatcttaagtgaaaaagtactgcaattccagcaggtgaaattggaaaaagagctaacacaaatagaggaagaaaagctacaactcaataaggatattcaagaacgcaacaatcgaaattcgatcctctttagcaggaaagagttacttaaagaggcggaagcgtttttaacgaaagaaaatgaacgagaatggcggcaaagccagtatgaaaaagtaaaaaaagagatagaagctattgaaaatgaaaaccgtttaattcaagatgggttaaacgaacaaagaacatcattagctaggtgggaacaatccttattaacttatcgagactatctagaaatctaccaacaatttcgtaaagaacaagcaaaaatagaggaagtgcagagattaaagagcatcctggtggggcttaatcaaaataaaaaggaaaaaaacaatcaattagaggggatttccatcacattagatgccaaaagacatgaagaaagacagctatcaagaaagctagaagatgaagaaaatgatcttattggtcgggaccgagaaatcgaacaaatggaacggcaaataaaaacaaggtcagaagagcgattatcaaacgaagagggatattctcgtacaagaaaagaaggacaaaaacttctagaaaccgcgaaagacttagtttctaaatggaacgatcagatggagcgtttttccgagctgacaaaaccgcaagcggaggagttacgtaatcatggaaaaactacctttgaatttgcgataagcgagacggggatagatgaagcagcacctgaaaactatgcaaaaatgaaagaagaatatgatcggtcagagaatgaagtgaaaaaatcaaaaatcttattggaagaatatatcgagcgaatggaacgatttaaagaagatttggaagagactatcaacatgaaaatcatcggtgtgaaccagaagtttgtgaactatatgtctttattcggctttgaaggaaaaattgaatgggacatgaacaccgaccgacgaggacaaattcggtatacactatttattaaggcaagaaaagaaggccaccgtggaaaattagaagatgttagtgtgaaagcacgtggcgggaaagtgggaaaaggtgtatcaggcggcgaggaatcacttagttctttattgtttgcactggcgttactacaaacaatcgagacatcaccaggatacattgtcctagatgaatttgatagcgcccttgatgaaggtcgaaaagaaaaagtgttcggattatatgaacaagaattgcaacgaaaaatgattattcttactccaaaatcccatgaagaagaatatctttatcgcttctctaaagcatacgtcgtacaccacaatccaaatataccaaaaagtatggtgtttaaagtgaagcgtgtgtag

SEQ ID NO: 52860 - DNA, 1275 bp, Bacillus sporothermodurans
ttgataaataatgtatggaaagattatttgtatgaatatatactattaaaaaatgaagaacttaatttactagatattagagaaaataatggacttatcgatattcctgttgtaaaaaagactgcccggactagaaggacggttgcgatgttgacggtggggattaataataaaaatgtaccaccaagtaatcttctaaaagattttacaagtccaaagtcaaagaagcaattcgaacttacaaatgaaacgtatgagtggattcgtaacggatggatcattcgagagtatcgcttggctaaagacgagcgaactgtgaaaagcgtacagtttcgaatggggttctctttatttctgtataaaaagcaaatagaggatgaaaaagaaacaaagaagactcagtctatcactgaatggaaagaacaatggattaaaataaagaattcttcttcacttaaccttaaacgaaaagaacaactcaatagattaaaagatatattagatgaagttgtaactgagggaaaaattaaccacaatagttctacttggaggtttcaaaagcaactgttatttttacactttctaactgctttttatcaaatttcaatggccgaacatcattttgattggaaacagattggagcacggtattaccggaaaattgggggatcaaaggaattcgattcctataaaaaggaatttattgaaagtgctgaagagttgcttgagtatccgctccatttactcgggctaagtagtttaggtacgattaccccgatttattttacgggaccaatgcagggtgtaagtgtttcatacgactatggtccaattcatgccacaaccgatttagcggtttttactgaagattttcaaacggatgcgcaagttttgtggttagttgaaaaccgaggaattttaacacgaatggcttatgaaaagaactttttgttagattcaaagagtcttgtattaggaatcgatggccagttaagatctgcgcaccgacgattgattgaacagcttgtttcaaatgtaaaacaggtgattatttggacggatgttgatgaagctggactcatcattgcgaaagatgtaggagaaaccgtgcaaaaatatcggtcaataacgaaatgggttgttccaccattagaagtcgttttagatgttgaggagtttcaatcacgatataaaaaagccattcaagttcaaaaagaggaacaggagcaggagatagggggagtagaacgttggaaaaaatggatcagtccttaa

SEQ ID NO: 52861 - DNA, 762 bp, Geobacillus sp. B4113_201601
ttggacacccctgaggggccgaaaagccttgataaatcaacatttctagagggagggaagacgtatgagcttgtgctcaaaattgccagagagttagaatcggtgcattacgcgcattcggcgctcctggataaggcgctttcgttaaaaaatacgacgcttgtgacggcgcaggaatcgctttattatacggggctccattcgtttaatttcgaccaagacatcgtgtctcacatcgtttcggctccgctcccgcttgaggcgatgaaaggggtgcttcatccatttttaaaggtggaagaaaacaaggtttggtcgccgatggcgattttcgccgagcaaaacattaccgaagagcgcaaagaaaaggcggggccgcgttttttagaagcggaagaggccgaagagggcgatcggtatcgcgcatggctcatagcgaaatatagagagttgatgcaactgtttttaaaggcgtacgagcaggagcgcgcgggcacgctcgccgcgtttttcgattatttggacgacatcgggcagtcgcatttgtatgaacagcgctcgttttacgatttttggatcttgatgcaccagcgctctcccgtcgagcaaggcatggaaggggaagaaggaagcgcgcttctcggcgaggcgctcgctttgcttggcgggcgcgtgctcgaggtgcaagaagcgggtcgcatcatccgccaatgcgagcggttttcgattcaagacatgagtataacggtgagggaacgatga

SEQ ID NO: 52862 - DNA, 747 bp, Geobacillus sp. B4113_201601
atgagaaactatccagaacaaaaagtcatgcaggcgtttcaattgtatacggcacttgcgcggcaaggagcggcaggtgcgcaggcggtgcagctttataagagcgatgatgaaatccgcgcgctgttggatgcgttcagccgcgaagtcgactgcgtcatcgtgttgacgagcgaacggttgtttctcgtgccgcgcacgaaactgtcgccgtttcatgtaagcaacgattggatcaagcgccattatcttcgcgccggcgccaccaacggcgatttgtatttgctttattttgccgttctcgtgttgttcggcagcttttacgacacgtatcaaagcccagagccgacgcggaactttttggcgatggacgaatgggtgcgccttgtgcaagagcgcatcgaccaattgaagcggcacgatccggacgaattgaaacaatttgagcaagagttttcatacaactggagcctcatcattgaaaaatgggaggcgatggacgatattaaagaaacggcgaaacggcaaagcggcgcaacgattagccgcctcagcttcctcgatgcggcacggcgctttttaatcgaccaagagcttgtggtcgacatcggcaacgatgaagtcgctttgacagaaaaagcgaaaacgatcatccagcgctttttcatggaagtcgagtacaaccgcgggattttcgagtttatttacggatttgaaagggagagggacgatgccagcgatcagtaa

SEQ ID NO: 52863 - DNA, 4413 bp, Geobacillus sp. B4113_201601
atgccagcgatcagtaaaattcggctgacgaacgtcgtgtatgaagaaggccgcaagcggtacaacgatgaaatgttccgatttgacggacataacggggcgattttgctggaaaacggcggcggcaaaacggtgttgatccagacggtgctgcaagcgatcttgccgcatgttgatttagcggaccgaaaaatcaaacagacgcttcaactcgaaaacgcgccggcgcatatcgcgattgaatggctgttgaacgacaaaccgcgccggtacgtcgtaacggccgtgtcgctgtttatgacgaacaacggactcgactcgctccgctacgtttacgaatacaacgcgaacgacccgcacggcattgaaggcatcccgtttgtgcgcgaaggaaaaggcgggaagcggccggcggaacggggcgaaatgcaagattactatcatgatatgaaagcgaaatcgatgttcgcgcgcacgtttgcgaccattaaagaatacaaggcgtttcttgaagagcagtaccatattattgagagcgaatgggaaagcgtcgtgaaaatcaacagcacggaagggggcgtcgaagcgtttttcgacgaatgcaaaagcacgaaccagctgtttgaccgcctgctcattccgattgtcgagagcgcgatcgtcggccatgacgcgaaactgtttgccgacatgtttgaaaagcagcttgccagtttcaaacattataagaaattgaaggagacgattgaagaaaacaagctgatccagcaagaactcgagcgatacgtggagacgtatgaggagttccaccatcaagagctcgcgtatacgaaagcgaagcaacgggccaaaggggtatggctggagacgctccagcaaaagcaagcgggcgaaaacgagctaaacaacaacgccgcccaatgggaagaatggaggcaaacggaagcggcgcaccgccaaaagcgagcgacgtatgacgtgttagtggaagaagcgtgtttgcgtgaactggaacgcgaatatgaatgggcgttagcgcaagagaaagaaaaggaagaagaactttggcgccttgagcgcgactatgattcgctgcggcttgccggatacaaagaagcgaaaaaacggcatgacgaagcgcttgcctatattgaagcggagatggcgaagcggaaagacgacgagacgctcgctcgttgtgaagaagaattggaaatggcgcgccgcgcgcttcttggttattttatggagcagcttgagaaaatcggccaagaggagcgaagtgtgcgctatgaactgaatccgattcaaacgcaaatcgaacaatggacgaaagacatcgaaaccctcaaacggacggcgcaagaggcgggcgagaagcgggctggcattcaaagcgtcatcgatgcaagagaaaaagacatggagtctataaagcagcgcctattggcgaatccgtcgcagcagtcagtcgaggaagaaatgggaaaatggatcgagcgcgaacaatggttggacgaagaaatcgtccgcttgcgccaagagatgaagcaatccaagcaagcggaacgggcggcggaagcgaacaaagaggcgcttcaaaagcaatgggcgaagcagcaggcggcgagcgaggcgctggcgcagcggctcgaaacgcttgagaacgaagagcaagcgctcattcagacgctcgcctcgcttcgtccgcaatgggccgcactggatagcgtctacatccaagaagagacgatccggatgaggcttcaggaagaaatcgaaaaaagaatgaaagagcgagaagcgctattagtgcaagaacggatcgtgtcgcggcttcacgatgcatacggcgaacaagacgtctttttcgccgacccgtttttagcagagcagcttgcttcatggaaaaaccaatttgatttcgtcgcgacgggtgttgaatatttgcagtcgcttacagaagacgaacgcgcgaacaagcaggcgtttccgctctggccggcggcgctcatgacgacggcgaaggcaaaagagcggctcgtgcaaaaagtgcggcaaatgaacgaccgcttgcagctgccgatcgtcgtgctgtcgacggatgaggcggcgcgcgtggaagagacgggcatgccgcatgaatggatcgcgccgcgttattgggaggaagcgagcgatccggccttgtttggcgcttggaaagaacgcatccgcgaaagcgcccgcgacatgacgcagcgccgtcaagagaaagaagcggagctgaggctttggcaagacgcgcaacaagcatggcgcgcgtttttggcggcccacccgtacgaagcggtcgaatcgctccgcgctgagcacgccgaacggttgcgcagcattgaacaattgacgcttgcgatcgacaaagaaaacgcccgcatcgatgaatgccgcgcccatctcgagcgagccggatcgctcatcggccaatacgaggaagaatggcgcggatggcgcgacaaaatcaaggatgccggtcagtatatgcaatataaaaaagaagtgcaagaagcgcggaaacaagcgcaagcgctcgacgagcaactagcggcgcttgccaaagatatcgcccgtctcggctcccggcttgaagaggcgcgcgcccaaaaaacagaattgaaagagcgccttcggtcgttagaagcccagcgccgcgccgttgaacaaaactacgactatcggtcgctccgctctcttgcgccgatttactcacgggagagcgaagaggtcattcgcgcgaaaattgaccaatggaagctgcgaattcaagggattgaaacgacgtacagcgagtggcaaacgaagcgggagtttcgacaaaacgagattgacaggctgacaaacgaaatcaacaagctgaaacagaagcgtcccgaccttgacgaaacgaggacgtttccaagcgacggcgcgcagcggctcgaacggctggaggaacaaatcgcgtcggctcaagaaacgttaaagcgcctgaaacaaaggacgcaagaggctttaaaacgcaaagagcggcaaagcggcgtcgtgcaaacgaaagagcagcagtttcgcgaaaaattcccgaatgaggcgcggtggccattcgctgcgccgcttgccgacatcgccgcgcagttggaagcggaacaagaagcgctcgcaaagcggaaagcgtttctcgaacaagaacgcgagcgccttgccaaagagatgaaaagcatcgagcaagcggcgcgtcagctggaagtagcgaaagaggtgcatcatttcaacgcgccgccgatcgccgccttatcgttgagcgcggaagaagcgacggcattttcatacgaccgccgcggcttcatcgaaggggtcacggaaagcttaaaggcgggaaaacaagcggtcgaagcggcaaaagagcgcgtcgagcgcgccaaacggtcgtttcgggagttttgccgcacgtcgattcaagatatgaaaatgcagcaaatggcaattaatggcattgagcataaagaaacgtacgaagacattatcagctttaagaaacatatgatgaaaagcgtcgaaagcgcgacgaactacgcgaatgaacatatccggcaaaaagacgccgagctgcaggcttttatcaaccatatccacacgcatttgcgcacattggtcgaagaattgaggcaaattccgaacaagacgagagtcaaagtcggggacgaatggaagcgcattttcacgtttaccattccggagtgggaagaagaagtcggaaaagcgcgcatccgcaaccatattgaatggatgttgcagcagcttgagtctgagcgctttttaaacgaacacggccagcaagatgaagcgaaagtgcggaaggaaatcgaaatgtggctgcaatcgaagcaacttctccaaatcgtcatgaacaacgaaggcatgaaagtgaactgccgtaaagtgacgaacgacaacaaagtgacgacgcgctcatactcgtgggagcaaagcaacgtctggtccggaggcgaaaaatggagcaaaaacatgacgctctttttaggcatcctcaattacgtcgccgagaaaaaacagcgcctccaaccgacgatgaagcgccatcgcaccgtcattttggacaacccattcggaaaagcgtcaagcgaccacgtcttaaatccggtgttctttatcgccgaacagctcggctttcaaattatcgcgttgacggcgcatgcggaagggaagtttcttcgcgattatttcccgatcatttacagctgccgcctgcgcccgtcatccgacccgaacaaacaaatcatgacgcaggaaaaatggatccatcatgcctacttccaagaccatgccccgaaatcgctcgaacggcttggcgaaacggagcagttggagttgttttag

SEQ ID NO: 52864 - protein, 273 aa, Planctopirus limnophila DSM 3776
MPWSNQHLGWLVQLSPPQKTADGKPIHVWAFQYDQTDKALMSSWAKHFRNHYCLDTQIDALRKGTGHTRSQYLLTMKFPSKTIAPGPSIRSGDFCEILVADFLQYNLNYFVPRTRYSSKTIKNESTKGGDILGFKILKSGKHSKNDELAIFEAKGALSGARKPPRLQDAVDDSIKDEIRKAESLNAIKQRYLDANAVNEIATIERFQNFADHPYKETYGAVAIFTSTAYCQTTLSKTDASKHPKSSGLSLMVIKGDDLMALVHTLYELAANEA

SEQ ID NO: 52865 - protein, 1032 aa, Planctopirus limnophila DSM 3776
MKPEQASESLLGATRARAKMHEYGVPSEDFIRIPRDPAHLFSLTIGMLGDVAAGTSVNHKTSERLAETSKHLLFCARFFDSYLESKLDSQLDAYMLLLAGATYYLAALPGSSSVIASRIPEPCPDLGARGLEQLLSWSLRGDFQVAPAFPIETYAEIRNLADALGNFNSTGEGIQELDLAIRTLRTSAYAEGSPREVLFADLIGAIARTRQAKSTWTTLPRYTDVSETLWAPIIRKSTFIREVWPAQQLLGDHGLYRGKSAVVQMPTSAGKTRSLDLVIRGAFYAERTSLAIVIAPFRALCEEIRQALARSFSGEAINVDALSDVSQDDFDVSDILSAKQVLVMTPEKCLYLLRHSPEIAEELGLLLYDEGHQFDSGRRGVTYELLLTSLKSAVAETTQTVLVSAVLNNAQAIADWLLGSGGAVVSGNGLLPMTRSLAFASWKDRLGRLEFTDSNDPDIGEFFVPRIIEKQSLNLFRRERKPREFPERDSTSIGLYLGMKLAASGGVAIFVGTKSTASSIAQSAVEVFSRGLAMASPDTYSDAGEIQRLVYQIERNLGDSVASSKAARLGVFTHHGNTPHGIRLAVEFAMKEGLIKVVICTSTLAQGVNLPIRYLIITGARQGNEQIKTRDFHNLLGRVGRSGMHTEGTVIFSDPKIYDGRTDASERWRWPNTKALLDPSKSEECRSALLSVLDPVYSKDREMSLRLSVGLMVQAHKKGKKGWHGVANRLAVKYRENNFDEADLENQLEAKSDIMSAIESFLLANWEENSDELSASIESLAASTLAYHIAEEDERIKLVELFEKLAENVATNIPDLATRRIFSRSLFGLADNLTIQKWVTDNLSELLSRSDTASLLRDIWPLFTDFVRNKSFVGCSIPSSVSQAAQSWIEGKPFESIFADISGAGCRFSARNLHPTIEHIVDLCESGFGFDGMLIVGAVAEVLTIQESTATDTIELLRQLQKELKYGLPSSLSITIYELGFADRVLAQELAASLIGASERKKVKRRLLNKKETARSVLQAFPSYFTSVLDSL

SEQ ID NO: 52866 - protein, 278 aa, Leptospira interrogans serovar Lai
MPEHINWLKDTGKRLKTNDGKGIEVWELEYANEEKVLIDWANYLRNHYCLDCDIDFLRGEKSKKEYLENIKFPSKTTPLGPSVKSGDFGEILVADYLEWKLNFWVPRVRWNSKISRDDSPKGCDVIGFQVTKKDIPSNSDKLAVFESKAGFSKSNGNRLQDAIKDSAKDLVRIDESLNYIKQKLYEKGERALALKVQRFQNPIDLPYNEIFGAAALLTNEYYDESILVETDTKKIQKSLDPPIFITHPNRDKLNLIVIKGKQMMDLVYKIYDLAANEA

SEQ ID NO: 52867 - protein, 1042 aa, Leptospira interrogans serovar Lai
MKPEEKSQLLLGVTRSKAKMFEYNVSIDHHINIRQDPIKLLTLSIGILGELAARENSEDFSEANLVDLRKNLQFSARFFDSYFHSQLNKQLDPYLLLLGSASYYLCDLPGSSLVLATNIDSWNIELNSNRIDRLLAWLLQNNYNQNANIQYSLYEKDIKNIINSMIEFNRTGLEGNSLIAVAKNLRKKAYEFGTPRELLFSDVVTAIVRKKYENSSWISLPKYSSLDKKKWYSFLIKANAIKELWPAQQLLGDAGVLKGISSIVQMPTSAGKTKSTELVIRSAFISERTNLAVIVAPFRALCHEIHNNLLSSFSGETVNVNELTDVLQFDYQIDEFINQRQILVVTPEKFIYLLKQTPELVEKIGLIIFDEGHQFDSGTRGIKYELLLTSLKTMLRSDSQKILISAVITNAQAVNLWLNGENAKIVFGKSLTPTFRTFACVSWVDPLGRLLFFDQQNPDIEEFFVPRVIESYELKLRNRERTVRMFPMRDDEQAIALELGLKLSKNGSVAVFCGKKDTATKVCEKIIDAFERELPLSPPSQFSNGSEIERLYNLYSANLGDSSIVTKCAKIGIFTHHGNTPHGIRLAVENAMKLDLIRFVICTSTLAQGVNLPIRYLIVTSVYQGAERIKVRDFHNLIGRAGRSGMYTEGSIIFADPVLYDTKAEAQENWRWKELKKLLEPNNSEPCASTLLTLFIPFENETKSRHIQMEPMDFVNLYIAGSTEVERYIENIVNKYAEKKYTKQDLQRQVNWKINIISSIESFLLSQWPEGSNDQSSLGSISELAKNTLAYHLADATEKEQIIEIFTIIANRILNEVADSKKRKIYGKTLLGIREIQEIESWIQLNIETLNNVKDYRLLLQKLWPILLVHTKNNVFVKCSSQSSLLALAYGWIEGKPFYEIFNNFISTGVKLVSGIQRRNYKLEHVVEICENAISYEGSVILGAVVEIIEFLFPQEMVELIERVKILQKSVKYGLSSLTSINVYELGFADRVIAKEFSILMKTEKSKSKIREYLKENENAFRTILLKYPILYSQIFESILEA

SEQ ID NO: 52868 - protein, 276 aa, Campylobacter showae CC57C
MNLFFDNSKYFKFDKSISSKNGNGIRVFRLDKDLLDDNSLNNWASGLRNNYVEESLLEPLIKGTGLTKQEFLEKNIFPSHQNSLGASTMSGEFGEILVYDYINFTLKHYVTRTRYLEKVNPNMPVSGSDVIGYQVKNIDKPSKTDHLIVAEVKTRSSKSGNKKNLCEKTVKDAIEHSVKDRVRLGESLNAEKRRLLNRSRIKEAKIVERFQNKTDNPFRLDFFAVAVLDNELYSDQVVLDVVNSQPENVKSTNVLIILSKELKLFLRDLYRRACSC

SEQ ID NO: 52869 - protein, 1032 aa, Campylobacter showae CC57C
MLIEGTSKYYLKKVRAKAKMYEYGVPENLHIEVEEQANDLILLSIGIVGDIANEIWNMKQAPIILPKEKEEELYFVSRFFDSYFQSKMSIEMNPYYILMGAVTYYFCNMNGSSKVMMSIMPDLTNFEFSASGLENIIIWLLDGNYKFDVSDIDEKYRSYIIQLINYHNRFFDSEKLEKAQFEEFRNYVYHFGNDREILFTDIILAILKKKIYNSCINLMPLYSGIDKDNWISTFKNNAMMKEMWSSQLLLGEKGIFKGKSGIIQMPTSSGKTKSVSLAVQSAFLSKRTSIVIVVAPFRALCKEIMFDMEKFFAFDKNITVTEFSDVPEPSEIELVTSESIVKKIIVMTPEKLAYILKHNTEIIESINMIVFDEAHLFDDESRGTDYELLLTTINSYLKPDAQKLLVSAVISNADQLNLWINNDGIVIGNDTIKTSEKTVAFNTFMSSNINNAYSNLHFVEPNRNLEEEFYVPRVVQTKELNKVGNEKKQRYFPDFKSNKQDVGIYFAIKLIRNGSVAIFCSKKDIVNKILLRFIELKERGLSLDDFSFLSDDTECSKISHLIREHLGENNLYMAALNGILGHHSGVPNGVRIAEEYALKKSLVRCVVCTSTLAQGVNLPIKYLIVSSVYQSKHVIKVRDFHNLIGRTARAGKETEGTIILTEDVYKNSKETYKLNNYKRLLNADNSEECSSNLLKLVREVDLGNNRVISFDFLKKYIKSRYSNKAEYTEIKKGILKYKEQGREYGEEIFYKMDEIEHILVSLENFILGFADIEDESFDIIQSTYGYYLANEEEREELKAIYNLIKSNIDTLDVGDRLLYRKSMLGILTMKELSKFIDDNLYEIANADFDTLINLIANKLKESEDCKIIPKFIDDGYVYELLKMWINGKSYIQILDYSKSVDLLIKWGKKSRDISLEDIIALCDSDFGYTSLTIIQAIIEVLNTKNCNENTKEDLSDIIYRIRYGLPNKESVFIYELGFADRIISQKIANEISDFDCSTKNKIKSTIKNNKEKLRKLLANYPSYFLDRLQKLR

SEQ ID NO: 52870 - protein, 298 aa, Pseudomonas aeruginosa BL04
MPESNELPASGCSSVPVLTHSSAVPSSRAPDFLSCLSKCPGFLRSADGAPIDVWKLCAPPSEELLSAWASRFREHYCSEAEIDMLREGTGLSRAEYLLQLVFPDKSAAPGPGIRAGDFAEILVSDYVEFVLGYWVPRGKYAEKASRDESVKGVDILGFRVCDPQAAHSSDTLIAFEVKAQASGGKYTGRLQTAIDDSSKDYLRRAMTLNATKRRLHRGGQQAEALLVQRFQNQSDHPYIYRSGAAAMLSDDSFDEALLKSSTTVAKHQNAENLELVVIRGTELMALVHALYERAANEA

SEQ ID NO: 52871 - protein, 1047 aa, Pseudomonas aeruginosa BL04
MRPEINSRRLFGIARSKGKMYELGVPEASHIAVPPNVEPQELFLLTVGTLGDVAAIIGSAENVDVPLPPGMMEELGFSASFFDAFLESQFSQAIARDTALLAASAYYLARRPGSSLVLARQLGDAHEDDPVDRLLHWVLTARWERYPLSNHPFFGKSLENVARLLANHFYDGSGLTELALELGALRSRAYQSGTPRDLLFIDIIVATVRLRVAVSAWTTLPGFTGIPAPQWAMAIRRPEFPKELWPSQVLLGRAGIFSGSSGVVQMPTSAGKTRSVEIVLRSSFLAGRTKLAVVVAPFRALCHEIGTSLRHAFRDDDVKVNELSDALQLDFLQQVSELLGTQAPTSQYILVLTPEKLLYVLRQAPTLVTDIGVVVYDEGHQFDSGSRGITYELLLTEIKALLSPFAQTILVSAVIQNAQEIGNWLIGDGARVVNGSSLLTTARAVAFASWIERLGQLMFYESSQYDQADYFVPRVIEQQLLQRLGRERSDRYFPAKESSNDVALYLGIRLAPQGAVAIFCGRKDTASNMAARAVDVYERGFGIAPPAASADADELRRMKRLVDAHFGSLSVPSRAASLGVFVHHGTTPHGLRLSIEYAMQKGRINFVACTSTLAQGVNLPIRYLIVSGIHQGGEKIKTRDFQNLVGRAGRSGMHTEGLVIFSDPDVYDKRMRRGESWRFQSSVELLSPELSGSTTSSLLGLLAPVQSSDGKAEFRYSAEVMCGLLLSDESAWVAWANEVVRQNPQYKFDAKALVAEIRYRRRLVFAIESYLMANRGASSFDEFLSSVEDLAASTLAYHLASDEQKTAVKTLFIAVAEYVQQQEPAPEKQAIYSKTLLGVKSAKVVENWVAANSESLLALSSNADWLVKLWGLLVTQSDSKFFHTVEPKTLPLLLAKHWLAGAPYSALFESSHAQNGTKPWGPTKRRSLTDDDIIDFCESTLGFECSLLLAAVAQFLSGENSFQDENAEALQLFQKSLKYGLPDMLSISCYECGFSDRAVAQELRDVVRAAGFTEGTFSLALESHGEQVKVALENYPSYFESVLTAWR

SEQ ID NO: 52872 - protein, 264 aa, Pseudomonas aeruginosa VRFPA05
MDDLGFDFSNAVPWFPHEQEQPYVLVRMTAQQVALLEEAMAEPLRRCYITDEVLQAAADRHGLTLSDVLAGKLPDAGATMAGDFGEVLGYFYQSAMEYPGNAIGPKKWRLKQDRTKPAPKSDVIHFLMPQRPAASAADQVLCSEVKVKSTSASSDPIGSAITDCAKDRTSRLASTLVWLRERAMTEDLGDVDIPLLNRFINAVDHPPASRRYRAVAVICESFVTAELSNAPTTASDDYTLVVISVPNLHTTYNAVFEAARASVR

SEQ ID NO: 52873 - protein, 738 aa, Pseudomonas aeruginosa VRFPA05
MARHLGQFSVAALPLELAQIGSRLADYYISLVGELFDGIHSMDTPSDDWAQLGNAFLQFSKETPAEQLEALGISKDEAALFAAAAFYFGDFPASACLAMRQSARPSDPQSSWAACYDFLARPSNLGSQTAIDVQEHLRSGDLVGLSDKVEASTTAAQNALADGPDVWVAAALLNRLLARFERSNIRAVLPEGKTAFWTPLINSFIDRKPSTWEFFPSQIQAIERGLLGNAESYSLQMPTGAGKTTLCETLLYWHLKRNPTHVAIMMVPYRSLASELRNSLVRQLNRLGIAARCAYGGTIPSGDEVHGLDHINALIATPESLSGILSADPAFAQRISLVICDEGHLLDSSGRGIGLELLLARMKARLANPIRFVFMSAIIPNIEEINAWLGGDENTVIRSTYRPAIAEFSVLRSSGTGVNKSVRLDMHPHAQQRHYAIHGFLDRSSFQYVNPQTGRTKTYTFTSTKTLAVGAARKVLSMGTTAIFAANKRGNQGAIGLAEELIKQLECPLPLPRPVDYADIETLRTRVDYLETEFGAGWIGAMSLRNGAVLHHGDIPQETREVLEQLLRERRIQLVICTSTLAEGVNLPIRSLVLYSVQRRVGSGQPENMLARDIKNLVGRAGRAGANTRGLVICANPDQWWLVQPVATAGAGEPVRGSLRNLIENLETFLRSQNLALDNQFLEYQAVIHPLIDGVDATLIELIADEIGDAEFLRQAADLSDHTFAAHQLPPRLRRYAA

SEQ ID NO: 52874 - protein, 264 aa, Pseudomonas aeruginosa BWH058
MDELGFDFEDAIAWFPQDQDHPYVLIRISAHHVAELSAAMGVPLRRCYITDAALQQAMAQHNLPPVDIVRAMLPDAGAVMSGDFGEVLTYFYQAAAELPANAIGPKKWRLKQDRTKPAPKSDVVHFVMPNRPHASAEDSVLCAEVKAKATAGSSTPIADAITDCKKDRTSRLASTLVWLRERAMTTDLGDVDIPLLNRFIDAVDSPPAAKRFRAVAVICNDLLDNELASAPDNADPEFTLVVIGVPELRTTYTAVYTAAINSVV

SEQ ID NO: 52875 - protein, 991 aa, Pseudomonas aeruginosa BWH058
MRASLQNWINNADNFRHLRHFNVVQLPVDLAHIGNRLDDYYISLVGELFNNLRGLNVPSTDWAQLGNAFLQFSVETTDAQLRERGISKDDAALFAAASFYFGDFPASACLAMRQSSRPADPAALRAACFDFLARPANLQSELVRTLQNELKDGAVAQIAVRVEESQEAVREALEDGPEAWIVATLMSRLLARFSQTNLRAVLPYGAHPFWTPLIRSLVDRQPSTWEFFPSQIQAIQGGLLENADSYAMQMPTGAGKTTLCETLLFSHLSARPQDAAVLLVPFRSLASELRGTLVRRLNAMGLPARCAYGGTVPTGEEIHGLDQIRAIVATPESLSGILSADPTFSQRISLVICDEGHLLDSGGRGIGLELLLARMRSRPELPPRVVFVSAIVPNIEEINAWLGGNDNTVIRSTYRPATAEFAVLRPTGSGAGTSIHLDMHPHEVVERKFTIERLLSSDNFRYVNPATGRSKTYSFTSIKAQAVATARKVMPMGMTAIFAANKRGAQGAVGLAEELVKQLSLPLTLPTPLAFARNDNLQRSITYLEGEYGNAWIGSQSVRHGAVLHHGDIPQETREVLESLIREGDVRLVICTSTLAEGVNLPIRSLVLYSVQRRNMSGPPEAMLARDIKNLVGRAGRAGANTKGLVICANPDQWHLVQPVATQGAGEPVRGSLRSLIQQLSSALTQQGLALNNEILEGSSPIHPVVDGVDSTLIDLISEEVGEEVFVAHARQLAEQTFAARQLPQGQVDLLRNVFELRARRLIALRQTGQLSWVRDTGAKVRLLDSVERILLPARERWQDSIDPLDNELRTAILEWAWTHRELQNDIVQTFRPAGGDPELVKDVFFELVRRWMAGVSFVDLAQQLLLSMDDLLAIHTRVITFTLQSLVDQGLSLLTRRLQADGIEIAVGVTNFGEQLRFGAPNLAARVLASSGVRHRKAYVALGNAITQQGPVLNVATIKSQALEGLRQHAPGWQAQLGDLVYANTFKDLS

SEQ ID NO: 52876 - protein, 260 aa, Pseudomonas aeruginosa C2773C
MGLYKRWCKSTKEKDKRKHYWTYVEKDGGRDEIRDDLAKTIRSHYDRLELIAEDVKRLGYEVASEILSAKMPQTAKGRSGDLGEILATELVEEEIGLRVPVRRLRYKDDRNMAMRGDDFIGAGYDGAGEKLWLLKGEAKSNKVLGKATVTSARKVLNRDNGRCTPDSLLFVANRLLESNDPDDNVLGRSLRDEVGLKSLRADRIDHMLFTVSGNGPHASLKEDLDATGTNRDHYVVNIHVEDHQDFIADMYLEAENLGDD

SEQ ID NO: 52877 - protein, 1165 aa, Pseudomonas aeruginosa C2773C
METIDELTAFLTTATVDGILGRLLYRGAAWSLMRDEGVLPPNAPPLGATIETDLAEHGFALLRGAMALRAQAGASALTSKAFERAANAFEALVRNGDPEAPDRGFRRTIAAAAYHLAGFSAVAYSLFNETADDLNTSPGETAIRHLILRDLDQLRGFVREWLGDAAHGDEQIAEALRGEDPDVDEVLSTILNTTICRALAFFDFALETGEPEPIESARALLATAVSLAGNAENVPLWWISNLCHHLIDDLWQHSLHQNLPTEPPEGTEEKYPDLRRLFISSLYARKTSEVELWPSQREAAQRSTDVRDDLVVALPTSAGKTRVAEIATLMTLSSVRRVLIVTPLRALSAQTERSFRKTFAPLGFSVSSLYGVSGLSAGDEDALRTREIIIATPEKLDFALRSDPSLIDDVGLIVLDEGHMIGPSEREIRYETLVQRLLRRADAAERRIVCLSAILPSGDELDDLTAWIRSDEPGEPVRSDWRPTRQRFGALTWRGKDALLRLDLDDDGPFLDKFVVEKPALGRETKPYPRKNSHLVLFAAWEFASQGKRTLIFSTQANWVESYGKQVVDLCKRGYLDPLLDDEASIARALEVGKEWLGEDHPAVASLKAGVAIHHGRLPSPFLRELEILLSEGVLKVIVASPTLSQGLNLNAAVLLVPTLYRAGEKIKGEEFANVAGRAGRAFVDVEGLIVHIMFDQIDWRKREWRRLVASAKARTLKSGLIQIVTEILERLSREGVLDRADAWEYLANAREAWRSPDEEVEVAERLAAAVKYDADADDADEDDEEEPIDEEPLSQLVERLDATVFGLIEALDADRADLPKLLDEALKGSLWARQIAREGEDVAPLHKKVFEARADLIWKTTTAQARRGHFAMGVGLEAGLTIDAMADELAELLDRADEAALSGDIDELVGALCGLGERLLFMRPFIPDKANALPANWKAILRSWVSGEEVSKIGPQNMRAVEEAFTYRLVWALEAVRTRRMSLGWSPETVAGGAAAAVETGVPRFMMAMLIRAGLPSRRAAMVAIEDAEPVFVTPAEMRAWLESDEITAYTDAGDWPTPVTAALWARFRTEALNDGIQKWSVERYKRLLDIEAAPPAGLYRIVTDEGDGRTWLATPDYQRVAAFKKPAVDPKPSLFSGRLPGKTRLVEALRVGRGKLRWPPADA

SEQ ID NO: 52878 - protein, 253 aa, Pseudomonas aeruginosa
MINLAKWCVESEETFAKHKLRRMAVNAATQTQAVNAIAKAIPDYYTDPQRVASLLKKLGKPAAAAHVEQKLPTKISIRSGDLGEILCNAYVLEATSFSLGIKRLRWKDHRNMSMRGEDVLAFELGPKNNRLKILKAEVKSRAAMSTAVIGDARVALSANSELPSPHALAFVADRSHQTGDTILGDALDKAQLEDGIRPSQVSHMLFTFSGNNPVKLLKTNLQAYSGSVPQHYVGLHVQGHQDFIKAVFAAVSK

SEQ ID NO: 52879 - protein, 1165 aa, Pseudomonas aeruginosa
MAATLEELRTSIDAATVPGFRARLLARGLARGMIWREGVLPEEAPNFGLELSDDLLSYGYSLLLHGLRYTDLGGDAATARKAFEVSAEALEAVVERGAAYAERDFHRLVAAAAYHLGRFSARAYSLLFKGLAKTNLSTMEKALAKLMLRDLDGLAEDIGAWFAAGRGSEEALVAALSQSNVQDNGVGAIEEEAHDGRIDVVLIALEDNFMAALATATLALERGDEALLSRARERLQNGIEVAADLELVPAWWIHRLTIHLLGDLWDTSFHKVLPLGGLPGSDVGDWARLRKLFIASLYRRSKAEIELWPSQLQAARRVLDTGVNLVLSLPTSAGKTRIAELCILASLARGKRIVFVTPLRALSAQTEAGLRRTFAPLGKTVSSLYGSIGVSGADVDALRSTDIVVATPEKLDFALRSDSTLLDDVGLVVLDEGHMIGLGEREVRYEAQIQRLLRRSDAAERRIVCLSAILPDGNQLEDFAAWLTCDQADGLIKDDWRPTRLRFGEVEWKGQHAQLSVSVGDEKPFIPKFIVAKKPSRGRARKLFPSDQAELCIATAWRLVEEGQTVLVFCPMRRSVLPLAATIIEMHKRGHIDSVLEQPVSALTTALAVGAEWFGHDHDLLACLRLGVAVHHGALPTPYRKEIERLLREGVLRVTVSSPTLAQGLNLAATSLIFRGVRRGRDLLDISEFRNVVGRAGRAYIDVEGLVLYPMFDRHRQRRTDWQDLIANQGGREMESGLLRLIVALLSRMAKQIGTSDMGKLLEYVAGQAVWEFSAIASETAEEATEERQRWDRHLASLDTAIFSLLGESVVSYMEVGAKLDEMLVASLFQRRLVRYSEDVRKLLPAGLHSRAKYIWNNTTTTQRRGYFLAGVGFTAGQALDEHASELEHLLLAANVNVDLNDEDEAITAITAFAKIVFDIAPFKPERLVANWQSLLRRWLLGQSVVDASSKDNDEDIQFIEQAFVYNLPWAMEAVRVRAEAHEDISSDEVKLSEYPRANAVAAVETGTLSVAAATLIKAGFGSRLGAIQAITSTGASFDSMRGLMAWLASEDVVNLSAALDWPTPESHALWAAFNGPDGVETTQTWDATEYRSNIKWHGVPMPPGTPLRIGGGPGRECSVFTADFQEIGMLRWTPSSKGLIVATATANAAKFDLEYLGPGKVTRK

SEQ ID NO: 52880 - protein, 259 aa, Pseudomonas aeruginosa
MVQFNDWCDSADTPLGNHHVRVMTGRPADAATGIQVTATAVPAHYAAEERIAAALARLGKVAAAQMITNLLPQTPQIRSGDLGEIYATEWIDAHSGYRAPIKRLRWKDHRNMAMRGDDVIGMLLDPATQRLRFLKTEAKSRIDLRAQTLEEARTGLDKDGGLPSSHALSFISARLMELGTDAPLVDAIDEALYRHGIPPESVKHLLFTFSGNSPQALLTQALQAYPGSFEQLGIGLHVDGHAAFVGAVYDRVIADANHP

SEQ ID NO: 52881 - protein, 1173 aa, Pseudomonas aeruginosa
MPTTPDAITAAITDAATAGFRGRLIARGQARAMIWRDGVLPPGAPAFSPQLSFDLHSYAYGLLGLGLRLLELDGDPNQARIAFEQAATALEAVMAKGNRDEADRDFHFVMAAASYHLAHLSARAYSLLAIVAAEENFSPIEQALALLMRRDVNELRARVYAFRLDGRGSDATIAALFQQRLVEPVAADAPERDGQDFLFEGLDLALTDAFFGAFATFLLALDRGERALVDRAIAQLRENLDICAELNLLPQWWVHRVAIHLLSDLWSNTFHEKVPLLPAGGAAASWPGLRELFIALLARRPRAEVDLWPSQTEAASRAVDQTDNLVVSLPTSAGKTRIAELSILRCLAGGQRVMFVTPLRALSAQTETTLQRTFGPLGKTISALYGSIGVSGFDEDAIRERDIVVATPEKLDFALRNDPSLLDDVGLLVFDEGHMIGPGEREVRYEVQIQRLLRRQDAGQRRIVCLSAILPDGDQLEDFSAWLRRDQPGGPIKNDWRPTRLRFGEVTWNSPTARLNLRVGDERPFVPRFLTGAAPPLFVPPKKLRTRLFPDSQQELSLATAWRLVSDGQTVLIYCPERRSVEPFAKVVVDLHSRGALASLLTVDPATLQTAIALGEEWLGPDSDILKCLRLGVALHHGALPTAYRKEVERLLRDSVLKVTISSPTLAQGLNLSATAVVMHSLYRHGEKIKVSEFKNVIGRAGRAYVDVEGLVLFPIFQDSRNKKHDEWVALIEDLGAREMESGLIQLILSLLMRMHARLGGNLDQLMDYVVNNAAAWTFPEVAGEKADKRERALKEWERHMATLDTAILSLIGEADVPDDQIEAALDNILQSSLWQRRLLHVDDASRAAYRATLLTRSRYIWANSTAATRRGYFLAGLGLEAGHALDAIAAEANDLLIQANAALAASDHEAAIAAITGIAERVFAFYPFEPDPFPANWRDILRCWLLGQPLAAIVAGQEAEALPFIEGGLVYRLPWAMEALRVRAAANGDVVGMFALALDDYELGLAVPAVETGTMNRSASILIQAGFNSRLAAIKAVTDTAATFTTGAELRAWLRSPGLAVWSAQPNWPTAETRAIWLEFIQEFAPSDNRTWARWDYLGNVQWFAAPAPPGTPVSLFHRNGQPLVLAPDGHAIGLLQHPLNPNRRGLVRATVALNSGQLDLSYLGPDDLWEG

SEQ ID NO: 52882 - protein, 259 aa, Pseudomonas aeruginosa
MVQFNDWCDSADTPLGNHHVRVMTGRPADAATGIQVTATAVPAHYAAEERIAAALARLGKVAAAQMITNLLPQTPQIRSGDLGEIYATEWIDAHSGYRAPIKRLRWKDHRNMAMRGDDVIGMLLDPATQRLRFLKTEAKSRIDLRAQTLEEARTGLDKDGGLPSSHALSFISARLMELGTDAPLVDAIDEALYRHGIPPESVKHLLFTFSGNSPQALLTQALQAYPGSFEQLGVGLHVDGHAAFVGAVYDRVIADANHP

SEQ ID NO: 52883 - protein, 1173 aa, Pseudomonas aeruginosa
MPTTPDAITAAITDAATAGFRGRLIARGQARAMIWRDGVLPPGAPAFSPQLSFDLHSYAYGLLGLGLRLLELDGDPNQARIAFEQAATALEAVMAKGNRDEADRDFHFVMAAASYHLAHLSARAYSLLAIVAAEENFSPIEQALALLMRRDVNELRARVYAFRLDGRGSDATIAALFQQRLVEPVAADAPERDGQDFLFEGLDLALTDAFFGAFATFLLALDRGERALVDRAIAQLRENLDICAELNLLPQWWVHRVAIHLLSDLWSNTFHEKVPLLPAGGAAASWPGLRELFIALLARRPRAEVDLWPSQTEAASRAVDQTDNLVVSLPTSAGKTRIAELSILRCLAGGQRVMFVTPLRALSAQTETTLQRTFGPLGKTISALYGSIGVSGFDEDAIRERDIVVATPEKLDFALRNDPSLLDDVGLLVFDEGHMIGPGEREVRYEVQIQRLLRRQDAGHRRIVCLSAILPDGDQLEDFSAWLRRDQPGGPIKNDWRPTRLRFGEVTWNSPTARLNLRVGDERPFVPRFLTGAAPPLFVPPKKLRTRLFPDSQQELSLATAWRLVSDGQTVLIYCPERRSVEPFAKVVVDLHSRGALASLLTVDPATLQTAIALGEEWLGPDSDILKCLRLGVALHHGALPTAYRKEVERLLRDSVLKVTISSPTLAQGLNLSATAVVMHSLYRHGEKIKVSEFKNVIGRAGRAYVDVEGLVLFPIFQDSRNKKHNEWVELIEDLGAREMESGLIQLILSLLMRMHARLGGNLDQLMDYVVNNAAAWTFPEVAGEKADKRERALKEWERHMATLDTAILSLIGEADVQDDQIEAALDNILQSSLWQRRLLHVDDASRAAYRATLLTRSRYIWANSTAATRRGYFLAGLGLEAGHALDAIAAAANDLLVQANAALAASDHEAAIAAITGIAERVFAFYPFEPDPFPANWRDILRCWLLGQPLAAIVAGQEAEALQFIEGGLVYRLPWAMEALRVRAAANGDVVGTLALALDDYELGLAVPAVETGTMNRSASILIQAGFNSRLAAIKAVTDTAATFTTGAELRAWLRSPGLAVWSAQPNWPTAETRAIWLEFIQEFAPSDNRTWARRDYLGNVQWFAAPAPPGTPVSLFHRNGQPLVLAPDGHAIGLLQHPLNPNRRGLVRATVALNNGQLDLSYLGPDDLWEG

SEQ ID NO: 52884 - protein, 259 aa, Pseudomonas aeruginosa
MVQFNDWCDSADTPLGNHHVRVMTGRPADAAIGIQVTATAVPAHYAAEERIAAALARLGKVAAAQMITNLLPQTPQIRSGDLGEIYATEWIDAHSGYRAPIKRLRWKDHRNMAMRGDDVIGMLLDPATQRLRFLKTEAKSRIALRAQTLEEARTGLDKDGGLPSSHALSFISARLMELGTDAPLVDAIDEALYRHGIPPESVKHLLFTFSGNSPQALLTQALQAYPGSFEQLGVGLHVDGHAAFVGAVYDRVIADANHP

SEQ ID NO: 52885 - protein, 1173 aa, Pseudomonas aeruginosa
MPTTPDAITAAITDAATAGFRGRLIARGQARAMIWRDGVLPPGAPAFSPQLSFDLHSYAYGLLGLGLRLLELDGDPNQARIAFEQAATALEAVMAKGNRDEADRDFHFVMAAASYHLAHLSARAYSLLAIVAAEENFSPIEQALALLMRRDVNELRARVCAFRLDGRGSDATIAALFQQRLVEPVAADAPERDGQDFLFEGLDLALTDAFFGAFATFLLALDRGERALVDRAIAQLRENLDICAELNLLPQWWVHRVAIHLLSDLWSNTFHEKVPLLPAGGAAASWPGLRELFIALLARRPRAEVDLWPSQTEAASRAVDQTDNLVVSLPTSAGKTRIAELSILRCLAGGQRVMFVTPLRALSAQTETTLQRTFGPLGKTISALYGSIGVSGFDEDAIRERDIVVATPEKLDFALRNDPSLLDDVGLLVFDEGHMIGPGEREVRYEVQIQRLLRRQDAGHRRIVCLSAILPDGDQLEDFSAWLRRDQPGGPIKNDWRPTRLRFGEVTWNSPTARLNLRVGDERPFVPRFLTGAAPPLFVPPKKLRTRLFPDSQQELSLATAWRLVSDGQTVLIYCPERRSVEPFAKVVVDLHSRGALASLLTVDPATLQTAIALGEEWLGPDSDILKCLRLGVALHHGALPTAYRKEVERLLRDSVLKVTISSPTLAQGLNLSATAVVMHSLYRHGEKIKVSEFKNVIGRAGRAYVDVEGLVLFPIFQDSRNKKHNEWVELIEDLGAREMESGLIQLILSLLMRMHARLGGNLDQLMDYVVNNAAAWTFPEVAGEKADKRERALKEWERHMATLDTAILSLIGEADVPDDQIEAALDNILQSSLWQRRLLHVDDASRAAYRATLLTRSRYIWANSTAATRRGYFLAGLGLEAGHALDAIATAANDLLVQANAALAASDHEAAIAAITGIAERVFAFYPFEPDPFPANWRDILRCWLLGQPLAAIVAGQEAEALQFIEGGLVYRLPWAMEALRVRAAANGDVVGMLALALDDYELGLAVPAVETGTMNRSASILIQAGFNSRLAAIKAVTDTAATFTTGAELRAWLRSPGLAVWSAQPNWPTAETRAIWLEFIQEFAPSDNRTWARRDYLGNVQWFAAPAPPGTPVSLFHRNGQPLVLAPDGHAIGLLQHPLNPNRRGLVRATVALNNGQLDLSYLGPDDLWEG

SEQ ID NO: 52886 - protein, 259 aa, Pseudomonas aeruginosa; identical to SEQ ID NO: 52882

SEQ ID NO: 52887 - protein, 1173 aa, Pseudomonas aeruginosa; identical to SEQ ID NO: 52883

SEQ ID NO: 52888 - protein, 260 aa, Pseudomonas aeruginosa; identical to SEQ ID NO: 52876

SEQ ID NO: 52889 - protein, 1165 aa, Pseudomonas aeruginosa
METIDELTAFLTTATVDGILGRLLYRGAAWSLMRDEGVLPPNAPPLGATIETDLAEHGFALLRGAMALRVQAGASELTSKAFERAANAFEALVRNGDPEAPDRGFRRTIAAAAYHLAGFSAVAYSLFNETAGDLNTSPGETAIRHLILRDLDQLRGFVREWLGDAAHGDEQIAEALRGEDPDVDEVLSTILNTTICRALAFFDFALETGEPEPIESARALLATAVSLAGNAENVPLWWISNLCHHLIDDLWQHSLHQNLPTEPPEGTEEKYPDLRRLFISSLYARKTSEVELWPSQREAAQRSTDVRDDLVVALPTSAGKTRVAEIATLMTLSSVRRVLIVTPLRALSAQTERSFRKTFAPLGFSVSSLYGASGLSAGDEDALRTREIIIATPEKLDFALRSDPSLIDDVGLIVLDEGHMIGPSEREIRYETLVQRLLRRADAAERRIVCLSAILPSGDELDDLTAWIRSDEPGEPVRSDWRPTRQRFGALTWRGKDALLRLDLDDDGPFLDKFVVEKPALGRETKPYPRKNSHLVLFAAWEFASQGKRTLIFSTQANWVESYGKQVVDLCKRGYLDPLLDDEASIARALEVGKEWLGEDHPAVASLKAGVAIHHGRLPSPFLRELEILLSEGVLKVIVASPTLSQGLNLNAAVLLVPALYRAGEKIKGEEFANVAGRAGRAFVDVEGLIVHIMFDQIDWRKREWRRLVASAKARTLKSGLIQIVTEILERLAREGVLDRADAWEYLANAREAWRSPDEEVQVAERLAAAVEYDADADDADEDDEEEPIDEEPLSQLVERLDATVFGLIEALDADRADLPKLLDEALKGSLWARQIAREGEDVAPLHKKVFEARADLIWKTTTAQARRGHFAMGVGLEAGLTIDAMADELAELLDRADEAALSGDIDELVDALCGLGERLLFMRPFIPDKANALPANWKAILRSWVSGEEVSKIGPQNMRAVEEAFTYRLVWALEAVRTRRMSLGWSPETVAGGAAAAVETGVPRFMMAMLIRAGLPSRRAAMVAIEDAEPVFVTPAEMRAWLESDEITAYTDAGDWPTPDTAALWARFRTEALNDGIQKWSVERYKRLLDIEAAPPAGLYRIVTDEGDGRTWLATPDYQRVAAFKKPAVDPKPSLFSGRLPGKTRLVEALRVGRGKLRWPPADA

SEQ ID NO: 52890 - protein, 260 aa, Pseudomonas aeruginosa; identical to SEQ ID NO: 52876

SEQ ID NO: 52891 - protein, 1165 aa, Pseudomonas aeruginosa; identical to SEQ ID NO: 52877

SEQ ID NO: 52892 - protein, 264 aa, Pseudomonas fluorescens LMG 5329
MDDLGFDFANAVPWFAHEQELPYVLVRMTAQNVALLEAAMAEPLRRCYITDGALAAAVARHGVTPADVLAAKLPDAGATMAGDFGEVLGYFYQSTKEHPDPAIGPKKWRLKQDRTKPAPKSDVVHFIMPNRPAASADDQVLCSEVKVKSTSAASNPIGSAIADCAKDRTSRLASTLVWLRERALFEDLGDVDIPLLNRFINAVDHPPTTQRFRAVAVICESLLTAELPNAPVTASSEYTLVVISVPNLYTTYNAAFEAARATVR

SEQ ID NO: 52893 - protein, 994 aa, Pseudomonas fluorescens LMG 5329
MRASLQTWINDADKARHLGQFSVAALPIELAQISNRSTDYYISLVGELFDGLHSTTVSGDDWAQLGNAFLQFSKDMPAEQIEAMGISKNEAALFSAAAFYFGDFPASACLAMRQSSPPADPLSPWAACYDFLARPETLVSQTAHQVQEHLRTGDLPGLRRIVEASASEADNALQVGPDQWVAAALLSRLLARFDASNTRAVLPDGADAFWTPLINAFIDRKPSTWEFFPSQIQAIDEGLLSTSESYALQMPTGAGKTTLCETLLYWHLKRNPTHVAIMIVPYRSLASELRHSLVRQLNALGIAARCAYGGTIPSGDEVHGLDHINALIATPESLSGVLSADPAFAQRISLVICDEGHLLDSAGRGIGLELLLARMKARLVNPIRFVFMSAIIPNIEEINAWLGGDDDTVIRSTYRPAIAEFSVLRSSGAGVNKSVRLDMHPHAQQRQYSIHGFLDRTNFQYRNPQTRRTNTYTFTSTKTLAVGAARKVLSMGTTAIFAANKRGHQGAIGLAEELIKQLECPLPLPKPVDFADLDVIRSRIEYLETEFGDSWIGAKALRNGAVLHHGDIPQETREVLEELLRDRKIQLVICTSTLAEGVNLPIRSLVLYSVQRRVGSGQPENMLARDIKNLVGRAGRAGANTKGLVMCANPDQWWIVQPVATAGAGELVRGSLRKLIVALEEHLRTTGIVLSNEFLEAQSASHSLIDGVDATLIELMAEEIGDADFVRLAADLSDHTFAAQQLPAAAVVTLRTVFELRAQRLIGLRVDGKIAWLQDTGAKVRLLDFVEQTLLPSRVNWTAAVDPVADELLTAILEWAWQDRELKSDVRVAFRLEDSQNTEHAKSRFFEIVRKWVHGATFAEIAGSTRMEVDDVLGIHTRAVTYSLQTLVEQGISLLARLLLERGIEVNEGVTALVEHLKFGTPSRIGVLLANGGVRHRKAFVELGNAMQALTTPITAANARTFARRSLEAHSGAWRDALGEFVFSNTLTDVGRVG

SEQ ID NO: 52894 - protein, 256 aa, Pseudomonas fluorescens
MVQFNDWCDSTDTPVGNHYLRVIRGRAADAATAIQLSAAAIPSHYAAEDRIAHALARLGKAGAAQLITGLLPQTPQIRSGDLGEIYATEWINAHSGYHSPVKRLRWKDHRNMAMRGDDVIGMHLDPVTQRLKFLKTEAKSRIDLRARTLTEARAGLDKDEGRPSPHALSFIAARLLDLANLPLVDAIDDALVRHGIPLENVRHLLFTFSGNAPGALLNQSLQAYPGTIEQWGVGLHVDGHAAFILAIYDRVIADAN

SEQ ID NO: 52895 - protein, 1171 aa, Pseudomonas fluorescens
MPTNPDAIIAAIEAASATGFRGRLIAQGQARAIIWRDGILPDGAPAFAPQLSFELHSYAYGLLGLGLRLLEMNGDPTKARIAFAQAATALESVMAKGNRGEADRDFHFVMAAASYHLAHFSARAYSLLAIVANEHNFSPLEQALALLMRRDITELRTHVYAYRLNGHGSDDRITALIRERMVEGVPDAERDGHDYLFEVLDLALTDNFFGAFAIFLLALDRGEKPLVDLAVMRLRQNLAICAELNLLPQWWAHRIAIHLLPDLWSNTFHEKLPLLPAGGAAPAWSDLRKCFIASLGNRAKAEIDLWPSQIEAAGRASDQTDHLVVSLPTSAGKTRIAEICILRCLAAEKRVVFVTPLRALSAQTETTLLRTFGPLGKTISALYGSVGMSDFDEDAIRERNIVVTTPEKIDFALRNDPALLDDVGLLIFDEGHMIGPGEREVRYEVQIQRLLRRLDADQRRIVCLSAILPDGEQLEDFSAWLRHDQQGGPIKHDWRPTRLRYGEVVWNRPVARLNLRVGDERPFVPSYITGTVPQTFVPPKRRRTRTFPDNQQELSLATAWRLVDDGHTVLIYCPERRSVEPFAKVIVDLHERGALRSLLAVGPAALQTALVLGAEWLGADCDILKCLRLGVALHHGALPAAYRKEVERLLRAGILKVTISSPTLAQGLNLSATAIIMHSLYRHGEKIKVSEFKNIIGRAGRAYIDIEGLILFPIFEDQRRRKHNEWVELIENQGAREMESGLVQLLSLLLLRMHKRTGGDLNQLTEFVVNNAAGWAFPEVAGEELADQNRARKDWERHLATLDTAVLSLIGDTDVPDAGIEAALDAILQSSLWQRRLLRVDEPSRTVLKLALLVRSRHIWAHSTTSTRRGYYLAGLGLEAGQSLDAVAVEANALLVQANGALLANDAEAAIQAITGIAERVFTFYPFAPDPFPGNWREILRAWLLGQPLGPLVIGHESDVLQFIEGGLVYRLPWAMEALRVRAVANGDVVGEFDLALDDFELGLAMPAVETGTMNRCASMLMQAGFNSRLAAIKAVNDTGATFTTGNELRAWLRSPVVAASAANPDWPTPETRAIWLDFAEECAPRINRIWTERRYTANVHWSAAPLPPGSPVSLYNWDGQPLVLSSDGLSLGVLAHRLNPSRSGVVRATVMPQAGQIDICYLGPDDLWLD

SEQ ID NO: 52896 - protein, 264 aa, Pseudomonas marginalis ICMP 9505
MDDLGFDFANAVPWFAHEQELPYVLVRMTAQSVALLEAAMAEPLRRCYITDGALAAAVARHGVTPADVLAAKLPDAGSTMAGDFGEVLGYFYQSTKEHPDPAIGPKKWRLKQDRTKPAPKSDVVHFIMPNRPAASADDQVLCSEVKVKSTSAASNPIGSAIADCAKDRTSRLASTLVWLRERALFEDLGDVDIPLLNRFINAVDHPPTTQRFRAVAVICESLLTAELPNAPVTASSEYTLVVISVPNLYTAYNAAFEAARATVR

SEQ ID NO: 52897 - protein, 994 aa, Pseudomonas marginalis ICMP 9505
MRASLQTWINDADRARHLGQFSVAALPIELAQISNRSTDYYISLVGELFDGLHSTTFSGDDWAQLGNAFLQFSKDMPAEQIEAMGISKNEAALFAAAAFYFGDFPASACLAMRQSSPPADPLSPWAACYDFLARPETLVSQTAHQVQEHLRTGDLPGLRRIVEASTGEADNALLVGPDQWVAAALLSRLLARFDASNTRAVLPDGADAFWTPLINAFIDRKPSTWEFFPSQIQAIDEGLLSTSESYALQMPTGAGKTTLCETLLYWHVKRNPTHVAIMIVPYRSLASELRHSLVRQLNALGIAARCAYGGTIPSGDEVHGLDHINALIATPESLSGILSADPAFAQRISLVICDEGHLLDSAGRGIGLELLLARMKARLVNPIRFVFMSAIIPNIEEINAWLGGDDDTVIRSTYRPAIAEFSVLRSSGAGVDKSVRLDMHPHTQQRQYSIHGFLDRSNFQYRNPQTRRTNTYTFTSTKTLAVGAARKVLSMGTTAIFAANKRGHQGAIGLAEELIKQLECPLPLPKPVDFADLDVLRSRIEYLETEFGDSWIGAKALRNGAVLHHGDIPQETREVLEELLRDRKIQLVICTSTLAEGVNLPIRSLVLYSVQRRVGSGQPENMLARDIKNLVGRAGRAGANTKGLVMCANPDQWWIVQPVATAGAGELVRGSLRKLIVALEEHLRTTGIVLSNQFLEAQSASHSLIDGVDATLIELMAEEIGDAEFVRLAADLSDHTFAAQQLPAAAVVTLRTVFELRAQRLIGLRADGKIAWLQDTGAKVRLLDFVEQTLLPSRVDWTAAVDPVADELLTAILEWAWQDRELKSDVRVAFRLEDSQNTEHAKPRFFEIVRQWVQGATFAEIAESTRMEVDDVLGIYTRAVTYSLQTLVEQGISLLARLLLERGIEVNEGVTAFVEHLKFGAPSRIGVLLANGGVRHRKAFVELGNAMQALTTPITAANARTFARRSLETHSGAWRDALGEFVLSNTLTDVGRVG

SEQ ID NO: 52898 - protein, 270 aa, Pseudomonas putida TRO1
MKPSHIDWLSDTGERKTTTCGRNIEIWALDPEDDAAVLSAWAKYFRQHYITDADLPLMVDGTGLNKADYLRTILLPDAKTTPGPSLRSGDFGEILVADYIEFVLGYWCPRELRYQDRWNRNDSTKGCDVIGFRVAIDGQASPMDELFIFESKSGMTKTDAHRLQDAIDDSIKDKLREGMSLNAIKRRFIDRGALAEADRVKRFQNQADRPFRRINGAAAILDDDVFAQTDLTAADASAHPNAGNLRLIVIRGPSLMKLVHALYEKAADEA

SEQ ID NO: 52899 - protein, 1040 aa, Pseudomonas putida TRO1
MKPEASALNILSTTRARAKLHEFRVAPEDFNALPRDPAILFALAIGILGDVAATIADGIGAEVGAELGELQVPVGWNEGDADPQAALGFSSVFFDAFLNAQLDTELTSEFSLLCAAAYYVAGNVGSATVIVRRMEPPDTEIAGGLGYLAYSILRNDFVAIEVPHTHRAVTSRLLEALGRYFRFEGDIGAVVEACNEMRGYFYSAGSPRELLYADIVVAVCTLKLRNAARTKLPLASGLESELWRPALSKPHFPIELWPAQQRIADAGVLSGRSVVIQMPTSAGKTRATELIIRSAFLSRRANLAIIVAPYRSLCHDIRSDLVAAFSGENIRLDEVSDSYQFDLVLEALIADDSLLIVTPEKLLYMLRRAPDLAERIGLVIYDEGHQFDSITRGPTYELLLTSLRMALPVAAQIVLISAVIGNAADVAAWLIGDAQAVIGGDGLLPTTKSIAFASWQDQRGRLEYVKPQDPAEREFFVPRVIADTVLPLRGRESAVRRFPEKNGGDVGLFLGLHVVRNGSVAIFCGRKDSVTKICSRAVEILERGLDVEWPIASSDAMEVHKIRALCELELGAGASATQAAALGIFAHHADTPHGIRLAIEHAMKEGLARFVVCTSTLAQGVNFPLKYLIVTSTRQGGEPILVRDFHNLMGRAGRAGMHTEGSVIFSTPTIYDQRKQFRGRWTWDRAVELLDAKNSEPTRSSILALFDPYEQRTPTIVQEIPLAWLDLAFADATKFDEIVAFARAVQPAINEREFRRFIEGRARAVQHIASFLIANMSFADGEDAVMRIGELVANTLAYHLADEEIRPRLIALFRSIGQSIAVNTDDGMRALIRRSPLPPAAVVELQAWVDANIEVLRDAATEDRLFDEIAPIALRFATSRAIHTISVQDVIPRTLREWVSGRSYATIFETLHKAGARAGRDRVTVEDAVSLCESGFGYDVAMVVASLADLTEGLDEGLHSAATLLQKQIKYGLSEKSAIAFHEAGFADRYVASGLGLRWGQAIDRAGVRAACQQEDLMRAALAHVPSYFIAVAAEHGGWV

SEQ ID NO: 52900 - protein, 268 aa, Pseudomonas stutzeri NF13
MSLTHIGWLKSDGQFTSACGRSVPIFELCHDTADQAKMSDWAGHFRRHYCSDEDLNYIKPSHVSTYDYLVTIKFPSKTQKPGPSVRSGDFAEILVADYMQYMRGYDVPRTRWDRKIVANESAKGSDVVGFKWSNASPSANDHLLVYEIKAVTSEKGKSNVLQKAVDDSAKDDIRLAETLNAMRQRLGDKKDKQGLATVARFQNYSDHPYVKGYGAAAVVSTSSFNLAALATTTLAAHPCKDKVEMLVIRGNSLIPLIDALYERGANEA

SEQ ID NO: 52901 - protein, 1031 aa, Pseudomonas stutzeri NF13
MKLEARSKRLLGLSKSTAKLKELNISTELHPPLADDPFALLVLTIGILGQLAALTAKNEDFEQLASLKGQLVDVAQYFDSLDGAGLLDESSIYLRVLGAAAYYLADMPGSSSVLAKEIPYEYELSPHRLEGVLIWILKSDYRHDWYKQNDSYFDGAATKLVNSFYSFYEGSVTNIEVNSAALELRDLVYRAGSDRDLLFVDVICALVRVKISNSSRICLPLYSELSFDVWRDIIARANFMKELWPAQRLMGEEGILKGVSAVVQMPTSAGKSRAMELIVRSALLSGRAKLIVVVAPFRALCAEISESFKGAFAPDGVIINDLPDLNQITALDSEFLRFLLGDKHRERSKGNVLITTPEKLAYLLRHEDELATNIDLLLFDEGHQFDTGKRGVTYELLISYLRDKVSPNAQKVMISAVMANAKSIGDWLNFESGIEIQGTKLLPTVRAIGFATWPDARSGGGVQFFDQEILDVNQYYVPSLLEPLEIKKGKGKFRKYPDRLNSREVASYLAVKFCEFGGAAIFCGTKVIVRSVCKDLVAIFDKGTDLPLPASVGDPEEIVRLHYLASLHMGDCDYAKAIKIGVMPHSSNIPAGLRSSVEWALSNRKASLVVCTSTLAQGVNLPIRYLLITSTFQAGNAISTRDFQNLIGRAGRSGYYTEGNIIFTDPQLFDNRRSRAGLKKWGKVKELLNFDSAEDCLSSLKGLIEELPNPGSSINVMDFLANPRYWLQLATKLRAEEKDKYRKRDFDSLIFEMNSREDRLRALESYIIAYVGDNPDASAADIEALAKETLAYSLSTEDEQNSIITLFVHIFDKMKALDVELYKGYGRSLLGIDQLMLVEQWLDQNQFDLGISDSCEDALQVIWSLVLQLSNGSIGHKIMPENISLGIVLKWITGQSYREIQEYVKSSNGYYQAGKQERTVTIDNIIEFCDKFLGYEAMLYVGGVADILDAKGILEDCAGHLRLLQSRLKYGLSSELEVGLYAGSYPDREVAKMIAAELHKAGLVDFNQDSINNNRHLIASVLTRFPSFFSR

SEQ ID NO: 52902 - protein, 260 aa, Pseudomonas stutzeri
MGLYERWCESTKKKDKRKHYWTYVEKEGGRDEIREELAETIRSHYDRLERIADDVERLGYKVAAKILSEAMPQTDKGRSGDLGEILATELVEEEIGLRVPVRRLRYKDGRNMAMRGDDFIGAGYDGNGEKLWLLKGEAKSNKKLGKSTVTSARKVLDRDNGRCTPDSLLFVANRLLESNDPDENALGRDLRDEVGLKSLRADRIDHMLFTVSGNGPHASLKDDLDAAGTNRDHYVVNIHVEDHQDFIAAMYQEAEDLGDA

SEQ ID NO: 52903 - protein, 1166 aa, Pseudomonas stutzeri
METPDELTAFLTDATVDGILGRLLYRGAAWSLMREAGVLPQNAPPLGPTIETDLAEHGFALLRGAMALRAKTGASDLTSKAFERAANAFEALVRNGDPEAPDRGFRRTIAASAYHLAGFSAVAYSLFNETAENLNTAPGETAIRHLILRDLDQLRGFVRDWLGNEAHGDEQLAKALGGDESDIDEVLSTILNTTICRALAFFDFALETGEDEPIESARSLLATAVSLADNAENIPLWWISNLCRHLIDDLWQHSLHQNLPTEPPEGTEETYPDLRRLFISSLYARKTSEVELWPSQREATKRSTDVADDLVVALPTSAGKTRVAEIATLMTLSLARRVLIVTPLRALSAQTERSFRKTFAPLGFSVSSLYGASGLSAGDEDALRTREIVIATPEKLDFALRSDPSLIDNVGLIVLDEGHMIGPSEREIRYETLVQRLLRRTDAADRRIVCLSAILPSGDELDDLTAWIRSDEPGAPVRSDWRPTRQRFGALTWRGKDALLRLDLDDDGPFLEKFVVEKAALGKEKKPYPRKNSHLALFAAWEFASQGKRTLIFSTQANWVESYGKQVVDLCKRGYLESLLEDEALVARALEVGKEWLGEDHPAVASLKAGVAIHHGRLPSPFLRELEVLLSEGVLKVIVASPTLSQGLNLNAAVLLVPALYRAAEKIKGEEFANVAGRAGRAFVDVEGLIVHVMFDKINWRKKEWGEIVASAKARTLKSGLIQIVAEILERLSREGVLGRDDAWEYLANSREAWRSPEEEAAVAERLATAVEYEGDDDDDEGGDDDEESIDEEPLSQLVERLDATVFGLIEALDADRADLPKLLDEALKGSLWARQIAREEEDIAPLHKKVFEARADLIWKTTTTQARRGHFAMGVGLEAGLSIDAMADELAELLDRADDAALSGDVDELADALGGLGERLLFMRPFIPDKANALPANWKVILRSWVSGEEVAKIGPQNMRAVEEAFTYRLVWALEAVRTRRMSLGWSPDTVAGGAAAALETGVPQFMMAMLIRAGLPSRRAAMAAIKDAMPVFVTPAEMRAWLESDEITAYTDAGDWPTPDAAALWARFRTEALSGGIQKWSVERYKRLLDIEAVPPAGLYRIVTDEGDGRTWLATPDYQRVASFKKPAVDPKPSLFSGRLPGNTRLVEALRVGRGKLRWPPADA

SEQ ID NO: 52904 - protein, 264 aa, Pseudomonas syringae pv. syringae B64; identical to SEQ ID NO: 52892

SEQ ID NO: 52905 - protein, 994 aa, Pseudomonas syringae pv. syringae B64
MRASLQTWINDADKARHLGQFSVAALPIELAQISNRSTDYYISLVGELFDGLHSTTVSGDDWAQLGNAFLQFSKDMPAEQIEAMGISKNEAALFSAAAFYFGDFPASACLAMRQSSPPADPLSPWAACYDFLARPETLVSQTAHQVQEHLRTGDLPGLRRIVEASASKADNALQVGPDQWVAAALLSRLLARFDASNTRAVLPDGADAFWTPLINAFIDRKPSTWEFFPSQIQAIDEGLLSTSESYALQMPTGAGKTTLCETLLYWHLKRNPTHVAIMIVPYRSLASELRHSLVRQLNALGIAARCAYGGTIPSGDEVHGLDHINALIATPESLSGVLSADPAFAQRISLVICDEGHLLDSAGRGIGLELLLARMKARLVNPIRFVFMSAIIPNIEEINAWLGGDDDTVIRSTYRPAIAEFSVLRSSGAGVNKSVRLDMHPHTQQRQYSIHGFLDRSNFQYRNPQTRRTNTYTFTSTKTLAVGAARKVLSMGTTAIFAANKRGHQGAIGLAEELIKQLECPLPLPKPVDFADLDVLRSRIEYLETEFGDSWIGAKALRNGAVLHHGDIPQETREVLEELLRDRKIQLVICTSTLAEGVNLPIRSLVLYSVQRRVGSGQPENMLARDIKNLVGRAGRAGANTKGLVMCANPDQWWIVQPVATAGAGELVRGSLRKLIVALEEHLRTTGIVLSNEFLEAQSASHSLIDGVDATLIELMAEEIGDADFVRLAADLSDHTFAAQQLPAAAVVTLRTVFELRAQRLIGLRVDGKIAWLQDTGAKVRLLDFVEQTLLPSRVNWTAAVDPVADELLTAILEWAWQDRELKSDVRVAFRLEDSQNTEHAKSRFFEIVRKWVHGATFAEIAGSTRMEVDDVLGIHTRAVTYSLQTLVEQGISLLARLLLERGIEVNEGVTALVEHLKFGTPSRIGVLLANGGVRHRKAFVELGNAMQALTTPITAANARTFARRSLEAHSGAWRDALGEFVFSNTLTDVGRVG

SEQ ID NO: 52906 - protein, 271 aa, Pseudomonas syringae pv. actinidiae ICMP 19098
MPWSGEHLKWLINTNKKITTACGKKVDVYKFNYDLMDEPTMSAWARHFRNHYCDDSTIDMIKSPDLSRSEYLLTLKFPSGKKKPGPSIRAGDFAEILVADYLHFLRSFYIPKTRYDRKIIANESSKGSDIIGFKQKVSTHERDDELIIFEVKAKASKSKPVNLLQVAINHSIKDEARIADSLNAIKQRLIDRQNYDEAAIVTRFQLGTDRPYKRIYGAGAVITSDSYDPSLISLSDSSEHPGKDGLELLVISGPTLMALVHALYKRASDEA

SEQ ID NO: 52907 - protein, 1041 aa, Pseudomonas syringae pv. actinidiae ICMP 19098
MKLESKSNTLLAITKSKAKLYEFGVEEQYHIELPISPSNLLITTIGIIGELCASEARLSDDNADNIEELKNQLVTVGQYFDALNQSRTASGIQNYLLLLGSTAYYLGGMPGSSHVLSKGLEYNIVNITPSYIEGILIWLLKSDIKHVWYRHTDAYLADEADAFVRAYVSFFEREETQDEFKHACQKLRSVVYQSGSDRELILVDATIAVALNKIRNSCLICLENYSGLSLESWTDALEKEGFIKEFWPAQHLIGESGVLKGVSAVIQMPTSAGKTKSTELIIRSAFVSGRADTAFVIAPFRALCREITSNFKGAFEGEDISVNELQDTTELNSEEQEFLNFLLGVSHAKSVKNIVITTPEKLVYTLRHEPSLAKKIGLLVFDEGHQFDTGKRGVTYELLLTHLKTTVAENTQKVLISAVMANAETIGDWLNGGEGVHIQGSSCLPTLKSVAFVSWTAKLGQLHYLNPDNKGDSGYFVPRMIKELPLKNTPRETKIRVFPERAKTSSVSAYLGLRLCHQGPVALFCGTRKTVNSICEILIDAYKRELKLSFPKDSSDEVELEKIAFLASLHFGEDAVFSRAIKLGILPHSSNIPNGIRVSVEWAMEKGRACLVVCTSTLAQGVNLPIKYLVVSSLNQGAQDITTRDFQNLIGRAGRSGHHTEGSIIFADSKIYDKRFNFKENWRWHRAIHLLSFTNAESCLSSLKGLIAKFDFDYASLKDTFQFIETPVEHRNSWIDWSKKNGIDIISLLDEMSRKLDLINSVESFFLSYLKENPETADRKTLVSLIEDTLAFHLASDDEQAALIEAFRIISDRVFSVPKEKHSYYGRTLLGVGQLVVIERWIDENLFDLELCTSSQDILNACWPLIVNLCDKKLFNSLTPQNLLPSFAQSWIEGKKFVDIFKEMKKAGLKYQAPILKMSLTMDHIVEFTTGILAYDAMLFVGAIADILEGRQLDQDAATYTRLLQNQLKLGLNSELEIWLHRKGYVDREVCKTLASVLLKKQKYETVFEFSILEDNFELVQETLVKYPTYFLEAYKPRHLT

SEQ ID NO: 52908 - protein, 277 aa, Pseudomonas syringae pv. actinidiae ICMP 19096
MEKDVSMPWSGEHLKWLINTNKKITTACGKKVDVYKFNYDLMDEPTMSAWARHFRNHYCDDSTIDMIKSPDLSRSEYLLTLKFPSGKKKPGPSIRAGDFAEILVADYLHFLRSFYIPKTRYDRKIIANESSKGSDIIGFKQKVSTHERDDELIIFEVKAKASKSKPVNLLQVAINHSIKDEARIADSLNAIKQRLIDRQNYDEAAIVTRFQLGTDRPYKRIYGAGAVITSDSYDPSLISLSDSSEHPGKDGLELLVISGPTLMALVHALYKRASDEA

SEQ ID NO: 52909 - protein, 1041 aa, Pseudomonas syringae pv. actinidiae ICMP 19096; identical to SEQ ID NO: 52907

SEQ ID NO: 52910 - protein, 271 aa, Pseudomonas syringae pv. actinidiae ICMP 19094; identical to SEQ ID NO: 52906

SEQ ID NO: 52911 - protein, 1041 aa, Pseudomonas syringae pv. actinidiae ICMP 19094; identical to SEQ ID NO: 52907

SEQ ID NO: 52912 - protein, 271 aa, Pseudomonas syringae pv. actinidiae ICMP 19095; identical to SEQ ID NO: 52906

SEQ ID NO: 52913 - protein, 1041 aa, Pseudomonas syringae pv. actinidiae ICMP 19095; identical to SEQ ID NO: 52907

SEQ ID NO: 52914 - protein, 271 aa, Pseudomonas syringae pv. actinidiae ICMP 18883; identical to SEQ ID NO: 52906

SEQ ID NO: 52915 - protein, 1041 aa, Pseudomonas syringae pv. actinidiae ICMP 18883; identical to SEQ ID NO: 52907

SEQ ID NO: 52916 - protein, 271 aa, Pseudomonas syringae pv. actinidiae ICMP 19099; identical to SEQ ID NO: 52906

SEQ ID NO: 52917 - protein, 1041 aa, Pseudomonas syringae pv. actinidiae ICMP 19099; identical to SEQ ID NO: 52907

SEQ ID NO: 52918 - protein, 271 aa, Pseudomonas syringae pv. actinidiae ICMP 19100; identical to SEQ ID NO: 52906

SEQ ID NO: 52919 - protein, 1041 aa, Pseudomonas syringae pv. actinidiae ICMP 19100; identical to SEQ ID NO: 52907

SEQ ID NO: 52920 - protein, 271 aa, Pseudomonas syringae pv. actinidiae ICMP 18804; identical to SEQ ID NO: 52906

SEQ ID NO: 52921 - protein, 1041 aa, Pseudomonas syringae pv. actinidiae ICMP 18804; identical to SEQ ID NO: 52907

SEQ ID NO: 52922 - protein, 271 aa, Pseudomonas syringae pv. actinidiae ICMP 19497; identical to SEQ ID NO: 52906

SEQ ID NO: 52923 - protein, 1041 aa, Pseudomonas syringae pv. actinidiae ICMP 19497; identical to SEQ ID NO: 52907

SEQ ID NO: 52924 - protein, 259 aa, Agrobacterium tumefaciens str. Cherry 2E-2-2
MTQFNDWCLSVDEPVGNHFRRVMTGQAASLATGIQATATIVPGHYASEESVARALSRLGKPAAAALIEGKLPTTKNIRSGDLGEIYATEWIDAHSGGYRAPIKRLRWKDHRNMAMRGDDVIGILQDAANQRLLFLKTEAKSRVALTGQVLTEARAGLDKDGGLPSAHALSFISARLLELDNLPLADAIDDALLKHGIPVQNVKHLLFTFSGNAPDALLTASLQAYPGPINQWGVGLRVEGHAAFIGAVYDRVIADANNA

SEQ ID NO: 52925 - protein, 1172 aa, Agrobacterium tumefaciens str. Cherry 2E-2-2
MPTTPEAIAADITEAATAGFRGRLIARGQARAIIWRDGALPPDAPGFAPQLSYDLHSYGYGLLGLGLRLRELGGDAAQARIAFEQAATALEAVIAKGDRLESDRDFHFVMAAASYHLAHLSARAYSLLAIVEADENFAPIERALALLMRRNFSTLRSSVLDYRASGEGSDARITAGIQANLDQAEAAGSPADGSNDFLFDGLDTALTDAFMAAMSLFLLALERGERPLLDQALERLRTSLSICSEMNMLPQWWAHRIALHLLSDLWSSTFHEKVPLQPAGGEAADWPRLRELFIALLQRRSRAEVDLWPSQIEAATRAVDQSDDLMVSLPTSAGKTRIAELCILRCLAGGKRVVFVTPLRALSAQTETTLQRTFGPLGKTISALYGSIGVSGFDEDAIRERDIVVATPEKLDFALRNDPSLLDDVGLLVFDEGHMIGLNEREVRYEVQIQRLLRRPDAHTRRIVCLSAILPDGDQLDDFAGWLRRDHPGGVIKHDWRPTRLRFGEVVWTSPNARLNLRVGEERPWVQRFLTGKTPPSWVPPKRKRTKLFPDDQRELCLATAWRLIEDGQTVLIFCPLRKSVEPFADVIVDLHERGALRTLLESDPAVLSTAIALGEEWLGPNSAILKCLRLGVALHHGALPTAYRKEVERLLRDGILKVTISSPTLAQGLNLSATAVIMHSLHRSGERIDISEFKNVIGRAGRAYVDVEGMVLFPMFDDIAKKRRNWEALIGDLGARNMESGLALLVWTLLSRMHARVGGDLNQVVDYVANNAAAWTFPEIANEKPEDRERALADWERHVATLDTAILSLIGENDIPDEGIEAALDDILQSSLWHRRLLRQNEQVQQVLRAGLVSRSRLIWSQSTAARRRGYFLAGVGLTTGHALDAIAENANLLLIQANAGILEGDAEAAIAAITGLAERVFEFYPFTPDPWPANWRDILRAWLLGQPLAGIAAGQESETLQFIEGGLVYRLPWAMEALRVRAAANGDVVGVFGLGLVDHEVGLAVPAVETGTLNRSASILIQAGFNSRLAAIKAVTDTGAIFQTGSELRLWLTSEAVTAMSTQPDWPTAETKAMWTEFTQSFTPPENRTWADRRYWANVSWLGVPPPPGTPVQLHHWADHPRVLSADGAPLGTVQAALNPARAGLVRAQVAQDVNRIDISYLGPADLSAA

SEQ ID NO: 52926 - protein, 259 aa, Agrobacterium radiobacter DSM 30147
MTQFNDWCLSVDEPVGNHFRRVMTGQAAGLATGIQATAAIVPGHYASEESVARALNRLGKPAAAALIEDKLPTTKNIRSGDLGEIYATEWIDAHSGGYRAPIKRLRWKDHRNMAMRGDDVIGILQDAATERLLFLKTEAKSRVALTGQVLTDARAGLDKDGGLPSAHALSFISARLLELDNLPLADAIDDALLKHGIPVQNVKHLLFTFSGNAPDALLTASLQAYPGPINQWGVGLRVEAHAAFIGAVYDRVIADANNA

SEQ ID NO: 52927 - protein, 1172 aa, Agrobacterium radiobacter DSM 30147
MPTTPEAIAADITEAATAGFRGSLIARGQARAIIWRDGALPPDAPAFASQLSYDLHSYGYGLLGLGLRLRELGGDAAQARTAFEQAATALEAVIAKGDRLEADRDFHFVMAAASYHLAHLSARAYSLLAIVEADENFAPIERALALLMRRNFSTLRISVLDYRASSEGSDARITAGIQAKLDQVEAAGNPADGSNDFLFDGLDTALTDAFMAAMSLFLLALERGERPLLDQALERLRTSLSICSEMNMLPQWWAHRIALHLLSDLWSSTFHEKVPLQPAGGEAADWPRLRELFIALLQRRPRAEVDLWPSQIEATTRAVDQSDDLVVSLPTSAGKTRIAELCILRCLAGGKRVVFVTPLRALSAQTETTLQRTFGPLGKTISALYGSIGVSGFDEDAIRERDIVVATPEKLDFALRNDPSLLDDVGLLVFDEGHMIGLNEREVRYEVQIQRLLRRPDAHTRRIVCLSAILPDGDQLDDFAGWLRRDHPGGVIKHDWRPTRLRFGEVVWTSPNARLNLRVGEERPWVQRFLTGTAPPNWVPPKRKRTKLFPDDQRELCLATAWRLIEDGQTVLIFCPLRKSVEPFADVIVDLHERGALRTLLEADPAILSTAIALGEEWLGPNSAILKCLRLGVALHHGALPTAYRKEVERLLRDGVLKVTISSPTLAQGLNLSATAVIMHSLHRSGERIDISEFKNVIGRAGRAYVDVEGMVLFPMFDDIAKKRRNWEALIGDLGARNMESGLALLVWTLLSRMHARIGGDLNQVVDYVANNAAAWTFPEIANEKPEDRERALADWERHVATLDTAILSLIGEIDIPDDGIEAALDDILQSSLWHRRLLRQNEQVQQVLKAGLVSRSRLIWSQSTAARRRGYFLAGVGLTTGHALDAIAEDANLLLIQANAGILEDDADAAIAAITGLAERVFEFYPFTPDPWPANWRDILRAWLLGQPLAGIAAGQESETLQFIEGGLVYRLPWAMEALRVRAAANGDLVGVFSLALEDHEIGLAVPAVETGTLNRSASILIQAGFNSRLAAIKAVTDTGAIFQTGSELRQWLNSEAVTAMSAQPEWPTAETKAMWTEFTQSFTPPENRTWADRRYWANVSWFGVPPPPGTPVQLHHWADHPRVLSADGAQLGTVQAALNPARAGLVRAQVAQDVNRIDISYLGPADLSAA

SEQ ID NO: 52928 - protein, 259 aa, Agrobacterium tumefaciens GW4; identical to SEQ ID NO: 52926

SEQ ID NO: 52929 - protein, 1172 aa, Agrobacterium tumefaciens GW4; identical to SEQ ID NO: 52927

SEQ ID NO: 52930 - protein, 260 aa, Agrobacterium rhizogenes
MGLYDRWCDATREKDKRKRYWAYIEKDGGRDDIRDDLAETIRSHYDRLERIADDVKRLGYNVAATILSEAMPQTPKGRSGDLGEILATELVEEEIGLRVPVRRLRYKDGRNMAMRGDDFIGAGYDGAGEKLWLLKGEAKSNERLGKATVTSARKVLDRDNGRCTPDSLLFVANRLLDSNDLDDNALGRSLRDEVGLKSLRADRIDHMLFTVSGNGPHASLKDDLQAAGTNRDHYVVNIHVEDHQDFIKAMYQEAEDLGDD

SEQ ID NO: 52931 - protein, 1169 aa, Agrobacterium rhizogenes
METIDELTTFLEAATVDGILGRLLYRGAAWSLMREEGVLPPNAPPLGVTIETDLAEHAFALLRGAMALRAQAGPSELTSKAFERAANAFEALIRNGDPGAADRGFRRMLAAATYHLAGFSAVAYSLFNETAEDLNVSPGEAAIRHLILRDLGEMRAFVRDWLNDAAHGDEQIAEVLRGEEPDIDEVLSTILNTTICRALAHFDFALETGEPEPIEDARALLRTAVSLADNAENVPLWWISNLCLHLIDDLWQHSLHQNLPTEPPDGTEERYPDLRRLFISSLYARKTSEVELWPSQREAARRSTDVTDDLVVALPTSAGKTRVAEIAALMTLSSARRVLIVTPLRALSAQTERSFRKTFAPLGFSVSSLYGASGVSAGDEDALRTREIIIATPEKLDFALRSDPSLIDDVGLIVLDEGHMIGPSEREIRYETLVQRLLRRADAGDRRIVCLSAILPSGDELDDLTAWIRSDEPGGPVRSDWRPTRQRFGALTWRGKDALLRLDLDENGPFLDKFVVEKPPLGREKNSYPRQNSHLTLFAAWEFAGQGKRTLIFSTQANWVESYGKQVVDLCKRGYLQSLLEDEGSIARALEIGKEWLGEEHPAVACLKVGVAIHHGRLPSPFLRELESLLSEGTLKVIIASPTLSQGLNLNAAVLLVPTLYRASEKIQGEEFANVAGRAGRAFVDVEGLIVHVMFDRVDWRKREWRKLVASAKARTLKSGLIQIVAEILERLSREGILDRKDAWEYLANAREAWRSPGEEASLAERLAASRQNDADVTDIDSDDDDAEQEESIEEEPLSQIVERLDATVFGLIEALDSDSADLPKLLDDALKGSLWARQIAREDEDVAPLHKMVLEARARLIWKTTTAPARRGHFAMGVGLEAGLAIDAMADVLAELLDRADGAALAGDIDVLVDALSGLGERLLFMRPFIPSKANALPANWTVILRSWVAGEDVSTIGPQNMRAVEEAFIYRLVWALEAVRTRRMSLGWLPETVAGGAAASVETGVPQLMMSMLIRAGLPSRRAAMEAIEDAKPAFVSPAEMRAWLESDEITAYTDAGNWPTPDTAALWARFRTEALSGGIQKWSVEHYSRLLDIEVAPPAGLYRIVTDEGDGRTWLATPDYRHIAAFRKPAVDPKPSLFSGRLSGDTRLVEALRIGRGKLRWPKADT

SEQ ID NO: 52932 - protein, 260 aa, Sinorhizobium fredii USDA 257
MGLYERWCHAAKEKDKRRHFWIYVEKDGGRDEIRDDLAETIRSHYDRLERIAEDVKRLGYKVAANILREAMPQTPKGRSGDLGEILATELVEEEIGLRVPVRRLRYKDGRNMAMRGDDFIGAGYDGAGEKLWLLKGEAKSNKVLGKATVTSARKVLNRDNGRCTPDSLLFVANRLLESNDPDDNALGRSLRDEVGLKSLRSDRIDHMLFTVSGNGPHASLKEDFDATGTNRDHYVVNIHVEDHQDFIAAMYKEAEDLGDD

SEQ ID NO: 52933 - protein, 1167 aa, Sinorhizobium fredii USDA 257
METIDELTAFLATATVDGVLGRLLYRGAAWSLMREKGVLPPNAPPLGATIETDLAEHGFALLRGAMALRSQADSSELTSKAFERAANAFEALVRNGDPESPDRGFRRTIAAAAYHLAGFSAVAYSLFNETTDDLNTSPGETAIRHLILRDLGQLRGFVRGWLDDEAHGDEQIAEALRDEEPDVDEVLSTILNTTICRALAHFDFALETGEPEPIESARTLLRTAVSLADNAENVPLWWISNLCRHLIDDLWQHSLHQNLPTEPPEGTEEKYPDLRRLFISSLYARKTSEVELWPSQREAARRSTDVTDDLVVALPTSAGKTRVAEIAALMTLSSARRVLIVTPLRALSAQTERSFRKTFAPLGFSVSSLYGASGLSVGDEDALRTREIIIATPEKLDFALRSDPSLIDDVGLIVLDEGHMIGPSEREIRYETLVQRLLRRADAADRRIVCLSAILPSGDELDDLTAWIRSDEPGKPVRSDWRPTRQRFGALTWRGKDALLRLDLDDDGPFLDKFVVEKPARGKEKKPYPRKNSHLALFAAWEFASQGKRTLIFSTQANWVESYGKQAMDLCKRGYLHSLLEDEASIARALEVGKEWLGEDHPAVACLKQGVAIHHGRLPSPFLRELEVLLSEGVLKVIVASPTLSQGLNLNAAVLLVPALYRASEKIKGEEFANVAGRAGRAFVDVEGLIVHVMFDKIDWRKREWRKLVASAKARTLKSGLIQIVAEILERLSREGVLDRDDAWEYLANAREAWRSPEEEAAVAERLAAAVEYEANGDDDEEGGDDEEETIDEEPLSQIVERLDATVFGLIEALDADRADLPKLLDEALKGSLWARQIAREDEDIAPLHKKVFEARADLIWKSTTAQTRRGHFAMGVGLEAGLSIDAMADELATLLDRADEAALRGDIDELVDALCGLGERLLFMRPFIPDKANALPANWKAILHSWVSGEDVAKIGPQNMRAVEEAFTYRLVWALEAVRTRRMSLGWSPETVAGGGAAAVETGVPQFMMAMLIRAGLPSRRAAMAAIKDAQPVFVTPAEMRVWLESDEITAYTDAGDWPTPDTAALWARFRTEALSGGIQKWSVENYKRLLDIAAAPPAGLYRIVTDEGDGRTWLATPDYQRLAPFKKSAVDPKPSLFWGRLPGNTRLVEALRVGRGKLRWPPANE

SEQ ID NO: 52934 - protein, 260 aa, Sinorhizobium fredii HH103; identical to SEQ ID NO: 52932

SEQ ID NO: 52935 - protein, 1167 aa, Sinorhizobium fredii HH103; identical to SEQ ID NO: 52933

SEQ ID NO: 52936 - protein, 258 aa, Neorhizobium galegae bv. orientalis
MPLFDDWCESDHQEDGGKHLRKFTERADGRAAVRDRFPNLLRSHYDDMTRIADDIKELGFPGAAALLAERLPRSPRARSGELGEILATELVEEQLGFSVPIRRLRYKDGREMALRGDDFIGVRVDATGQLFLLKGEAKSRANLAGATISEARSALSRDNGRPTATSLLFIADRLMEREDDGAALGRTIRNEVANRAVPAAHIDHALFAMSGNAAPQALIDDLRAAGPERTHTVVHLRIADHQDFIKLSYEGALALGDN

SEQ ID NO: 52937 - protein, 1133 aa, Neorhizobium galegae bv. orientalis
METIDELTVFVTQTAADGARGRLQARGEARAIIRRDGVLPDDAPAFGNTIDTDLAEYALSLLRASMALREAQGDPEIWRKGFARAGNAFEALVQNGAPEDVTRGFYRIAGAASYHLASYSALAFSLIAQRSDHTNFAPPEEALAFLILRDLNTLGMRARAWLLDPAHSDGNITRSAAEGELDPDDVVRLVVTTTIFRSLAFFEFALQTGVAALVEEARLLLRRAISLAKHANAVSLWWIARIALNLIDDLWASSLHQVLPVDGPAGAEGYQALRKLFIGELYSRRAAEVELWPSQREAAHRATDLTDDLVVALPTSAGKTRIAEIAALMALASGRRVLIVTPLRALSAQTERSFRKTFSSLGFTVSSLYGASGVAIGDEDALRSQDIVIATPEKLDFALRNDPTIIDDVGLVVLDEGHLIGPSEREIRYESLVQRLLRRPDNAGRRIVCLSAILPEGDQLNDLTAWIRSDAPGAPLQSGWRPTRQRFGTLSWQGNSGRLSFDLEAGGPYIRHFIPEQAAIRPRRTRFPRDNKELSLAAAWTFSAQGKRALIFCTQRDHVEGYAETIVDLNRRGYLPSLLEDAALVERALAVGREWLGPNHPAVQCLPIGVAIHHGRLPGPFLREVEALLSVGVLRVTVASPTLAQGLNLNAAVLLIPTLYRAGVPLSGEEFANVAGRAGRAFVDLEGLVLHVMHQPENWRLRAWRDLVGSSRARSLTSGIISIISEVITRLARTNVFLRADAMEYLANAQEAWFPQDQAGDTDTIESLIERLDATVFGLIEALDTDSADLPRLLDEALTGSLWARQIVRLGAQVRSNQLWVLWARASLIWNKSSATQRRATFAMGVGLEAGLAIDAVAEDLTALLDQADAAALAGNQPVLSTALVGMAERLFAIRPFVPDADLPGNWRDLLTAWLAGTDVIALGLDNMRVVEDAFVYRLVWAIEAVRMRRRANGGESEVIEGSAAATIEAGVPQTMMAMLVRAGLPSRVAAMTAIRETQPAFATRAEMNQWLNSNEIAALSDQPDWPTADTASIWKQFRSETLSGPILKWNAQEWNMQGPVPAFVGPAIPGRISIDAANGAVSVTTPDFKRVTGIQHRLRQLSPSLLHVEYAADGQNSRIVRLGRSDARWEMP

SEQ ID NO: 52938 - protein, 263 aa, Neisseria mucosa ATCC 25996
MKWLIKSNQQLKTSDGKSVDIFEFRHVKDEQILSAWAKHFRNHYCLDSQIDSLRCGTEYSRAEYLNKIKFPDKSIAPGPSIRAGDFAEILAADYLEYILKHWVPRVRYSHKTVSNESTKGSDTIGFMFSSDGNNSKDTLTIIESKAKYTGNHENRLQTAIDHSSKDIIRKAETLNAIKQKFLDKEDIYNSQRIERFQNEADNPYIQNFVAIAHLDNSNFTEDVITSANSSSHSHTDQLFLIVIKGDEMMKLVHELYERAANEA

SEQ ID NO: 52939 - protein, 1056 aa, Neisseria mucosa ATCC 25996
MKELQMKPENKSYNLLNVTRAKAKMFEYHVPESDHIKIPEDPAKLLTISIGLLGDFAASVNRGESGDEYFVELKKNLLFSAHFFDAYHQSRLDGTLDPYLMLLGSASYYLCDLQGASSVLMQKLKQRIDDSKVEGLYCPNLEGAGLEFLLLWILESKFDHYFEKIDSVFGQFIEGISKDFCSFFSSGNDEKLKSQLNELRKYIYSVGSPRQILLGDLICSIGYKKIQNSTWMCLPKYSGLSKREWINTLKKKNFIKEFWPAQHLLGKADILKGESAIVQMPTSAGKTKSTELIIRSAFLSGRATLAVIVAPFRALCNEIKNTLADAFYNEPIKIDELSDTLQIDFEFSNLFGHQQILILTPEKLFYILKHSVDLATKIDLLILDEGHQFDSGVRGITYELLLTSLNLKIPQKAQKILISAVISNAENIGEWLNGESNVVDGEALIPTFKSIAFASWSDQLGRIEYVNTDNIDRNEFFVPRVIEKIELNKKGKERKKRYFPEKGKGSGQSIALYLGLKLISNGSIAIFCGSKLAAVSICEKAIDIIKRNVPLNLPETYSDSQEVIRLRNLHILNLGEDSSASICSKYGIFSHHGNVPHGIRLAIEHAMRENLIRFVVCTSTLAQGVNLPIRYLIVTSIYQAGERIKVRDFHNLIGRAGRSGMHTEGSILFVDPEVYDSRNIFIEKWRWKQIKELLNPNNSEPCISNLLSIFDPIKSDDGKYYIDIKILDFVAAYIDSSNDIHKWIDEIVQKHHDKNFSHDGVTQQIFWKINLICSLENFLLSFESNEEELTELNAIALAEGTLAFYLADEEKKEQLRLLFKILVDNIVTNMKDSNIRIVYGKTFYGIRDSQAILKWLSEYSDKIVMAKNNNEIIESLWEMMKNYIHNNSFNKFNQKDILCEMVKKWISGCSFSEIYQFSKIKGCQLRAGTQLRKIKIENIVDIFEGGIAYDSALFVSTLAEFTNLLEQNDKFKLFNKLQIFQKHLKYGLPSETAITLYEMGFADRVIAQDLASSLGLMSIEKQEIIEELKKNKEKSQEVMAKYPSYFQNEMLRILDN

SEQ ID NO: 52940 - protein, 264 aa, Alcaligenes faecalis
MDELGFDFEDAIAWFPQGQDHPYVLIRISAHHVAELSAAMGVPLRRCYITDAALQQAMAQHNLPPVDIVRAMLPDAGAVMSGDFGEVLTYFYQAAAELPANAIGPKKWRLKQDRTKPAPKSDVVHFVMPNRPHASAEDSILCAEVKAKATAGNSTPIADAITDCKKDRTSRLASTLVWLRERAMTTDLGDVDIPLLNRFIDAVDSPPAAKRFRAVAVICNDLLDNELASAPDNTDPEFTLVVIGVPELRTTYTAVYTAAINSVV

SEQ ID NO: 52941 - protein, 991 aa, Alcaligenes faecalis
MRASLQNWINNADNFRHLRHFNVVQLPVDLAHIGNRLDDYYISLVGELFNNLRGLNVPSTDWAQLGNAFLQFSIETTDAQLRERGISKDDAALFAAASFYFGDFPASACLAMRQSSRPADPATLRAACFDFLARPANLQSELVRTLQNELKDGAVAQIAVRVEESQEAVREALEDGPEAWIVATLMSRLLARFSQTNLRAVLPYGAHPFWTPLIRSLVDRQPSTWEFFPSQIQAIQGGLLENADSYAMQMPTGAGKTTLCETLLFSHLSARPQDAAILLVPFRSLASELRGTLVRRLNAMGLPARCAYGGTVPTGEEIHGLDQIRAIVATPESLSGILSADPTFSQRISLVICDEGHLLDSGGRGIGLELLLARMRSRPDLPPRVVFVSAIVPNIEEINAWLGGHDNTVIRSTYRPATAEFAVLRPTGSGAGMSIHLDMHPHEVVERKFTIERLLSSDNFRYVNPATGRSKTYSFTSIKAQAVATARKVMPMGMTAIFAANKRGAQGAVGLAEELVKQLSLPLTLPTPLDFARNDNLQRSITYLEGEYGNAWIGSQSVRHGAVLHHGDIPQETREVLESLIREGDVRLVICTSTLAEGVNLPIRSLVLYSVQRRNMSGPPEAMLARDIKNLVGRAGRAGANTKGLVICANPDQWHLVQPVATQGAGEPVRGSLRSLIQQLSSALTQQGLALNNEILEGNSPIHPLVDGVDSTLIDLISEEVGEEAFVAHARQLAEQTFAARQLPQGQVNLLRNVFELRARRLIALRQTGQLSWVRDTGAKVRLLDSVERILLPAREHWQDSIDPLDNELRTAILEWAWTHRELQNDIVQTFRPTGGDPELVKDAFFELVRRWMAGVSFVDLAQQLLLSMDDLLAIHTRVITFTLQSLVDQGLSLLTRRLQADGIEIAVGVTNFGEQLRFGAPNLAARVLASSGVRHRKAYVALGNAITQQDPILNVATIKSQALEGLRQHAPGWQAQLGDLVYANTFKDLS

SEQ ID NO: 52942 - protein, 269 aa, Enterobacter aerogenes
MPWTNEHIQWLQDTGNVLTLACGREAKVFCFRHDINDQAKMTAWAKHFRNHYCNDNQIDLIKAPGQTRSDYLLTMKFPNATTAPGPSIRAGDFAEILIADYLTYLRNYLVPRTRYDRKGVPNESTKGSDVLAFKQVQANPRDDELLVYEVKAKLSAGTKSMLQEAIDHSAKDHLRLAESLNGIKQRMIDRNELGSVGVINRFQDSVNQPYKLRFGAAAVCSDSAYDAAILAGANSEAHPFNQDLELLAIHGSELMELAHALYERAANEI

SEQ ID NO: 52943 - protein, 1037 aa, Enterobacter aerogenes
MRFENQSAKLLSITKSKAKMYEFGLDEVHHIRLTESPSNLLLMTIGILGDVCREELSVERNHVLFEQRKLELRNVARYFDALMGSRQEITYDYYLCLLGAASYYLADMPGSAIVLSNKLENLNNGLTESRIELLLEWLLKSKYNEPMTFDNEKQISKLICSLTSMVCVFFNENIDVTTDVLEVTKSLRDFCHERGSDRELLLADIVASVIKHKINNSSFNLLPQYTGLSIEAWKPALSKPTFIREFWPAQKLLGDAGVFSGTSAVIQLPTSAGKTKSAELIIRSAFLSGRASVAVIIAPFRSLCREISTSLAAAFGNEDVKINQLNDIPQIDEFDDALFAEIIEIEESDVIPLTVIVATPEKLIYLLRHKPELSESISLVIYDEGHQFDTGSRGVTYELLLTSLKRELEKNTQHVLISAVLSNAESIGNWLYDGEGKVVNGAECLSTERSIAFSSWKRGMGQFHYIDPFDINTEEFFVPRVMESLEIPRQGRETAERFFPPRDDKSLIAAYLGIKLCEHGPVAVFCGQKSSVIKICREVIKPLERIDSLNAPIVHSDQDEIKKIGKLSEVHLGSSSVITKAIKRGILPHSANIPNGLRISVEYAMENGLGRCVVCTSTLAQGVNLPIKYLVVSGVFQGEKQISTRDFHNLLGRAGRAGKHTEGSIIFADTELFDQRYTSKRWQWSQMSNLLDPSKSEECLSSLLTLVKPFYEDPFAIDPIDFLQSPETYQQSVIRNGHLQQIDVKDLLKQMSQRVNYLESLESFLLANVNRDEMLEDQALVEVYKKTFAFSLANDNEKQKLAEVFTVVAEKVKQIDEEKRSYYGRALLGIHELEYIENWIKTNVELLSTVQNVAGMITVLWPMIESLATDNSLGKLIGEGAGLRIANLWCSEISYNEILSQANRNNFKFRAGSQERNLKIENIIDICDSSLGYDAMLVVGACADLLENMFRDKPEIVMVRQLQMALRIGLSDGLSLGLYGIGLTDRAVASGVAKVLRDSGLDIDSYSKEMAFSHRHIIMPELIKYPTVFTASLYGGE

SEQ ID NO: 52944 - protein, 282 aa, Enterobacter cloacae S611
MPWSSEHLKWFSDNGERLTTSDGKEIEVWEFNHAQDDVVLSAWARHFRNHYCLDTDIDFLRGKLARKDYLNNIKFPSETSKLGPGIRAGDFGEILVCDYLQWLLDCWVPRVRWSSKVVRDESPKGSDVVGFRFHHKNGESSIEDVMFVFESKTKFSASTVNRLQNAINDSAKDHIRIDESLNFIKQKLYEYREINQAKKIERFQNPVDIPFKETYGAAAIISSDFFDVEELTSSDCNKIPTTAKSKEYTPHPNHGNLKLLVIRGANMMQLVHELYRRAADEA

SEQ ID NO: 52945 - protein, 1040 aa, Enterobacter cloacae S611
MRPERKSLQLLGITRSKGKMYEYGISEEHHIQISQDPAKLFTISIGILGDLAAAINRGQTEPGLLSELRRNLLFSAHFFDSYIQSRLGEELDSYLLLLGASSYYLCDLPGSSSVLANKIDADFPDLNADGLENIILWMLRGDALVYFGGAEGQIGNYIDSVFDLLVLFINNGDNEKELINKAIELREAAYKFGTPRQLLLGDIAVALVRKKIENSCWNALPIYSGLSKNSWSKSIKKESFIKELWPAQHLLGKADVFKGKSAIVQMPTSAGKTKAIEIVLRSAFISERVLLAIIIAPFRALCHEIKNSLVEAFYDEPILVDELSDALQTDFEIVSILAQQQILVVTPEKLLYVLRHAPELASHLGLLIFDEGHQFDSGKRGITYELLLTSLRSMIREDTQKVLISAVISNAEAVGEWLNGESNVVEGTSLIPTFRSVGFASWMDQLGRIEYVDSRDAEQNEFFVPRVIESINLGKKNRERTDRVFPEKTDGQGIALYLGLKLVPNGSIAIFCGRKSTAANICEKAVDIIERGAPLSFPADFSDSQEVERLSHLHVANLGIDAPASRSAAYGIFSHHGNTPHGIRLAVEHAMRDDLVRFVVCTSTLAQGVNLPIRYLIVTSVYQGMERIKVRDFHNLIGRAGRAGMHTEGSILFADPVIYDKRKVRNDKWRWKQVKELLEPSNSEPCISNLLSIFAPIKSDDEKYTITMEALDFAKAYIDHPDEVTKLAAGIAAQHGDKNFSQDGVERQVTWRINLICAIESFLLSHWDESEDGLSEIDVADLAEGTLAFHLADEQKKENIRELFKLLAENISANITDPVRRKIYGRTLYGIQDAQAIEGWVQSNTESLLSMVDETETLAIVWPLLTRYINSGVFTKFDNPEVLEEISHGWISGKPFCDLLKIIRKRKAKMIWGKRLREFKIDHVVEVCEGALAYDGALIVGAVSELIEIVTQVDTVQLRNYLQLFQKRMKYGLPTATTISLYEIGFSDRIISQDLAVSLNLASTQKRDLVKELKRNREGARMVMEKYPDYFQKRMDELLQ

SEQ ID NO: 52946 - protein, 259 aa, Enterobacter cloacae
MVPFYDWCDSADMPLGNHHVRVMTGRPGDIATGIQMTARAIPAHYTTEERIAAALAKLGKTAAAQMLNDLLPQTAHIRSGDLGEIYATEWIDAYSGYRAPIKRLRWKDHRNMAMRGDDVIGMLLDAETQRLSFLKTEAKSRINLRAQTLEEARSGLDKDSGLPSSHALSFISARLMEIGTDAPLVDAIDEALYRHGIPPESVKHLLFTFSGNPPQTLLTQALQAYPGPIGQWGVGLHIDNHAAFVGAVYDRVIADANNP

SEQ ID NO: 52947 - protein, 1177 aa, Enterobacter cloacae
MPTTPDAIIAAITDAATVGFRGRLIARGQARAMIWRDGVLPPGAPDFSAQLSFDLHSYAYGLLGLGLRLLESDGDPNQARIAFEQAATALESVMANGNREEADRDFHFLLAAASYHLAHLSARAYSLLAIVADEANFSPIEHALTLLIRRDINSLRTRVYTFRLDGRGSDATITTFLQQHLTESIVADAAERDGKDFLFEGLNLALTDVFFGAFSMFLLALDRGEYTLLEKAIAQLRENLDICGELNLIPQWWVHRIAIHLLKDFWSNTFHEKVPLLPAGGVAPSWPVLRELFIGLLARRPRAEVDLWPSQIEAASRAVNQTDNLVVSLPTSAGKTRIAELSILRCLAGGRRAIVVTPLRALSAQTEATLQRTFGPLGKTISALYGSIGVSGFDEDAIRGRDIVVATPEKLDFALRNDPSLLDDVGLLVFDEGHMIGSGEREVRYEVQIQRLLRRKDADQRRIVCLSAILPDGDQMEDFSAWLRRDQPGGPIKNDWRPTRLRFGEVTWNSPTARLNLRVGEERPFVPRFLTGAAPPLFVPPKKRRNRLFPDNQQELSLATAWRLVRDGQTVLIYCPERRSVEPFAKVIVDLHSRGALESLLTVELTTLQIAIALGEEWLGTDSYILKCLRLGVALHHGALPTAYRKEIERLLREGILKVTISSPTLAQGLNLSATAVVMHSLYRHGEMIKVSEFKNVIGRAGRAYIDVEGLVLYPIFEDVNNRKHNKWVNLIEDHGAREMESGLIQLIFSLLSRMHSHIGGDLDHLIDYVVNNAAAWVFPEVAGEKVDEREQALKEWDRHMATLDTAILSLIGEADVPDDQIETALDSILQSSLWQRRLLRVNDESRAAYRTALFTRSRYIWANSTAVTRRGYFLAGLGLEAGRALDAIAPEANNLLMQANAALVVSDHEAAITAITDIAERVFTFYPFEPDTLPANWREILRGWLLGHPLAMMIAGEEVDALQFIEGGLGYRLPWAMEALRVRAAANGDTVGMPALALEDYELGLAVPAVETGTMNRSASILIQAGFNSRQAAIKAVTDTAANFTNGAELRDWLRSPGLAVYSAQPNWPTAEARTIWLEFIQEFAPSDNLSWARRDYLGNVNWFDVPAPSGTPVGLFHWNGQPLVLAPDGHAIGLLQHPLNLNRRGLVRATVAMNNGQINLSYLGPDDLWVVAKPH

SEQ ID NO: 52948 - protein, 256 aa, Enterobacter cloacae
MANFDVWCDSVNVNLGANFLQKLTARGADFDNSVVSTASIVPHHYASPENIATAFELLGKPGVAGFIKDFLPISKQTRSGDIGEILATEWINARSNGYKVPLNRLRWKDHRNLAMRGEDVIGMYIDPQTETLFFLKTEAKSRATMNASTIIDARNNLDKEQGLPTAHALAFIATRLLETGQKELGRQILKASLSQGIQPGHVRHLVFLLSGNASDVLLTTSINAYKGNIQQFGVTVMVARHGEFIQEVFDRVISHA

SEQ ID NO: 52949 - protein, 1174 aa, Enterobacter cloacae
MLETSEEIIEAIRAATATGFRGRLIARGQARAMIWRNGILPDEAPEFTFQLSEDLQGYAYSLIGLGLRLREINGESAYSRLAFEYAATALESVIAKGDRHNDDSDFHFVMAAASYHLAHLSARAYSLLAIVNEDQNFSAIEQILTKLIQRDFSTLRSSVLSYRADGEGSEEKIIEGIRGAAFPYEERDDDSADVEHDPLLEGLDTALTDIYMSAISLYILAVERGERIFLTKAIHKLRTGLEVCSRFNMLPQWWVILITIHLLSDLWSDTFHELLPTNSVGGEAGTWPDLREAFISLLMRRSRAEIDLWPSQREAALRAVNDEDDLVVSLPTSAGKTRIAELCILRCLAGKKRIVFVTPLRALSAQTEASLSRTFNPLGKSISALYGSIGVSGMDEDAIRKRDIVVATPEKLDFALRNDPSLINDVGLFIFDEGHMIGADEREVRYEVQIQRLLRRQDANERRIVCLSAILPDGDQLDDFANWLRRDKLGGVIKSDWRPTRLRFGEVIWMGNTGRLNLSIGEEKTWISRFLNSTPPPVIKLSGKKQRKKTFPSTSNELCLATAWRLVEDGQTVLIYCPLRRSVEPFAEMIVDLHQRGLLRSLFDGDIAVLAQALALGEEWLGAHSPIIACLRLGVALHHGALPTAYRKEVERLLRDGVLKLTVSSPTLAQGLNLSATAIVMHSLHRNKQLINISEFRNVIGRAGRAYVDVEGLVIYPIFEQMTKRQRNWSRLTEDMGAREMESGLVQLVISLLKRMSQLLGDDIDVVSDYVLNNAMVWSFPIIAAEDASERERQAALWEKQIATLDTAILSLIGETEILDIDIEATLDDVLQSSLWYRSLQRYPNDSYRRLIQSGLLVRSHYIWHHSTPAARRGYFLSGVGLKTGLQLDAIAQVANQILIEANGAILLGDEERAIAAITALAEQVFTFYPFTPTPLPDNWQAILRSWLLGEPITTVANVVKSETLQFVETGLVYRLPWAMEAIRVRAIANGDIVDDDGLTMDDYDLDLAVAALETGTLNRSVSLLIQAGFNSRLAAIKVVADTGADFQSGRELRRWLRSDLVSYWSEFADWPTPETHAMWVDFAKEINPEEDQTWTLRKYTSIVNWKAPVPQPGTPLHFHQMNGVNYILAEDGFPLGSIAAAINTERKGLLRVKVGDKLNVELDYIGPNDIRAR

SEQ ID NO: 52950 - protein, 260 aa, Enterobacter cloacae
MELYERWCQVTKENDKRKNYWIYVERNGGRDEIRADLAETIRSHYARLELIAEDVKRLGYKVAAKILSEALPQTAKGRSGDLGEILATELVEEEIGLRVPVRRLRYKDGRNMAMRGDDFIGAGYNGNDQKLWLLKGEAKSNKVLGKATVTNARKVLNRDNGRCTPDSLLFIANRLLESNDPEDNALGRSLRDEVGVKSLRADRIDHMLFTVSGNGPHASLKEDLDFAGTNRDHYVVNIHVPDHQDFIAAMYEEAEDLGDN

SEQ ID NO: 52951 - protein, 1167 aa, Enterobacter cloacae
METIDELTTFLTTATVDGVLGRLLYRGVAWSLMREEGLLPTNAPQLGATIETDLAEHGFALLRGTMALRSQAGASDLTNKAFERAAIAFEALVRNCNPDSPERGFHRTIAAAAYHLAGFSAVAYSLFNEATDDLNASPGETVIQYLILRDLSQLREFVRDRLDEQAHGDEEIAEALMSEKLDIDEALSTILNTTICRALAYFDFALETGELEPIEAARELLTTAAHLADNAGNVPLWWISNLCSHLIDDLWRHSLHENLPTEPPEGTEEKYPDLRRLFISSLYARKTSEVELWPSQREAARRSTDVTDDLVVALPTSAGKTRVAEIAALMTLSSARRVLIVTPLRALSAQTERSFRKTFGPLGFSVSSLYGASGLSTGDEDALRTRDIIIATPEKLDFALRSDPSLIANVGLIVLDEGHMIGPSEREIRYETLVQRLLRRSDAGERRIVCLSAILPSGDELDDLTAWIRSDEPGEPVRSDWRPTRQRFGALTWRGKDALLRLDLNDDGPFLDKFVVEKAARGKEKKPYPRRNSHLALFAAWEFAGQGKRALIFSTQANWVEGYGKQVVDLCKRGYLGSLLEDEASIARAVEVGKEWLGEDHPAVACLKCGVAIHYGRLPSPFLRELEVLLSEGVLRVIIASPTLSQGLNLNAAVLLVPSLYRASEKIKGEEFANVAGRAGRAFVDVEGLIVHVMFDKVKWRKKEWRKLVDSAKARTLKSGLIQIVAEILERLSRKGVLDRDDAWEYLANAREAWISPQEEAEVAERLATGAKYDAGSDDDEDGVDDEEETIEEEPLSQIVERLDAMVFGLIEVLDSNRADLPKLLDEALKGSLWARQIAREGKDVAPLHKKVFEARADLIWKTTTAQVRRGHFAMGVGLEAGLKIDAMADELAELLDQADDAALRGDAEALVDALGGLGERLLFMRPFIPDKANALPVNWKAILRSWVSGEDVAKIGTQNMRVVEEAFTYRLVWALEAVRTRRMSLGWSPETVVGGGAAAVETGVPQFMMSMLIRAGLPSRRAAMAAIKDSKPVFVTPAEMRAWLESDEVTAYTDASDWPTPDTAALWARFRTDALSSGIQKWSVEHFKRLLDTSIAPPPGLYRIVTDEGDGRTWLTTPDYQRVGAFKKLAVDPKPSLFSGRLRGGTKVVEALRIGPGKLRWPRADA

SEQ ID NO: 52952 - protein, 259 aa, Enterobacter cloacae
MANFEDWCDSTERNISDHYLQSITARDAECMFGVQVMAALIPEHYASPRNIANAFEALGKPGLAAYIAGKLPETKQIRSGDLGEIFATEWINARSNGYKTPIKRLRWKDHRNMSMRGEDVIGIYIDQSSQQLFFLKTEAKSRAKMTGEVVSEARDNLNKEQGLPSSHALMFIADRLNEQGEELLAKAILNTTLRQGIVPGCVRHLIFLLSGNSSETMLTTSIEKYTGQNNQWGVCLRIARHGEFIAATFEKVISDASNS

SEQ ID NO: 52953 - protein, 1174 aa, Enterobacter cloacae
MPATADEIIEAIKEASAVGFRGRLIARGQARSVIWRDGDLPPDAPEFSALLSQDLQGYAYALIDLGLRLRELNGDDAYARIAFEQAGTALESAIAKGKRDSRDTDFHFVMAAASYHLAHLSARAYSLLAMVGQDDNFSPIERALTQLIRRDLRTLRDNALGFRLRGDGSDVKITEILQARLNLPQDENGDSESEEDILFDGLDLALTDAYMSAISLYLLAVERGESRLLSKAIEKLRISLSICAQFNMLPQWWLNFITIHLLSDLWSDTFHERLPLVPVGGDAAEWPALRELFIALLQRRPRAEIDLWPSQREAAGRSVNDNDDLVVSLPTSAGKTRIAELCILRCLAGGKRVVFITPLRALSAQTEATLSRTFGPLGKTISMLYGSIGVSGMDEDAIRQRDIVVATPEKLDFALRNDPSIINDVGLFIFDEGHMIGADEREVRYEVQIQRLLRRQDADTRRIVCLSAILPDGEQLDDFAGWLRRDKPGGPIKNNWRPTRLQFGEVIWSAPAGRLNLSVGYEAAWVSRFIVSRQPPKVKLPNKKQRTKMFPSDNKELCLATAWRLIEDGQTVLIYCPLRRSVEPFAETIVDLHQRGLLPSLFDAAPDILDTAISLGEEWLGAHSPILACLRLGVALHHGALPTAYRKEIERLLRDGVLKVTISSPTLAQGLNLSATAIVMHSLHRNRELIKVSEFRNVIGRAGRAYVDVEGLVIYPIFDKVNKRQTNWHTLTSDTGAREMESGLIQLVCVLLIRMHTRLGGDLKALTEYVTNNAVAWEFPEIMTESPQERDIAQAIWEKQLSTLDTAILSLLGENDIPDDQIETALDDILQSSLWQRSLQRYRDENERILLKSGLLSRSRYIWQRSTAAGRRGYFLSGVGLTTGLRLDAIAAKANQLLIDANAAIMGGDAEEAIAAITALAEEVFTFYPFIPDPLPGDWRGILRSWLLGEPMTNVANTQASETLQFVENGLVYRLPWAMEAIRVRATANGDLIGDTDTTLDDYELGFAVAAVETGTLSRSSSLLIQAGFSSRLAAIKVVTDTTADFQSGQELRRWLNSEEVISHTDNHDWPTPETRVMWLEFLGSLSPKGSQVWSRHRYNGMVDWRDTPAVIGTPLQLYTVDGIHHVLADDGTPLGSINGRINTNRRGLLRVEVDDENGRAMFDYLGPDDFIST

SEQ ID NO: 52954 - protein, 259 aa, Enterobacter cloacae
MVPFYDWCDSADMPLGNHHVRVMTGRPGDIATGIQMTARAIPAHYTTEERIAAALAKLGKTAAAQMLNDLLPQTAHIRSGDLGEIYATEWIDAYSGYRAPIKRLRWKDHRNMAMRGDDVIGMLLDAETQRLSFLKTEAKSRINLRVQTLEEARSGLDKDSGLPSSHALSFISARLMEIGTDAPLVDAIDEALYRHGIPPESVKHLLFTFSGNPPQTLLTQALQAYPGPIGQWGVGLHIDNHAAFVGAVYDRVIADANNP

SEQ ID NO: 52955 - protein, 1177 aa, Enterobacter cloacae
MPTTPDAIIAAITDAATVGFRGRLIARGQARAMIWRDGVLPPGAPDFSAQLSFDLHSYAYGLLGLGLRLLESDGDPNQARIAFEQAATALESVMANGNREEADRDFHFLLAAASYHLAHLSARAYSLLAIVADEANFSPIEHALTLLIRRDINSLRTRVYTFRLDGRGSDATITTFLQQHLTESIVADAAERDGKDFLFEGLNLALTDVFFGAFSMFLLALDRGEHTLLEKAIAQLRENLDICGELNLIPQWWVHRIAIHLLKDFWSNTFHEKVPLLPAGGVAPSWPVLRELFIGLLARRPRAEVDLWPSQIEAASRAVNQTDNLVVSLPTSAGKTRIAELSILRCLAGGRRAIVVTPLRALSAQTEATLQRTFGPLGKTISALYGSIGVSGFDEDAIRGRDIVVATPEKLDFALRNDPSLLDDVGLLVFDEGHMIGSGEREVRYEVQIQRLLRRKDADQRRIVCLSAILPDGDQMEDFSAWLRRDQPGGPIKNDWRPTRLRFGEVTWNSPTARLNLRVGEERPFVPRFLTGAAPPLFVPPKKRRNRLFPDNQQELSLATAWRLVRDGQTVLIYCPERRSVEPFAKVIVDLHSRGALESLLTVELTTLQIAIALGEEWLGTDSYILKCLRLGVALHHGALPTAYRKEIERLLREGILKVTISSPTLAQGLNLSATAVVMHSLYRHGEMIKVSEFKNVIGRAGRAYIDVEGLVLYPIFEDVNNRKHNKWVNLIEDHGAREMESGLIQLIFSLLSRMHSHIGGDLDHLIDYVVNNAAAWVFPEVAGEKVDEREQALKEWDRHMATLDTAILSLIGEADVPDDQIETALDSILQSSLWQRRLLRVNDESRAAYRTALFTRSRYIWANSTAVTRRGYFLAGLGLEAGRALDAIAPEANNLLMQANAALVVSDHEAAITAITDIAERVFTFYPFEPDTLPANWREILRGWLLGHPLAMMIAGEEVDALQFIEGGLGYRLPWAMEALRVRAAANGDTVGMPALALEDYELGLAVPAVETGTMNRSASILIQAGFNSRQAAIKAVTDTAANFTNGAELRDWLRSPGLAVYSAQPNWPTAEARTIWLEFIQEFAPSDNLSWARRDYLGNVNWFDVPAPSGTPVGLFHWNGQPLVLAPDGHAIGLLQHPLNLNRRGLVRATVAMNNGQINLSYLGPDDLWVVAKPH

SEQ ID NO: 52956 - protein, 259 aa, Enterobacter cloacae; identical to SEQ ID NO: 52946

SEQ ID NO: 52957 - protein, 1177 aa, Enterobacter cloacae; identical to SEQ ID NO: 52947

SEQ ID NO: 52958 - protein, 259 aa, Enterobacter cloacae; identical to SEQ ID NO: 52946

SEQ ID NO: 52959 - protein, 1177 aa, Enterobacter cloacae; identical to SEQ ID NO: 52947

SEQ ID NO: 52960 - protein, 259 aa, Enterobacter cloacae; identical to SEQ ID NO: 52946

SEQ ID NO: 52961 - protein, 1177 aa, Enterobacter cloacae; identical to SEQ ID NO: 52947

SEQ ID NO: 52962 - protein, 259 aa, Enterobacter cloacae; identical to SEQ ID NO: 52946

SEQ ID NO: 52963 - protein, 1177 aa, Enterobacter cloacae; identical to SEQ ID NO: 52947

SEQ ID NO: 52964 - protein, 259 aa, Enterobacter cloacae; identical to SEQ ID NO: 52946

SEQ ID NO: 52965 - protein, 1177 aa, Enterobacter cloacae; identical to SEQ ID NO: 52947

SEQ ID NO: 52966 - protein, 259 aa, Enterobacter cloacae; identical to SEQ ID NO: 52946

SEQ ID NO: 52967 - protein, 1177 aa, Enterobacter cloacae; identical to SEQ ID NO: 52947

SEQ ID NO: 52968 - protein, 276 aa, Enterobacter cloacae
MTVEQPYSAWLKKAEHRVTTSDGNEVEVYELEIDLEAGHVLSAWAKHFREHYCLDSQIDRLRRGTKKTRAEYLRDLVFPDESEDFGPATRSGDFAEILIADLLESHFGYWVPRTRYDNKMVRNESPKGTDVLAFKFDDIDASRPSTKDILISFESKAQLSGKKTKPRLQDAVIDSIKDVYRISESLNAMKRRLIDRQDEEGADRVERFQEGLDVPYVRMTGAAAVFCSSLYDSAHISETTDCTSHENIKNLMLVVIHAKSLMKFVHALYGRAANEA

SEQ ID NO: 52969 - protein, 1042 aa, Enterobacter cloacae
MFEYGVPEEDHIDLPDDLDLEMQFPLAVGTVGDFASEVVAKAIGNSIEAQSQTPLDEVIFSAQVLQAYDDSLLNKELSFNLRILAAAGFYLGGVPGNATVQLSKLSQLEFPEHDTLAIAVKAAMDRPWEQTNETLVSSRAKDILDVLRQHFRYGRSGGQKAYDAIKSLREWAYSHASAHDLLMADLLGAISATRIANSAWTLLPHYSNLPPEKWESYLSRSMSIKEMWPSQRLLGEAGLYSGASGVVQMPTSAGKSRATELIIRSAFLSARTKLVLVIAPFRALCQEIANDLEKAFKDDGYDVNQPSDALQPDVEFDFSTLSDFLDVESGIFDSEVESKPQVIILTPEKLLYILRQEPDIVQKAGLVVYDEGHQFDTGSRGVTYELLLTSIKRMLHENAQSVLISAVIQNAASVAAWLLNDGSKVVSSKSLQASRLIAFTSLPKGKDGQLQFNVASDSDQKFFVPRVIVSEKMPRLPKERKDRFFPNQESGSIALYLSLRLLKNGGVAIFTGRKASAAKIVREAAEDIFRRGISLEPPSANSDPDEIRRFVCLFERNFGANAYLTQAATLGIFAHHGNTPQGVRLAIEYAMRQSLIRLIVCTSTLAQGVNLPIRYLLVTSAMQGRESIKVRDFHNLMGRAGRAGMYGEGTVIFTDPRLYDERVAKTHRWKDTINLINPDSTEPTGSTLLSLFDPLRNDLGTVILSSPSSAEVATYIVNEWEALLKWVESVPINLPKENFSVASLLEQLKSKKKVIEAVESFLMTYRSDVQPETFVGNSRELVTETLAYSLATKEQQILLTDIFESVARRIELFVPDTAIQQRFGRTLLGIDQALAIESWVTTNANELEGATSADHLFDVLWPLLVLLSSEKRLSDTVPNGALMTLALGWMAGDSFAALLQRLDKLGAYYPYGANQRKFDLDVVVDLCEQTFGFEFTLLLAAVKESFLAFSSEQAGEVFRGYVDLLQKRLKYGLPNQSCIAFFEAGFAERVIAQCLAEGMTQDAIQVSFDARNMIRENPERFEAMLQGFPSYFSDVFKTITAL

SEQ ID NO: 52970 - protein, 282 aa, Escherichia coli DEC14B
MPWTSDHTKWLIDTGERLKTADGKEVEVWEFRHEKDEAVLSAWAKHFRNHYCLDTEIDFLRGKRPRPDYLTNIKFPCRTSKLGPGIRAGDFGEILVSDYLQWLLGYWVPRVRWSSKVVRDESPKGSDVIGFRFHKKNGEASTKDVLFVFESKTKFSASTINRLQDAINDSAKDHIRIDESLNFIKQKLFEKREIEQAQRIERFQSPVDMPYKETYGAAAIISDEFFDAEELAVADCGKIPKSAKSKEFFPHPNGDSLVLLVIKGPSMMDLVHELYRRAADEA

SEQ ID NO: 52971 - protein, 1047 aa, Escherichia coli DEC14B
MRPDRKSNRLLGVTRSKAKMIEYHVPEEYQEIDLSLHPNKLFTISIGLLGDLAAAINRVEPDPDSLAELKNNLLFSARFFDSYLQSKLNETLDPYLVLLGSASFYLCDLPGSASVLAKRIDGDCPDLDGDSLEDLLLWLLQADLGTYFDGAEGPFGGFIDGISKWILQFFEDGNGEKNLLDLAMKLRDAVYEFGTPRQLLFGDVIAAVLRKKLENSAWKALPSYSGLPRDKWLHALQKDSFIKELWPAQHLLGQADVLKGESAIIQMPTSAGKTKATELILRSAFLADRVSLAIIIAPFRALCHEIKNSLVEAFHNEPTRVDELSDALQTDFEIAELLGHKQILVITPEKLLYVLRHAPELAAHVGLLVFDEGHQFDSGTRGITYELLLTSLRSMIPEGTQKVLISAVISNAEAVGEWLNGEPNVVEGTTLIPTFRSVGFASWLDQLGRIEYVDSRDAEQGEFFVPRVIERFNLGKRGREQKERHFPERDDGQAIALYLGIKLAPNGSIAIFCGKKSTATSICEKAVEFIDRGIPFPLPQEFSDRREVERLHYLHAANLGPEASASMSAEHGIFSHHGNTPHGIRLSVEHAMRENLVRFVVCTSTLAQGVNLPIRYLIVTSVYQGMERIKVRDFHNLIGRAGRAGMHTEGSILFADPIVYDKRRDRKDGWRWDIVKELLDPTKSEECASSLFQLIPLVIRNDRTKSKDKKNHSLTWDILSFAKAHIAGWDSLNEIITKIAKQYGGNGFTVDAVKPQFEFFSLTLASIEGFLLSNWDAVDNGLTEEDIADLAEQTLAYFLADDEKREQIQELFKLLAENISENITDVNRRKAFGKTLYGVNDAKAIEGWVQDNADELLDAQNGDEALDLVWPLIMGHVHNKAFNKFDKKDVLKEITKKWISGTPFHQLFRIADNNKCKLGKGKRPRKVKIENIIDICEGGLAYDGALLVSALCEFVEMLDREGTGDPINRLQIFQKRLKYGLPTETTIALYELGFSDRVIAQDLAASLNLAATQKKDLVKALKKDRDGARAVMEKYPSYFQERMNELL

SEQ ID NO: 52972 - protein, 282 aa, Escherichia coli DEC14C; identical to SEQ ID NO: 52970

SEQ ID NO: 52973 - protein, 1047 aa, Escherichia coli DEC14C; identical to SEQ ID NO: 52971

SEQ ID NO: 52974 - protein, 282 aa, Escherichia coli DEC14D; identical to SEQ ID NO: 52970

SEQ ID NO: 52975 - protein, 1047 aa, Escherichia coli DEC14D; identical to SEQ ID NO: 52971

SEQ ID NO: 52976 - protein, 259 aa, Escherichia coli KTE90
MANFEDWCDSTERNISDHYLQSITARDAECMFGVQVMAALIPEHYASPRNIANAFEALGKPGLAAYIAGKLPETKQIRSGDLGEIFATEWINARSNGYKTPIKRLRWKDHRNMSMRGEDVIGIYIDQSSQQLFFLKTEAKSRAKMTGEVVSEARDNLNKEQGLPSSHALMFIADRLNEQGEELLAKAILNATLRQGIVPGCVRHLIFLLSGNSSETMLTTSIEKYTGQNNQWGVCLRIARHGEFIAATFEKVISDASNS

SEQ ID NO: 52977 - protein, 1174 aa, Escherichia coli KTE90
MPATADEIIEAIKEASAVGFRGRLIARGQARSVIWRDGDLPPDAPEFSALLSQDLQGYAYALIDLGLRLRELNGDDAYARIAFEQAGTALESAIAKGKRDSRDTDFHFVMAAASYHLAHLSARAYSLLAMVGQDDNFSPIERALTQLIRRDLRTLRDNALGFRLRGDGSDVKITEILQARLNLPQDENGDSESEEDILFDGLDLALTDAYMSAISLYLLAVERGESRLLSRAIEKLRISLSICAQFNMLPQWWLNFITIHLLSDLWSDTFHERLPLVPVGGDAAEWPALRELFIALLQRRPRAEIDLWPSQREAAGRSVNDNDDLVVSLPTSAGKTRIAELCILRCLAGGKRVVFITPLRALSAQTEATLSRTFGPLGKTISMLYGSIGVSGMDEDAIRQRDIVVATPEKLDFALRNDPSIINDVGLFIFDEGHMIGADEREVRYEVQIQRLFSRQDADTRRIVCLSAILPDGEQLDDFAGWLRRDKPGGPIKNNWRPTRLQFGEVIWSAPAGRLNLSVGYEAAWVSRFIVSRQPPKVKLPNKKQRTKMFPSDNKELCLATAWRLIEDGQTVLIYCPLRRSVEPFAETIVDLHQRGLLPSLFDAAPDILDTAISLGEEWLGAHSPILACLRLGVALHHGALPTAYRKEIERLLRDGVLKVTISSPTLAQGLNLSATAIVMHSLHRNRELIKVSEFRNVIGRAGRAYVDVEGLVIYPIFDKVNKRQTNWHTLTSDTGAREMESGLIQLVCVLLIRMHTRLGGDLKALTEYVTNNAVAWEFPEIMTESPQERDIAQAIWEKQLSTLDTAILSLLGENDIPDDQIETALDDILQSSLWQRSLQRYRDENERILLKSGLLSRSRYIWQRSTAAGRRGYFLSGVGLTTGLRLDAIAAKANQLLIDANAAIMGGDAEEAIAAITALAEEVFTFYPFIPDPLPGDWRGILRSWLLGEPMTNVANTQASETLQFVENGLVYRLPWAMEAIRVRATANGDLIGDTDTTLDDYELGFAVAAVETGTLSRSSSLLIQAGFSSRLAAIKVVTDTTADFQSGQELRRWLNSEEVISHTDNHDWPTPETRVMWLEFLGSLSPKGSQVWSRHRYNGMVDWRDTPAVIGTPLQLYTVDGIHHVLADDGTPLGSINGRINTNRRGLLRVEVDDENGRAMFDYLGPDDFIST

SEQ ID NO: 52978 - protein, 259 aa, Escherichia coli KTE91; identical to SEQ ID NO: 52976

SEQ ID NO: 52979 - protein, 1174 aa, Escherichia coli KTE91; identical to SEQ ID NO: 52977

SEQ ID NO: 52980 - protein, 259 aa, Escherichia coli KTE184; identical to SEQ ID NO: 52976

SEQ ID NO: 52981 - protein, 1174 aa, Escherichia coli KTE184; identical to SEQ ID NO: 52977

SEQ ID NO: 52982 - protein, 269 aa, Escherichia coli KTE19; identical to SEQ ID NO: 52942

SEQ ID NO: 52983 - protein, 1037 aa, Escherichia coli KTE19
MRFENQSAKLLSITKSKAKMYEFGLDEVHHIRLTESPSNLLLMTIGILGDVCREELSVERNHVLFEQRKLELRNVARYFDALMGSRQEIIYDYYLCLLGAASYYLADMPGSAIVLSNKLENLNNGLTESRIELLLEWLLKSKYNEPMTFDNEKEISKLICSLTSMVCVFFNENIDVTTDVLEVTKSLRDFCHERGSDRELLLADIVASVIKHKINNSSFNLLPQYTGLSIEAWKPALSKPTFIREFWPAQKLLGDAGVFSGTSAVIQLPTSAGKTKSAELIIRSAFLSGRASVAVIIAPFRSLCREISTSLAAAFGNEDVKINQLNDIPQIDEFDDALFAEIIEIEESDVTPLTVIVATPEKLIYLLRHKPELSESISLVIYDEGHQFDTGSRGVTYELLLTSLKRELEKNTQHVLISAVLSNAESIGNWLYDGEGKVVNGAECLSTERSIAFSSWKRGMGQFHYIDPFDINTEEFFVPRVMESLEIPRQGRETAERFFPPRDDKSLIAAYLGIKLCEHGPVAVFCGQKSSVIKICREVIKPLERIDSLNAPIVHSDQDEIKKIGKLSEVHLGSSSVITKAIKRGILPHSANIPNGLRISVEYAMENGLGRCVVCTSTLAQGVNLPIKYLVVSGVFQGEKQISTRDFHNLLGRAGRAGKHTEGSIIFADTELFDQRYTSKRWQWSQMSNLLDPSKSEECLSSLLTLVKPFYEDPFAIDPIDFLQSPETYQQSVIRNGHLQQIDVKDLLKQMSQRVNYLESLESFLLANVNRDEMLEDQALVEVYKKTFAFSLANDNEKQKLAEVFTVVAEKVKQIDEEKRSYYGRALLGIHELEYIENWIKTNVELLSTVQNVAGMITVLWPMIESLATDNSLGKLIGEGAGLRIANLWCSEISYNEILSQANRNNFKFRAGSQERNLKIENIIDICDSSLGYDAMLVVGACADLLENMFRDKPEIVMVRQLQMALRIGLSDGLSLDLYGIGLTDRAVASGVAKVLRDSGLDIDSYSKEMAFSHRHIIMPELIKYPTVFTASLYGGE

SEQ ID NO: 52984 - protein, 258 aa, Escherichia coli KTE41
MGLYEKWCESIKENDERKYYWTYVEKDGGRDDIREDLAETIRSHYERLERIADDVGRLGYKVAAKILREAMPNTPKGRSGDLGEILATELVEEEIGLRVPVRRLRYKDGRNMAMRGDDIIGAGYQGNKLWLLKGEAKSNQKLGKTTVTAARKVLDRDNGRCTPDSLLFVANRLLESNDAGDNALGRDLRDEVGLKSMPADRIDHMLFTVSGNGPHASLKENLEAAGVNRDHYVVNIHVEDHQDFIAAMYLEAEDLGDD

SEQ ID NO: 52985 - protein, 1166 aa, Escherichia coli KTE41
METTEELSTFLTAATVDGILGRLLYRGAAWSLMRKNGVLPQNAPPLGATIETDLAEHGFALLRGAMALRAQAGASELTGKAFERAANAFEALVRNGDPESPDRGFRRTIAAAAYHLAGFSAVAFSIFNEIEEDLNVSPGEIAIRHLILRDLDQLRGFVRDWLNYGAHGDEQIAAALQGGDADVDEVLSTILNTTICRALAFFDFALETGEVESFEAARGLLTTAVGLADNAENVPLWWISNLCRHLIDDLWQHSLHQNLPTEPPEGAEERYPDLRRLFISSLYARKTSEVELWPSQREAAQRSTDVTDDLVVALPTSAGKTRVAEIAALMTLSSARRVLIVTPLRALSAQTERTFRKTFAPLGFGVSSLYGASGLSAGDEDALRTREIIIATPEKLDFALRSDQTLIDDVGLIVLDEGHMIGPSEREIRYETLVQRLLRRTDAAERRIVCLSAILPSGDELDDLTAWIRSDEPGEPVRSDWRPTRQRFGALTWRGKDALLRLDLDDDGPFLDKFVAEKPALGKEKKPYPRKNSHLALFAAWEFASQGKRTLIFSTQANWVESYGKQVVDLCKRGYLDSLLEDETPIARALEVGKEWLGEDHPAVASLKVGVAIHHGRLPSPFLRELELLLSEGALKVIVASPTLSQGLNLNAAVLLVPALYRASEKIKGEEFANVAGRAGRAFVDVEGLIVHVMFDKIKWRKKEWRELVASAKDRTLKSGLIQIVAEILERLSREGVLDIDDAWEYLANAREAWRSPEEEAVVAERLAAAVEYDASTDDEDETDDEEEAIDEEPLSQLVERLDATVFGLIEALDADRADLPKLLDEALRGSLWARQIAREDEDVASLHRKVFEARAALIWKATTPPTRRGHFAMGVGLEAGLLIDAMADELAELIDRADSAALSGDINELADALGGLGERLLFMRPFIPDKANALPPNWKAILRSWVSGEEVSKIGPQNMRAVEDAFTYRLVWALEAVRTRRMSFGWSPDTVAGAAAAAVETGVPQFMMAMLIRAGLPSRRAAMAAIEDAEPIFVTPAEMRAWLESDEITAKTDAGDWPTPDTSALWARFRTEALSGGIQKWSVERYKRLLDTESSPPAGLYRILTDEGDARTWLTTPDYQRIAVFKKPAVDPKPSLFSGQLPGKTRLVDALRVGRGKLRWPTADV

SEQ ID NO: 52986 - protein, 259 aa, Escherichia coli KTE68; identical to SEQ ID NO: 52976

SEQ ID NO: 52987 - protein, 1174 aa, Escherichia coli KTE68
MPATADEIIEAIKEASAVGFRGRLIARGQARSVIWRDGDLPPDAPEFSALLSQDLQGYAYALIDLGLRLRELNGDDAYARIAFEQAGTALESAIAKGKRDSRDTDFHFVMAAASYHLAHLSARAYSLLAMVGQDDNFSPIERALTQLIRRDLRTLRDNALGFRLRGDGSDVKITEILQARLNLPQDENGDSESEEDILFDGLDLALTDAYMSAISLYLLAVERGESRLLSRAIEKLRISLSICAQFNMLPQWWLNFITIHLLSDLWSDTFHERLPLVPVGGDAAEWPALRELFIALLQRRPRAEIDLWPSQREAAGRSVNDNDDLVVSLPTSAGKTRIAELCILRCLAGGKRVVFITPLRALSAQTEATLSRTFGPLGKTISMLYGSIGVSGMDEDAIRQRDIVVATPEKLDFALRNDPSIINDVGLFIFDEGHMIGADEREVRYEVQIQRLLRRQDADTRRIVCLSAILPDGEQLDDFAGWLRRDKPGGPIKNNWRPTRLQFGEVIWSAPAGRLNLSVGYEAAWVSRFIVSRQPPKVKLPNKKQRTKMFPSDNKELCLATAWRLIEDGQTVLIYCPLRRSVEPFAETIVDLHQRGLLPSLFDAAPDILDTAISLGEEWLGAHSPILACLRLGVALHHGALPTAYRKEIERLLRDGVLKVTISSPTLAQGLNLSATAIVMHSLHRNRELIKVSEFRNVIGRAGRAYVDVEGLVIYPIFDKVNKRQTNWHTLTSDTGAREMESGLIQLVCVLLIRMHTRLGGDLKALTEYVTNNAVAWEFPEIMTESPQERDIAQAIWEKQLSTLDTAILSLLGENDIPDDQIETALDDILQSSLWQRSLQRYRDENERILLKSGLLSRSRYIWQRSTAAGRRGYFLSGVGLTTGLRLDAIAAKANQLLIDANAAIMGGDAEEAIAAITALAEEVFTFYPFIPDPLPGDWRGILRSWLLGEPMTNVANTQASETLQFVENGLVYRLPWAMEAIRVRATANGDLIGDTDTTLDDYELGFAVAAVETGTLSRSSSLLIQAGFSSRLAAIKVVTDTTADFQSGQELRRWLNSEEVISHTDNHDWPTPETRVMWLEFLGSLSPKGSQVWSRHRYNGMVDWRDTPAVIGTPLQLYTVDGIHHVLADDGTPLGSINGRINTNRRGLLRVEVDDENGRAMFDYLGPDDFIST

SEQ ID NO: 52988 - protein, 256 aa, Escherichia coli UMEA 3108-1; identical to SEQ ID NO: 52948

SEQ ID NO: 52989 - protein, 1174 aa, Escherichia coli UMEA 3108-1
MLETSEEIIEAIRAATATGFRGRLIARGQARAMIWRNGILPDEAPEFTFQLSEDLQGYAYSLIGLGLRLREINGESAYSRLAFEYAATALESVIAKGDRHNDDSDFHFVMAAASYHLAHLSARAYSLLAIVNEDQNFSAIEQILTKLIQRDFSTLRSSVLSYRADGEGSEERIIEGIRGAAFPYEERDDDSADVEHDPLLEGLDTALTDIYMSAISLYILAVERGERIFLTKAIHKLRTGLEVCSRFNMLPQWWVILITIHLLSDLWSDTFHELLPTNSVGGEAGTWPDLREAFISLLMRRSRAEIDLWPSQREAALRAVNDEDDLVVSLPTSAGKTRIAELCILRCLAGKKRIVFVTPLRALSAQTEASLSRTFNPLGKSISALYGSIGVSGMDEDAIRKRDIVVATPEKLDFALRNDPSLINDVGLFIFDEGHMIGADEREVRYEVQIQRLLRRQDANERRIVCLSAILPDGDQLDDFANWLRRDKLGGVIKSDWRPTRLRFGEVIWMGNTGRLNLSIGEEKTWISRFLNSTPPPVIKLSGKKQRKKTFPSTSNELCLATAWRLVEDGQTVLIYCPLRRSVEPFAEMIVDLHQRGLLRSLFDGDIAVLAQALALGEEWLGAHSPIIACLRLGVALHHGALPTAYRKEVERLLRDGVLKLTVSSPTLAQGLNLSATAIVMHSLHRNKQLINISEFRNVIGRAGRAYVDVEGLVIYPIFEQMTKRQRNWSRLTEDMGAREMESGLVQLVISLLKRMSQLLGDDIDVVSDYVLNNAMVWSFPIIAAEDASERERQAALWEKQIATLDTAILSLIGETEILDIDIEATLDDVLQSSLWYRSLQRYPNDSYRRLIQSGLLVRSHYIWHHSTPAARRGYFLSGVGLKTGLQLDAIAQVANQILIEANGAILLGDEERAIAAITALAEQVFTFYPFTPTPLPDNWQAILRSWLLGEPITTVANVVKSETLQFVETGLVYRLPWAMEAIRVRAIANGDIVDDDGLTMDDYDLDLAVAALETGTLNRSVSLLIQAGFNSRLAAIKVVADTGADFQSGRELRRWLRSDLVSYWSEFADWPTPETHAMWVDFAKEINPEEDQTWTLRKYTSIVNWKAPVPQPGTPLHFHQMNGVNYILAEDGFPLGSIAAAINTERKGLLRVKVGDKLNVELDYIGPNDIRAR

SEQ ID NO: 52990 - protein, 259 aa, Escherichia coli 1-392-07_S4_C2; identical to SEQ ID NO: 52976

SEQ ID NO: 52991 - protein, 1174 aa, Escherichia coli 1-392-07_S4_C2; identical to SEQ ID NO: 52987

SEQ ID NO: 52992 - protein, 259 aa, Escherichia coli; identical to SEQ ID NO: 52946

SEQ ID NO: 52993 - protein, 1177 aa, Escherichia coli
MPTTPDAIIAAITDAATVGFRGRLIARGQARAMIWRDGVLPPGAPDFSAQLSFDLHSYAYGLLGLGLRLLESDGDPNQARIAFEQAATALESVMANGNREEADRDFHFLLAAASYHLAHLSARAYSLLAIVADEANFSPIEHALTLLIRRDINSLRTRVYTFRLDGRGSDATITTFLQQHLTESIVADAAERDGKDFLFEGLNLALTDVFFGAFSMFLLALDRGEYTLLEKAIAQLRENLDICGELNLIPQWWVHRIAIHLLKDFWSNTFHEKVPLLPAGGVAPSWPVLRELFIGLLARRPRAEVDLWPSQIEAASRAVNQTDNLVVSLPTSAGKTRIAELSILRCLAGGRRAIVVTPLRALSAQTEATLQRTFGPLGKTISALYGSIGVSGFDEDAIRGRDIVVATPEKLDFALRNDPSLLDDVGLLVFDEGHMIGSGEREVRYEVQIQRLLRRKDADQRRIVCLSAILPDGDQMEDFSAWLRRDQPGGPIKNDWRPTRLRFGEVTWNSPTARLNLRVGEERPFVPRFLTGAAPPLFVPPKKRRNRLFPDNQQELSLATAWRLVRDGQTVLIYCPERRSVEPFAKVIVDLHSRGALESLLTVELTTLQIAIALGEEWLGTDSYILKCLRLGVALHHGALPTAYRKEIERLLREGILKVTISSPTLAQGLNLSATAVVMHSLYRHGEMIKVSEFKNVIGRAGRAYIDVEGLVLYPIFEDVNNRKHNKWVNLIEDHGAREMESGLIQLIFSLLSRMHSHIGGDLDHLIDYVVNNAAAWVFPEVAGEKVDEREQALKEWDRHMATLDTAILSLIGEADVPDDQIETALDSILQSSLWQRRLLRVNDESRAAYRTALFTRSRYIWANSTAVTRRGYFLAGLGLEAGRALDAIAPETNNLLMQANAALVVSDHEAAITAITDIAERVFTFYPFEPDTLPANWREILRGWLLGHPLAMMIAGEEVDALQFIEGGLGYRLPWAMEALRVRAAANGDTVGMPALALEDYELGLAVPAVETGTMNRSASILIQAGFNSRQAAIKAVTDTAANFTNGAELRDWLRSPGLAVYSAQPNWPTAEARTIWLEFIQEFAPSDNLSWARRDYLGNVNWFDVPAPSGTPVGLFHWNGQPLVLAPDGHAIGLLQHPLNLNRRGLVRATVAMNNGQINLSYLGPDDLWVVAKPH

SEQ ID NO: 52994 - protein, 282 aa, Escherichia coli C691-71 (14b); identical to SEQ ID NO: 52970

SEQ ID NO: 52995 - protein, 1047 aa, Escherichia coli C691-71 (14b); identical to SEQ ID NO: 52971

SEQ ID NO: 52996 - protein, 259 aa, Escherichia coli; identical to SEQ ID NO: 52946

SEQ ID NO: 52997 - protein, 1177 aa, Escherichia coli; identical to SEQ ID NO: 52993

SEQ ID NO: 52998 - protein, 259 aa, Escherichia coli; identical to SEQ ID NO: 52946

SEQ ID NO: 52999 - protein, 1177 aa, Escherichia coli
MPTTPDAIIAAITDAATVGFRGRLIARGQARAMIWRDGVLPPGAPDFSAQLSFDLHSYAYGLLGLGLRLLESDGDPNQARIAFEQAATALESVMANGNREEADRDFHFLLAAASYHLAHLSARAYSLLAIVADEANFSPIEHALTLLIRRDINSLRTRVYTFRLDGRGSDATITTFLQQHLTESIVADAAERDGKDFLFEGLNLALTDVFFGAFSMFLLALDRGEYTLLEKAIDQLRENLDICGELNLIPQWWVHRIAIHLLKDFWSNTFHEKVPLLPAGGVAPSWPVLRELFIGLLARRPRAEVDLWPSQIEAASRAVNQTDNLVVSLPTSAGKTRIAELSILRCLAGGRRAIVVTPLRALSAQTEATLQRTFGPLGKTISALYGSIGVSGFDEDAIRGRDIVVATPEKLDFALRNDPSLLDDVGLLVFDEGHMIGSGEREVRYEVQIQRLLRRKDADQRRIVCLSAILPDGDQMEDFSAWLRRDQPGGPIKNDWRPTRLRFGEVTWNSPTARLNLRVGEERPFVPRFLTGAAPPLFVPPKKRRNRLFPDNQQELSLATAWRLVRDGQTVLIYCPERRSVEPFAKVIVDLHSRGALESLLTVELTTLQIAIALGEEWLGTDSYILKCLRLGVALHHGALPTAYRKEIERLLREGILKVTISSPTLAQGLNLSATAVVMHSLYRHGEMIKVSEFKNVIGRAGRAYIDVEGLVLYPIFEDVNNRKHNKWVNLIEDHGAREMESGLIQLIFSLLSRMHSHIGGDLDHLIDYVVNNAAAWVFPEVAGEKVDEREQALKEWDRHMATLDTAILSLIGEADVPDDQIETALDSILQSSLWQRRLLRVNDESRAAYRTALFTRSRYIWANSTAVTRRGYFLAGLGLEAGRALDAIAPEANNLLMQANAALVVSDHEAAITAITDIAERVFTFYPFEPDTLPANWREILRGWLLGHPLAMMIAGEEVDALQFIEGGLGYRLPWAMEALRVRAAANGDTVGMPALALEDYELGLAVPAVETGTMNRSASILIQAGFNSRQAAIKAVTDTAANFTNGAELRDWLRSPGLAVYSAQPNWPTAEARTIWLEFIQEFAPSDNLSWARRDYLGNVNWFDVPAPSGTPVGLFHWNGQPLVLAPDGHAIGLLQHPLNLNRRGLVRATVAMNNGQINLSYLGPDDLWVVAKPH

SEQ ID NO: 53000 - protein, 259 aa, Escherichia coli; identical to SEQ ID NO: 52946

SEQ ID NO: 53001 - protein, 1177 aa, Escherichia coli; identical to SEQ ID NO: 52993

SEQ ID NO: 53002 - protein, 259 aa, Escherichia coli VL2732; identical to SEQ ID NO: 52946

SEQ ID NO: 53003 - protein, 1177 aa, Escherichia coli VL2732
MPTTPDAIIAAITDAATVGFRGRLIARGQARAMIWRDGVLPPGAPDFSAQLSFDLHSYAYGLLGLGLRLLESDGDPNQARIAFEQAATALESVMANGNREEADRDFHFLLAAASYHLAHLSARAYSLLAIVADEANFSPIEHALTLLIRRDINSLRTRVYTFRLDGRGSDATITTFLQQHLTESIVADAAERDGKDFLFEGLNLALTDVFFGAFSMFLLALDRGEYTLLEKAIAQLRENLDICGELNLIPQWWVHRIAIHLLKDFWSNTFHEKVPLLPAGGVAPSWPVLRELFIGLLARRQRAEVDLWPSQIEAASRAVNQTDNLVVSLPTSAGKTRIAELSILRCLAGGRRAIVVTPLRALSAQTEATLQRTFGPLGKTISALYGSIGVSGFDEDAIRGRDIVVATPEKLDFALRNDPSLLDDVGLLVFDEGHMIGSGEREVRYEVQIQRLLRRKDADQRRIVCLSAILPDGDQMEDFSAWLRRDQPGGPIKNDWRPTRLRFGEVTWNSPTARLNLRVGEERPFVPRFLTGAAPPLFVPPKKRRNRLFPDNQQELSLATAWRLVRDGQTVLIYCPERRSVEPFAKVIVDLHSRGALESLLTVELTTLQIAIALGEEWLGTDSYILKCLRLGVALHHGALPTAYRKEIERLLREGILKVTISSPTLAQGLNLSATAVVMHSLYRHGEMIKVSEFKNVIGRAGRAYIDVEGLVLYPIFEDVNNRKHNKWVNLIEDHGAREMESGLIQLIFSLLSRMHSHIGGDLDHLIDYVVNNAAAWVFPEVAGEKVDEREQALKEWDRHMATLDTAILSLIGEADVPDDQIETALDSILQSSLWQRRLLRVNDESRAAYRTALFTRSRYIWANSTAVTRRGYFLAGLGLEAGRALDAIAPETNNLLMQANAALVVSDHEAAITAITDIAERVFTFYPFEPDTLPANWREILRGWLLGHPLAMMIAGEEVDALQFIEGGLGYRLPWAMEALRVRAAANGDTVGMPALALEDYELGLAVPAVETGTMNRSASILIQAGFNSRQAAIKAVTDTAANFTNGAELRDWLRSPGLAVYSAQPNWPTAEARTIWLEFIQEFAPSDNLSWARRDYLGNVNWFDVPAPSGTPVGLFHWNGQPLVLAPDGHAIGLLQHPLNLNRRGLVRATVAMNNGQINLSYLGPDDLWVVAKPH

SEQ ID NO: 53004 - protein, 259 aa, Escherichia coli; identical to SEQ ID NO: 52976

SEQ ID NO: 53005 - protein, 1174 aa, Escherichia coli; identical to SEQ ID NO: 52987

SEQ ID NO: 53006 - protein, 258 aa, Escherichia coli; identical to SEQ ID NO: 52984

SEQ ID NO: 53007 - protein, 1166 aa, Escherichia coli
METTEELSTFLTAATVDGILGRLLYRGAAWSLMRKNGVLPQNAPPLGATIETDLAEHGFALLRGAMALRAQAGASELTGKAFERAANAFEALVRNGDPESPDRGFRRTIAAAAYHLAGFSAVAFSIFNEIEEDLNVSPGEIAIRHLILRDLDQLRGFVRDWLNYGAHGDEQIAAALQGGDADVDEVLSTILNTTICRALAFFDFALETGEVESFEAARGLLTTAVGLADNAENVPLWWISNLCRHLIDDLWQHSLHQNLPTEPPEGAEERYPDLRRLFISSLYARKTSEVELWPSQREAAQRSTDVTDDLVVALPTSAGKTRVAEIAALMTLSSARRVLIVTPLRALSAQTERTFRKTFAPLGFGVSSLYGASGLSAGDEDALRTREIIIATPEKLDFALRSDQTLIDDVGLIVLDEGHMIGPSEREIRYETLVQRLLRRTDAAERRIVCLSAILPSGDELDDLTAWIRSDEPGEPVRSDWRPTRQRFGALTWRGKDALLRLDLDDDGPFLDKFVAEKPALGKEKKPCPRKNSHLALFAAWEFASQGKRTLIFSTQANWVESYGKQVVDLCKRGYLDSLLEDETPIARALEVGKEWLGEDHPAVASLKVGVAIHHGRLPSPFLRELELLLSEGALKVIVASPTLSQGLNLNAAVLLVPALYRASEKIKGEEFANVAGRAGRAFVDVEGLIVHVMFDKIKWRKKEWRELVASAKARTLKSGLIQIVAEILERLSREGVLDIDDAWEYLANAREAWRSPEEEAVVAERLAAAVEYDASTDDEDETDDEEETIDEEPLSQLVERLDATVFGLIEALDADRADLPKLLDEALRGSLWARQIAREDEDVASLHRKVFEARAALIWKATTPPTRRGHFAMGVGLEAGLLIDAMADELAELIDRADSAALSGDINELADALGGLGERLLFMRPFIPDKANALPPNWKAILRSWVSGEEVSKIGPQNMRAVEDAFTYRLVWALEAVRTRRMSFGWSPDTVAGAAAAAVETGVPQFMMAMLIRAGLPSRRAAMAAIEDAEPIFVTPAEMRAWLESDEITAKTDAGDWPTPDTSALWARFRTEALSGGIQKWSVERYKRLLDTESSPPAGLYRILTDEGDARTWLTTPDYQRIAVFKKPAVDPKPSLFSGQLPGKTRLVDALRVGRGKLRWPTADV

SEQ ID NO: 53008 - protein, 258 aa, Escherichia coli
MGLYEKWCESIKENDERKYYWTYVEKDGGRDDIREDLAETIRSHYERLERIADDVGRLGYKVAAKILREAMPNTPKGRSGDLGEILATELVEEEIGLRVPVRRLRYKDGRNMAMRGDDIIGAGYQGNKLWLLKGEAKSNQKLGKTTVTAARKVLDRDNGRCTPDSLLFVANRLLESNDAGDNALGRDLRDEVGLKSMPADRIDHMLFTVSGNGPHASLKENLEAAGVNRDHYVVNIHVEDHQDFIASMYLEAEDLGDD

SEQ ID NO: 53009 - protein, 1166 aa, Escherichia coli
METTEELSTFLTTATVDGILGRLLYRGAAWSLMRKNGVLPQNAPPLGATIETDLAEHGFALLRGAMALRAQAGASELTGKAFERAANAFEALVRNGDPESPDRGFRRTIAAAAYHLAGFSAVAFSIFNEIEEDLNVSPGEIAIRHLILRDLDQLRGFVRDWLNYGAHGDEQIAAALQGGDADVDEVLSTILNTTICRALAFFDFALETGEVESFEAARGLLTTAVGLADNAENVPLWWISNLCRHLIDDLWQHSLHQNLPTEPPEGAEERYPDLRRLFISSLYARKTSEVELWPSQREAAQRSTDVTDDLVVALPTSAGKTRVAEIAALMTLSSARRVLIVTPLRALSAQTERTFRKTFAPLGFGVSSLYGASGLSPGDEDALRTREIIIATPEKLDFALRSDQTLIDDVGLIVLDEGHMIGPSEREIRYETLVQRLLRRTDAAERRIVCLSAILPSGDELDDLTAWIRSDEPGEPVRSDWRPTRQRFGALTWRGKDALLRLDLDDDGPFLDKFVAEKPALGKEKKPYPRKNSHLALFAAWEFASQGKRTLIFSTQANWVESYGKQVVDLCKRGYLDSLLEDEAPIARALEVGKEWLGEDHPAVASLKVGVAIHHGRLPSPFLRELELLLSEGALKVIVASPTLSQGLNLNAAVLLVPALYRASEKIKGEEFANVAGRAGRAFVDVEGLIVHVMFDKIKWRKKEWRELVASAKARTLKSGLIQIVAEILERLSREGVLDIDDAWEYLANAREAWRSPEEEAVVAERLAAAVEYDASTDDEDETDDEEETIDEEPLSQLVERLDATVFGLIEALDADRADLPKLLDEALRGSLWARQIAREDEDVASLHRKVFEARAALIWKATTPPTRRGHFAMGVGLEAGLLIDAMADELAELIDRADSAALSGDINELADALGGLGERLLFMRPFIPDKANALPPNWKAILRSWVSGEEVSKIGPQNMRAVEDAFTYRLVWALEAVRTRRMSFGWSPDTVAGAAAAVVETGVPQFMMAMLIRAGLPSRRAAMAAIEDAEPIFVTPAEMRAWLESDEITAKTDAGDWPTPDTSALWARFRTEALSGGIQKWSVERYKRLLDTESSPPAGLYRILTDEGDARTWLTTPDYQRIAVFKKPAVDPKPSLFSGQLPGKTRLVDALRVGRGKLRWPTADV

SEQ ID NO: 53010 - protein, 258 aa, Escherichia coli; identical to SEQ ID NO: 52984

SEQ ID NO: 53011 - protein, 1166 aa, Escherichia coli
METTEELSTFLTAATVDGILGRLLYRGAAWSLMRKNGVLPQNAPPLGATIETDLAEHGFALLRGAMALRAQAGASELTGKAFERAANAFEALVRNGDPESPDRGFRRTIAAAAYHLAGFSAVAFSIFNEIEEDLNVSPGEIAIRHLILRDLDQLRGFVRDWLNYGAHGDEQIAAALQGGDADVDEVLSTILNTTICRALAFFDFALETGEVESFEAARGLLTTAVGLADNAENVPLWWISNLCRHLIDDLWQHSLHQNLPTEPPEGAEERYPDLRRLFISSLYARKTSEVELWPSQREAAQRSTDVTDDLVVALPTSAGKTRVAEIAALMTLSSARRVLIVTPLRALSAQTERTFRKTFAPLGFGVSSLYGASGLSAGDEDALRTREIIIATPEKLDFALRSDQTLIDDVGLIVLDEGHMIGPSEREIRYETLVQRLLRRTDAAERRIVCLSAILPSGDELDDLTAWIRSDEPGEPVRSDWRPTRQRFGALTWRGKDALLRLDLDDDGPFLDKFVAEKPALGKEKKPYPRKNSHLALFAAWEFASQGKRTLIFSTQANWVESYGKQVVDLCKRGYLDSLLEDETPIARALEVGKEWLGEDHPAVASLKVGVAIHHGRLPSPFLRELELLLSEGALKVIVASPTLSQGLNLNAAVLLVPALYRASEKIKGEEFANVAGRAGRAFVDVEGLIVHVMFDKIKWRKKEWRELVASAKARTLKSGLIQIVAEILERLSREGVLDIDDAWEYLANAREAWRSPEEEAVVAERLAAAVEYDASTDDEDETDDEEETIDEEPLSQLVERLDATVFGLIEALDADRADLPKLLDEALRGSLWARQIAREDEDVASLHRKVFEARAALIWKATTPPTRRGHFAMGVGLEAGLLIDAMADELAELIDRADSAALSGDINELADALGGLGERLLFMRPFIPDKANALPPNWKAILRSWVSGEEVSKIGPQNMRAVEDAFTYRLVWALEAVRTRRMSFGWSPDTVAGAAAAAVETGVPQFMMAMLIRAGLPSRRAAMAAIEDAEPIFVTPAEMRAWLESDEITAKTDAGDWPTPDTSALWARFRTEALSGGIQKWSVERYKRLLDTESSPPAGLYRILTDEGDARTWLTTPDYQRIAVFKKPAVDPKPSLFSGQLPGKTRLVDALRVGRGKLRWPTADV

SEQ ID NO: 53012 - protein, 259 aa, Escherichia coli; identical to SEQ ID NO: 52976

SEQ ID NO: 53013 - protein, 1174 aa, Escherichia coli; identical to SEQ ID NO: 52987

SEQ ID NO: 53014 - protein, 269 aa, Klebsiella oxytoca HKOPL1
MLPDHLKGLHLRSAGLITVEGRTINVWEFSPPTDPAILDSWALHFRRQYCTDQELPELLSGTGMTIEQYLNAHIFPDKVKAPGPSIRSGDFAEFLISDYLEFTLNLWVPRGKYADKASNNESVKGVDILGFHQLDIATPNRGDALYAFEVKASLSGSIYGGQLQNAVDDGSNDQHIRQAFTLNATKRRYLREGKTLEVSRIARFQNPADNPYKYYSGAVAVLCYTAFNEEELAKTLADTHSNEAELYLMVVRADLQMKLVHELYERACK

SEQ ID NO: 53015 - protein, 1046 aa, Klebsiella oxytoca HKOPL1
MKAGFNSKRLFGITRSKGKMYEFGLDESQHLRMPEGSDPLQLFIMTVATLGDVTGVLAELSQPLVSLPPEPQAELNFCASFFDAVLDSGFAQGLESTTLLLASAAYYVARRPGSSLVLARRIEPKEEDNNVEHLLQWLLKADWRTYWLLDDKRYGPLLTSFSRAVANHFAGGTQLQEIDVLMKLLRNEAYKMGTPEEVLYADVAISICRMRLAASAWVTLSQYSGLSVDHWRPVIQRERFPKELWPSQILLGERGIFRGASGLIQMPTSAGKTRSIELVLRSAFMSGRTKLAVVVAPFRALCHEIALSLRQDLAGDDIKVNELTDALQIDFVEQIADLLGSAPPSTSNVLVLTPEKFLYVLRQSPQALKHIGLVVYDEGHQFDTGVRGITYELLLTEIKGLLPDTAQTLLISAVMQNPQAIASWLMGEDKAQVIDGATLLPTSRSVAFASWTESLGQLMFHENGYDKEDYFVPRIIEAAQLSGIKADSSIFPTRTKSSDVSLYLGLRVISKGSVAIFCGTKLIANGIAKRAVQIADAGYNTLWPSTYANPEEVMALKTIIEGNFGSNSFLLKAAKLGIYTHHSNTPQGIRLALEHGMQKGLINFIACTSTLAQGVNLPIRYLIVQGVYQGVGRVKVRDFQNLIGRAGRAGMHTEGVVIFADSTVWDRRKNWREGWKFQSAVELLSPDRAEGVTSSLLLLLKPFALPRNQVLPFAGGDLLDFMDKEVDWESWAHLVADSDPRLSKPQKDALVKALLSSLAERKKMTHTLESYLMANCAAMDATAFEQRAGELARETLAYSLASAEEAEKLEEYFRLVARRIESVESSPLKQAFFGKTLLGAKQTKFIEVWSGEHRAMLLALDSCHAWLNAVWPLLTELCDNRFFRSVEPAGAGFEIALSWMCGMSYGEIFKKASLMQVKKKAGKRKQKVSDDDILKFLESTLAFDCSLILAALAQFLFSPEEIIGEQGASLAHFQKSLKNGLPDALSMSIFEAGFADRFISQAIRDALLQDGYGGSSFDEARQNHLSVIEQVVKGTPAYFNYVLSSY

SEQ ID NO: 53016 - protein, 259 aa, Klebsiella oxytoca
MVPFYDWCDSADMPLGNHHVRVMTGRPGEIATGIQMTARAIPAHYTTEERIAAALAKLGKTAAAQMLNDLLPQTAHIRSGDLGEIYATEWIDAYSGYRAPIKRLRWKDHRNMAMRGDDVIGMLLDAETQRLSFLKTEAKSRINLRAQTLEEARSGLDKDSGLPSSHALSFISARLMEIGTDAPLVDAIDEALYRHGIPPESVKHLLFTFSGNPPQTLLTQALQAYPGPIGQWGVGLHIDNHAAFVGAVYDRVIADANNP

SEQ ID NO: 53017 - protein, 1177 aa, Klebsiella oxytoca; identical to SEQ ID NO: 52947

SEQ ID NO: 53018 - protein, 260 aa, Klebsiella pneumoniae UHKPC57
MGLYEKWCDSTKEQEQRKYYWIYVEKDGGRDDIRDDLAEIIRSHYDRLERIVEDVSRLGYKVAAKILSEAMPQTSRSRSGDLGEILATELVEEEIGLRVPVRRLRYKDGRNMAMRGDDFIGAGYDGNGEKLWLLKGEAKSNRVLGKATVTSARKVLNRDNGRCTPDSLLFVANRLLESQDPDDNELGRSLRDEVGLKLLPADRIDHMLFTMSGNGPHASLKKDLDATSTNRDHYVVNIHIEDHQDFIAAMYQEAEDLGDD

SEQ ID NO: 53019 - protein, 1168 aa, Klebsiella pneumoniae UHKPC57
METIDELTSFLAAATADGILSRLLYRGTAWSLMRREGVLPPNAPQFGATIETDLAEHGFALLRGAMALRAQAGASNLTSKAFERAANAFEALIRNGDPEAPGRGFHRTIAAAAYHLAGFSAVAYSLFNEMSQDLNASPGEMAIRHLILRDLGQLRTFVRGWLDDETHDDEQIAEVLRGENGDIDEVLATILNTTICRALAHFDFALETGESEPIEKARALLAVAVSLADNSENVPLWWISNLCRHLIDDLWQHSLHQNLPTEPPEGAEDKYPDLRQLFISSLYARKTSEVELWPSQLEAAQRSTDLTDDLVVALPTSAGKTRVAEIAVLMTLSSERRVLIVTPLRALSAQTERSFRKTFAPLGFSVSSLYGASGLSTGDEDALRSREIVIATPEKLDFALRSDPSLIDDVGLIVLDEGHMIGPSEREIRYETLVQRLLRRADAGERRIVCLSAILPSGDELDDLTAWIRSDEPGEPVRSDWRPTRQRFGALIWRGEDALLRLDLDDNGPFLDQFVVRKPARGRERKPYPRKNSHLALFVAWEFAGQGKRTLIFSTQANWVESYGKQVVDLCRRGYLDSLLGDNALIARALEVGKEWLGEDHPAVACLRVGVAIHHGRLPSPFLREVEVLLSEGVLKVIVASPTLSQGLNLNAAVLLVPTLYRASEKIKGEEFANVAGRAGRAFVDVEGLIVHVMFDKINWRKEEWRELVVSAKARTLKSGLIQIVAEILVRLSREGVLGRDDAWEYLANAREAWRSPVEETAVAERLAAGGEYEAGDDDEGADSDDDKEETIDEEPLSQIVERLDATVFGLLEALDADRNDLPKLLDDALRGSLWARQIAREDEDVIPLHKKVFEARAALIWKTTTAQARRGHFAMGVGLEAGLTIDAMADELADLLDRADAAALNGDVNELVETLGGLGERLLFMRPFVPDNANALPTNWKAILRSWVSGEDVVNIGPQNMRVVEEAFTYRLVWALEAVRVRRMSLGWSPETVVGGAAAVVETGVPQFMMAMLIRAGLPSRRAAMAAIKCANPVFVTPFEMRAWLESDEITAYTVAGDWPTPDTASLWAHFRTEALRAGIQKWSVEHYKRLLDTETAPIAGLYRIVTDEGDGRTWLATPDYSRIAAFKKSAVDPKPSLFSGRVPGNTRLVDVLRIGRGKLRWPPADA

SEQ ID NO: 53020 - protein, 260 aa, Klebsiella pneumoniae UHKPC179; identical to SEQ ID NO: 53018

SEQ ID NO: 53021 - protein, 1168 aa, Klebsiella pneumoniae UHKPC179; identical to SEQ ID NO: 53019

SEQ ID NO: 53022 - protein, 260 aa, Klebsiella pneumoniae 303K; identical to SEQ ID NO: 53018

SEQ ID NO: 53023 - protein, 1168 aa, Klebsiella pneumoniae 303K; identical to SEQ ID NO: 53019

SEQ ID NO: 53024 - protein, 257 aa, Klebsiella pneumoniae 909957
MLYQRWCDITIQEQDNKQLWRLSERDGGRAAIEATLTTRIRAHYDNLAEIAEDVRELGYPGAAAILAERMPRSTRARSGELGEILATELVEEHLEFEVPIRRLRYKDGREMALRGDDFVGLKLDDQQNLHYLKGESKSRVNLANATISEARKALSRDDGRPTATSLLFVADRLMEGEGERRQMGRRIRNEVASRAAPQGRTSHMLFTLSGNAAPQALYDDLAAADLVRPHLSANLRIEDHQAFILACYERALALGND

SEQ ID NO: 53025 - protein, 1133 aa, Klebsiella pneumoniae 909957
METTEELTAFLLDITQDGYRGRLQARGQARALIRHEGNLPPDAPAFSEGIDSDLADYGFSVLRASLALRELGGDAVIWRKGFVQAGGAFEALVQNGSQADASRGFYRTVGAASYHLANYSALAFSLLSQLQADQNRSPAEDALALLIVRDLQGLVQRAREWLSSPANRDEGIARAAAEGALDPDDIVSRVATSTMFRALVFFEFALQTGQESLVVEARNLLKRAISLTKAASAVSLWWILRITVNLIDDLWASSLHKVLPSEGPPGSQDYAQLRKLFVSELYCRRSSEVELWPSQLLAAQRAVDVSDDLVVALPTSAGKTRIAEIAALMALACGKRVLIVTPLRALSAQTERSFRKTFTPLGFSVSSLYGSSGVAGNDEDALREQNIVIATPEKLDFALRNDPDIINDVGLIVLDEGHLIGPSEREIRYENLVQRLLRRTDHGNRRIVCLSAILPAGDQLNDLTAWIRSDAPGVPIQSSWRPTRQRFGTLSWLGNSARLSFDLEPNGPFIRHFVPEVPPIRPRRTAFPKDNKELTLAAAWKFSEQGKRALVFCTQRDHVEGFAETALDLQRRGFLPSLLANAQEVERAMAVGREWLGAEHPAVRCLAIGVAIHHGRLPGPFLREVETLLAAGVLRVTVASPTLAQGLNLNAAVLLIPNLYRAGTLITGEEFANVAGRAGRAFVDLEGLVIHVMHQPENWRHQRWRELVTSAKARSLSSGIIVVVNEVIRRLATSGVFARGDAMDYLSSTQDAWFPDAVDDEMESDSMESLIERLDTTVLGLVEALDAQSADLPRLLDEALAGSLWARQIAHLDGAEKQKQVWILLSRAQLIWNKTTVEQRKGQFAMGVGLESGLAIDALAVVLTELLDRADAAALASDADALIAALIGMGERLLAIRPFVPDDPLPANWRDLLGAWVRGQDVAAIGQEGMRFVDDAFVYRLVWAIEAIRMNRRINGGESELPVEGAAAACLEAGLPSNAMAMLVRAGLPSRVAAKTAVEQLAPAFTNRTEMKTWLRSEEVAGFDHVPGWPTLETHTIWQQFRHDVVSSVDGRWASQEWTMQWATDSTVPLRIDVDPQDGQVSIATPDFSQLTTIRQRLQAELPSLLEVESLQSGTSVTIRRIGKGEARWVDKD

SEQ ID NO: 53026 - protein, 260 aa, Klebsiella pneumoniae BIDMC 40; identical to SEQ ID NO: 53018

SEQ ID NO: 53027 - protein, 1168 aa, Klebsiella pneumoniae BIDMC 40; identical to SEQ ID NO: 53019

SEQ ID NO: 53028 - protein, 279 aa, Klebsiella pneumoniae MGH 36
MVTMTAGQPYSAWLKKAEHSITTSDGNEIEVYELEIDLEAGLVLSAWAKHFREHYCLDSQIDRLRRGTNKSRAEYLRDLVFPDESEDFGPATRSGDFAEILIADLLESHFGFWVPRTRYDNKMVRNESPKGTDVLAFKFDGIGPSRPSTKDILISFESKAQLSGKKAKPRLQDAVIDSIKDVYRISESLNAMKRRLIDRQDEEGADRVERFQEGLDVPYVRMTGAAAVFCSSLYDSVHISETTDCTSHENIKNLMLVVIHAKSLMKFVHALYWRAENEA

SEQ ID NO: 53029 - protein, 1061 aa, Klebsiella pneumoniae MGH 36
MKPKKRARYAAAVTLSKGKMFEYGVPEGDHIELPDDLDLQMQFPLAVGTVGDFASEVVAKTIGNSIEAQSQTPLDEVIFSAQVLQAFDDSLLNKELSFNLRILAAAGFYLGDVPGNASVQLSKLSQLDFPKHDTLAIAVKTAMDRPWEHTNETLESSRAKDILDVLCQHFRNGRNGRQKAYDAIKSLREWAYSHASAHDLLMADLLGAISATRIANSAWTLLPRYSNLPQEKWETYLSRSMSIKEMWPSQRLLGEAGLYRGISGVVQMPTSAGKSRATELIIRSAFLSARTKLALVIAPFRALCQEIANDLEKAFKDDGYDVNQPSDALQPDVEFDFSNLSDFLDLESGIFDSEVESKPQVIILTPEKLLYILRQEPDIVQKAGLVVYDEGHQFDTGSRGVTYELLLTSIKRMLHENAQSVLISAVIQNAASVAAWLLNDGSKVVSSRALQASRLIAFASLPKGKDGQLQFNVASDSDQKFFVPRVIVSEKMPRLPKERKDRFFPTQESGSIALYLSLRLLKNGGVAIFTGRKSSAAKIVREAAEDIFRRGISLEPPSAHSDPDEIRRFVYLFERNFGANAYLTQAAALGIFAHHGNTPQGVRLAIEYAMRQSLIRLIICTSTLAQGVNLPIRYLLVTSAMQGRESIKVRDFHNLMGRAGRAGMYGEGTVIFTDPRLYDERFAKTYRWQETINLINPDSAEPTGSTLLSLFDPLRNDLGTVTLSSSSSAEVATYIVNDWETLLKWVESVPINIPKQNFSVASLIEQLKSKKKIIEAIESFLMTYRSDVQPETFVDNSRELVTETLAYSLATEEQQILLTDIFESVARRIELFVPDTAIQKRFGRTLLGIDQALAIESWVTTNANALEGATSADHLFDVLWPLLVLLSNEKRLSDTVPNGALKTLALGWLAGDSFAALVQRLDKLGASYPYGANQRKFDLDVVVDLCEQTFGFEFALLLAAVKESFLAFSSEQAGEVFREYVDLLQKRLKYGLPNQSCIAFFEAGFAERVIAQCLAEGTTQGAIQVSFDARHMIRQNPERFEVMLQGFPSYFFDVFKTITAP

SEQ ID NO: 53030 - protein, 259 aa, Klebsiella pneumoniae MGH 21; identical to SEQ ID NO: 52976

SEQ ID NO: 53031 - protein, 1174 aa, Klebsiella pneumoniae MGH 21; identical to SEQ ID NO: 52987

SEQ ID NO: 53032 - protein, 279 aa, Klebsiella pneumoniae UCI 18; identical to SEQ ID NO: 53028

SEQ ID NO: 53033 - protein, 1061 aa, Klebsiella pneumoniae UCI 18
MKPKKRARYAAAVTLSKGKMFEYGVPEGDHIELPDDLDLQMQFPLAVGTVGDFASEVVAKTIGNSIEAQSQTPLDEVIFSAQVLQAFDDSLLNKELSFNLRILAAAGFYLGDVPGNASVQLSKLSQLDFPKHDTLAIAVKTAMDRPWEHTNETLESSRAKDILDVLCQHFRNGRNGRQKAYDAIKSLREWAYSHASAHDLLMADLLGAISATRIANSAWTLLPRYSNLPQEKWETYLSRSMSIKEMWPSQRLLGEAGLYRGISGVVQMPTSAGKSRATELIIRSAFLSARTKLALVIAPFRALCQEIANDLEKAFKDDGYDVNQPSDALQPDVEFDFSNLSDFLDLEYGIFDSEVESKPQVIILTPEKLLYILRQEPDIVQKAGLVVYDEGHQFDTGSRGVTYELLLTSIKRMLHENAQSVLISAVIQNAASVAAWLLNDGSKVVSSRALQASRLIAFASLPKGKDGQLQFNVASDSDQKFFVPRVIVSEKMPRLPKERKDRFFPTQESGSIALYLSLRLLKNGGVAIFTGRKSSAAKIVREAAEDIFRRGISLEPPSAHSDPDEIRRFVYLFERNFGANAYLTQAAALGIFAHHGNTPQGVRLAIEYAMRQSLIRLIICTSTLAQGVNLPIRYLLVTSAMQGRESIKVRDFHNLMGRAGRAGMYGEGTVIFTDPRLYDERFAKTYRWQETINLINPDSAEPTGSTLLSLFDPLRNDLGTVTLSSSSSAEVATYIVNDWETLLKWVESVPINIPKQNFSVASLIEQLKSKKKIIEAIESFLMTYRSDVQPETFVDNSRELVTETLAYSLATEEQQILLTDIFESVARRIELFVPDTAIQKRFGRTLLGIDQALAIESWVTTNANALEGATSADHLFDVLWPLLVLLSNEKRLSDTVPNGALKTLALGWLAGDSFAALVQRLDKLGASYPYGANQRKFDLDVVVDLCEQTFGFEFALLLAAVKESFLAFSSEQAGEVFREYVDLLQKRLKYGLPNQSCIAFFEAGFAERVIAQCLAEGTTQGAIQVSFDARHMIRQNPERFEVMLQGFPSYFFDVFKTITAP

SEQ ID NO: 53034 - protein, 269 aa, Klebsiella pneumoniae BIDMC 51
MLPDHLKGLHLRSAGLITVEGRTINVWEFSPPTDPAILDSWALHFRRQYCTDQELPELLCGTGMTIEQYLNAHIFPDKVKAPGPSIRSGDFAEFLISDYLEFTLNLWVPRGKYADKASNNESVKGVDILGFHQLDIATPNRGDALYAFEVKASLSGGIYGGQLQNAVDDGSNDQHIRQAFTLNATKRRYLREGKTLEVSRIARFQNPADNPYTYYSGAVAVLCNTAFNEEELAKTLANTHSNEAALYLMVVRSDLQMKLVHELYERACK

SEQ ID NO: 53035 - protein, 1046 aa, Klebsiella pneumoniae BIDMC 51
MKAGFNSKRLFGITRSKGKMYEFGLDESLHLRMPEGSDPLQLFIMTVATLGDVTGVLAELSLPLVSLPPEPQAELNFCASFFDAVLDSGFAQGLESTTLLLAYAAYYVARRPGSSLVLARRIEPKEEDNNVEHLLQWLLKADWRTYWLLDDKRYGPLLTSFSRAVANHFAEGTQLQEIDVLMKLLRNEAYKMGTPEEVLYADVAISICRMRLAASAWVTLSQYSGLSVDHWRPVIQRERFPKELWPSQILLGERGIFRGDSGLIQMPTSAGKTRSIELVLRSAFMSGRTKLAVVVAPFRALCHEIALSLRQDLAGDDIKVNELTDALQIDFVEQIADLLGSAPPSTSNVLVLTPEKFLYVLRQSSQALKHIGLVVYDEGHQFDTGVRGITYELLLTEIKGLLPDTAQTLLISAVMQNPQAIASWLMGEDKAQVIDGATLLPTSRSVAFASWTESLGQLMFHENGYDKEDYFVPRIIEAAQLSGIKADSSIFPTRTKSSDVSLYLGLRVISKGSVAIFCGTKLIANGIAKRAVQIADAGYNTLWPSTYANPEEVMALKTIIEGNFGSNSFLLKAAKLGIYTHHSNTPQGIRLALEHGMQKGLINFIACTSTLAQGVNLPIRYLIVQGVYQGVGRVKVRDFQNLIGRAGRAGMHTEGVVIFADSTVWDRRKNWQEGWKFQSAVELLSPDRAEGVTSSLLLLLKPFALPRNQELPFAGGDLLDFMDKEVEWEGWANLVADSDPRLSKSQKDALVKALLSSLAERKKMTHTLESYLMANCAAMDATAFEQRAGELARETLAYSLASAEEAEKLEEYFRLVARRIESVESSPLKQAFFGKTLLGAKQTKFIEVWSGEHRAMLLALDSSNGWLNAVWPLLTELCDNRFFRSVEPAGAGFEIALSWMCGMSYGEIFKKASQMQVKKKAGKRKQKVSDDDILKFLESTLAFDCSLILAALAQFLFSPEEIIGEQGASLAHFQKSLKNGLPDVLSMSIFEAGFADRFISQAIRDALLQDGYGGSSFDEARQNHLSVIEQVVKGTPAYFNYVLSSY

SEQ ID NO: 53036 - protein, 260 aa, Klebsiella pneumoniae MGH 63; identical to SEQ ID NO: 53018

SEQ ID NO: 53037 - protein, 1168 aa, Klebsiella pneumoniae MGH 63; identical to SEQ ID NO: 53019

SEQ ID NO: 53038 - protein, 260 aa, Klebsiella pneumoniae MGH 75; identical to SEQ ID NO: 53018

SEQ ID NO: 53039 - protein, 1168 aa, Klebsiella pneumoniae MGH 75; identical to SEQ ID NO: 53019

SEQ ID NO: 53040 - protein, 279 aa, Klebsiella pneumoniae MGH 64; identical to SEQ ID NO: 53028

SEQ ID NO: 53041 - protein, 1061 aa, Klebsiella pneumoniae MGH 64; identical to SEQ ID NO: 53029

SEQ ID NO: 53042 - protein, 260 aa, Klebsiella pneumoniae MGH 65; identical to SEQ ID NO: 53018

SEQ ID NO: 53043 - protein, 1168 aa, Klebsiella pneumoniae MGH 65; identical to SEQ ID NO: 53019

SEQ ID NO: 53044 - protein, 259 aa, Klebsiella pneumoniae MGH 70; identical to SEQ ID NO: 52976

SEQ ID NO: 53045 - protein, 1174 aa, Klebsiella pneumoniae MGH 70; identical to SEQ ID NO: 52987

SEQ ID NO: 53046 - protein, 260 aa, Klebsiella pneumoniae BIDMC 33B; identical to SEQ ID NO: 53018

SEQ ID NO: 53047 - protein, 1168 aa, Klebsiella pneumoniae BIDMC 33B; identical to SEQ ID NO: 53019

SEQ ID NO: 53048 - protein, 259 aa, Klebsiella pneumoniae subsp. pneumoniae PittNDM01; identical to SEQ ID NO: 52976

SEQ ID NO: 53049 - protein, 1174 aa, Klebsiella pneumoniae subsp. pneumoniae PittNDM01; identical to SEQ ID NO: 52987

SEQ ID NO: 53050 - protein, 260 aa, Klebsiella pneumoniae; identical to SEQ ID NO: 53018

SEQ ID NO: 53051 - protein, 1168 aa, Klebsiella pneumoniae; identical to SEQ ID NO: 53019

SEQ ID NO: 53052 - protein, 260 aa, Klebsiella pneumoniae; identical to SEQ ID NO: 53018

SEQ ID NO: 53053 - protein, 1168 aa, Klebsiella pneumoniae; identical to SEQ ID NO: 53019

SEQ ID NO: 53054 - protein, 260 aa, Klebsiella pneumoniae; identical to SEQ ID NO: 53018

SEQ ID NO: 53055 - protein, 1168 aa, Klebsiella pneumoniae; identical to SEQ ID NO: 53019

SEQ ID NO: 53056 - protein, 276 aa, Klebsiella pneumoniae
MTAGQPYSAWLKKAEHSITTSDGNEIGVYELEIDLEAGLVLSAWAKHFREHYCLDSQIDRLRRGTNKSRAEYLRDLVFPDESEDFGPATRSGDFAEILIADLLESHFGFWVPRTRYDNKMVRNESPKGTDVLAFKFDGIGPSRPSTKDILISFESKAQLSGKKAKPRLQDAVIDSIKDVYRISESLNAMKRRLIDRQDEEGADRVERFQEGLDVPYVRMTGAAAVFCSSLYDSVHISETTDCTSHENIKNLMLVVIHAKSLMKFVHALYWRAENEA

SEQ ID NO: 53057 - protein, 1042 aa, Klebsiella pneumoniae
MFEYGVPEGDHIELPDDLDLQMQFPLAVGTVGDFASEVVAKTIGNSIEAQSQTPLDEVIFSAQVLQAFDDSLLNKELSFNLRILAAAGFYLGDVPGNASVQLSKLSQLDFPKHDTLAIAVKTAMDRPWEHTNETLESSRAKDILDVLCQHFRNGRNGRQKAYDAIKSLREWAYSHASAHDLLMADLLGAISATRIANSAWTLLPRYSNLPQEKWETYLSRSMSIKEMWPSQRLLGEAGLYRGISGVVQMPTSAGKSRATELIIRSAFLSARTKLALVIAPFRALCQEIANDLEKAFKDDGYDVNQPSDALQPDVEFDFSNLSDFLDLESGIFDSEVESKPQVIILTPEKLLYILRQEPDIVQKAGLVVYDEGHQFDTGSRGVTYELLLTSIKRMLHENAQSVLISAVIQNAASVAAWLLNDGSKVVSSRALQASRLIAFASLPKGKDGQLQFNVASDSDQKFFVPRVIVSEKMPRLPKERKDRFFPTQESGSIALYLSLRLLKNGGVAIFTGRKSSAAKIVREAAEDIFRRGISLEPPSAHSDPDEIRRFVYLFERNFGANAYLTQAAALGIFAHHGNTPQGVRLAIEYAMRQSLIRLIICTSTLAQGVNLPIRYLLVTSAMQGRESIKVRDFHNLMGRAGRAGMYGEGTVIFTDPRLYDERFAKTYRWQETINLINPDSAEPTGSTLLSLFDPLRNDLGTVTLSSSSSAEVATYIVNDWETLLKWVESVPINIPKQNFSVASLIEQLKSKKKIIEAIESFLMTYRSDVQPETFVDNSRELVTETLAYSLATEEQQILLTDIFESVARRIELFVPDTAIQKRFGRTLLGIDQALAIESWVTTNANALEGATSADHLFDVLWPLLVLLSNEKRLSDTVPNGALKTLALGWLAGDSFAALVQRLDKLGASYPYGANQRKFDLDVVVDLCEQTFGFEFALLLAAVKESFLAFSSEQAGEVFREYVDLLQKRLKYGLPNQSCIAFFEAGFAERVIAQCLAEGTTQGAIQVSFDARHMIRQNPERFEVMLQGFPSYFFDVFKTITAP

SEQ ID NO: 53058 - protein, 260 aa, Klebsiella pneumoniae; identical to SEQ ID NO: 53018

SEQ ID NO: 53059 - protein, 1168 aa, Klebsiella pneumoniae; identical to SEQ ID NO: 53019

SEQ ID NO: 53060 - protein, 259 aa, Klebsiella pneumoniae MRSN 3562; identical to SEQ ID NO: 52976

SEQ ID NO: 53061 - protein, 1174 aa, Klebsiella pneumoniae MRSN 3562; identical to SEQ ID NO: 52987

SEQ ID NO: 53062 - protein, 259 aa, Klebsiella pneumoniae
MANFEDWCDSTERNISDHYLQSIKARDAEFMFGVQVMAALIPEHYASSRNIANAFEALGKPGLAAYIAGKLPETKQIRSGDLGEIFATEWINARGNGYKTPIKRLRWKDHRNMSMRGEDVIGIYIDQSSQQLFFLKTEAKSRAKMTGEVVSEARDNLNKEQGLPSSHALMFIADRLNEQGEELLAKAILNATLRQGIVPGCVRHLIFLLSGNSSETMLTTSIEKYTGQNNQWGVCIRIARHSEFIAATFEKVISDASNS

SEQ ID NO: 53063 - protein, 1174 aa, Klebsiella pneumoniae
MPATADEIIEAIKEASAVGFRGRLIARGQARSVIWRDGDLPPDAPEFSALLSQDLQGYAYALIDLGLRLRELNGDDAYVRIAFEQAGTALESAIAKGKRDSRDTDFHFVMAAASYHLAHLSARAYSLLAMVGQDDNFSPIERALTQLIRRDLRTLRDNALGFRLRGDGSDVKITEILQARLNLPQDEKGESESEEDILFDGLDLALTDAYMSAISLYLLAVERGESRLLSKAIEKLRISLSICAQFNMLPQWWLNFITIHLLSDLWSDTFHERLPLVPVGGDAAEWPALRELFIALLQRRPRAEIDLWPSQREAAGRSVNDNDDLVVSLPTSAGKTRIAELCILRCLAGGKRVVFITPLRALSAQTEATLSRTFGPLGKTISMLYGSIGVSGMDEDAIRQRDIVVATPEKLDFALRNDPSIINDVGLFIFDEGHMIGADEREVRYEVQIQRLLRRQDADTRRIVCLSAILPDGEQLDDFAGWLRRDKPGGPIKNNWRPTRLQFGEVIWSAPAGRLNLSVGYEAAWVSRFIVSRQPPKVKLPNKKQRTKMFPSDNKELCLATAWRLIEDGQTVLIYCPLRRSVEPFAETIVDLHQRGLLPSLFDAAPDILDTAISLGEEWLGAHSSILACLRLGVALHHGALPTAYRKEIERLLRDGVLKVTISSPTLAQGLNLSATAIVMHSLHRNRELIKVSEFRNVIGRAGRAYVDVEGLVIYPIFDKVNKRQTNWHTLTSDMGAREMESGLIQLVCVLLIRMHTRLGGDLKALTEYVTNNAVAWEFPEIMTESPQERDIAQAIWEKQLSTLDTAILSLLGENDIPDDQIETALDDILQSSLWQRSLQRYRDENERILLKSGLLSRSRYIWQRSTAAGRRGYFLSGVGLTTGLRLDAIAAKANQLLIDANAAIMGGDAEEAIAAITALAEEVFTFYPFIPDPLPGDWRGILRSWLLGEPMTNVANTQASETLQFVENGLVYRLPWAMEAIRVRATANGDLIGDTDTTLDDYELGFAVAAVETGTLSRSSSLLIQAGFSSRLAAIKVVADTTADFQSGQELRRWLNSEEVISHTDNHDWPTPETRVMWLEFLGSLSPKGSQVWSRHRYNGMVDWRDTPAVIGTPLQLYTVDGIHHVLADDGTPLGSINGRINTNRRGLLRVEVDDENGRAMFDYLGPDDFIST

SEQ ID NO: 53064 - protein, 260 aa, Klebsiella pneumoniae; identical to SEQ ID NO: 53018

SEQ ID NO: 53065 - protein, 1168 aa, Klebsiella pneumoniae; identical to SEQ ID NO: 53019

SEQ ID NO: 53066 - protein, 259 aa, Klebsiella pneumoniae; identical to SEQ ID NO: 52976

SEQ ID NO: 53067 - protein, 724 aa, Klebsiella pneumoniae
MPATADEIIEAIKEASAVGFRGRLIARGQARSVIWRDGDLPPDAPEFSALLSQDLQGYAYALIDLGLRLRELNGDDAYARIAFEQAGTALESAIAKGKRDSRDTDFHFVMAAASYHLAHLSARAYSLLAMVGQDDNFSPIERALTQLIRRDLRTLRDNALGFRLRGDGSDVKITEILQARLNLPQDENGDSESEEDILFDGLDLALTDAYMSAISLYLLAVERGESRLLSRAIEKLRISLSICAQFNMLPQWWLNFITIHLLSDLWSDTFHERLPLVPVGGDAAEWPALRELFIALLQRRPRAEIDLWPSQREAAGRSVNDNDDLVVSLPTSAGKTRIAELCILRCLAGGKRVVFITPLRALSAQTEATLSRTFGPLGKTISMLYGSIGVSGMDEDAIRQRDIVVATPEKLDFALRNDPSIINDVGLFIFDEGHMIGADEREVRYEVQIQRLLRRQDADTRRIVCLSAILPDGEQLDDFAGWLRRDKPGGPIKNNWRPTRLQFGEVIWSAPAGRLNLSVGYEAAWVSRFIVSRQPPKVKLPNKKQRTKMFPSDNKELCLATAWRLIEDGQTVLIYCPLRRSVEPFAETIVDLHQRGLLPSLFDAAPDILDTAISLGEEWLGAHSPILACLRLGVALHHGALPTAYRKEIERLLRDGVLKVTISSPTLAQGLNLSATAIVMHSLHRNRELIKVSEFRNVIGRAGRAYVDVEGLVIYPIFDKVNKR

SEQ ID NO: 53068 - protein, 279 aa, Klebsiella pneumoniae; identical to SEQ ID NO: 53028

SEQ ID NO: 53069 - protein, 1061 aa, Klebsiella pneumoniae; identical to SEQ ID NO: 53029

SEQ ID NO: 53070 - protein, 260 aa, Klebsiella pneumoniae; identical to SEQ ID NO: 53018

SEQ ID NO: 53071 - protein, 1168 aa, Klebsiella pneumoniae; identical to SEQ ID NO: 53019

SEQ ID NO: 53072 - protein, 260 aa, Klebsiella pneumoniae; identical to SEQ ID NO: 53018

SEQ ID NO: 53073 - protein, 1168 aa, Klebsiella pneumoniae; identical to SEQ ID NO: 53019

SEQ ID NO: 53074 - protein, 260 aa, Klebsiella pneumoniae; identical to SEQ ID NO: 53018

SEQ ID NO: 53075 - protein, 1168 aa, Klebsiella pneumoniae; identical to SEQ ID NO: 53019

SEQ ID NO: 53076 - protein, 279 aa, Klebsiella pneumoniae; identical to SEQ ID NO: 53028

SEQ ID NO: 53077 - protein, 1061 aa, Klebsiella pneumoniae; identical to SEQ ID NO: 53033

SEQ ID NO: 53078 - protein, 260 aa, Klebsiella pneumoniae; identical to SEQ ID NO: 53018

SEQ ID NO: 53079 - protein, 1168 aa, Klebsiella pneumoniae; identical to SEQ ID NO: 53019

SEQ ID NO: 53080 - protein, 260 aa, Klebsiella pneumoniae; identical to SEQ ID NO: 53018

SEQ ID NO: 53081 - protein, 1168 aa, Klebsiella pneumoniae; identical to SEQ ID NO: 53019

SEQ ID NO: 53082 - protein, 259 aa, Klebsiella pneumoniae; identical to SEQ ID NO: 52976

SEQ ID NO: 53083 - protein, 1174 aa, Klebsiella pneumoniae; identical to SEQ ID NO: 52987

SEQ ID NO: 53084 - protein, 259 aa, Klebsiella pneumoniae subsp. pneumoniae; identical to SEQ ID NO: 52976

SEQ ID NO: 53085 - protein, 1174 aa, Klebsiella pneumoniae subsp. pneumoniae; identical to SEQ ID NO: 52987

SEQ ID NO: 53086 - protein, 259 aa, Klebsiella pneumoniae
MANFEDWCDSTERNISDHYLQSITARDAECMFGVQVMAALIPEHYASPRNIANAFEALGKLGLAAYIAGKLPETKQIRSGDLGEIFATEWINARSNGYKTPIKRLRWKDHRNMSMRGEDVIGIYIDQSSQQLFFLKTEAKSRAKMTGEVVSEARDNLNKEQGLPSSHALMFIADRLNEQGEELLAKAILNATLRQGIVPGCVRHLIFLLSGNSSETMLTTSIEKYTGQNNQWGVCLRIARHGEFIAATFEKVISDASNS

SEQ ID NO: 53087 - protein, 1174 aa, Klebsiella pneumoniae; identical to SEQ ID NO: 52987

SEQ ID NO: 53088 - protein, 259 aa, Klebsiella pneumoniae; identical to SEQ ID NO: 52946

SEQ ID NO: 53089 - protein, 1177 aa, Klebsiella pneumoniae; identical to SEQ ID NO: 52947

SEQ ID NO: 53090 - protein, 259 aa, Klebsiella pneumoniae; identical to SEQ ID NO: 52946

SEQ ID NO: 53091 - protein, 1177 aa, Klebsiella pneumoniae; identical to SEQ ID NO: 52947

SEQ ID NO: 53092 - protein, 257 aa, Klebsiella pneumoniae; identical to SEQ ID NO: 53024

SEQ ID NO: 53093 - protein, 1133 aa, Klebsiella pneumoniae; identical to SEQ ID NO: 53025

SEQ ID NO: 53094 - protein, 259 aa, Klebsiella pneumoniae; identical to SEQ ID NO: 52976

SEQ ID NO: 53095 - protein, 1174 aa, Klebsiella pneumoniae; identical to SEQ ID NO: 52987

SEQ ID NO: 53096 - protein, 259 aa, Klebsiella pneumoniae; identical to SEQ ID NO: 52976

SEQ ID NO: 53097 - protein, 1174 aa, Klebsiella pneumoniae; identical to SEQ ID NO: 52987

SEQ ID NO: 53098 - protein, 276 aa, Klebsiella pneumoniae
MTAGQPYSAWLKKAEHSITTSDGNEIEVYELEIDLEAGLVLSAWAKHFREHYCLDSQIDRLRRGTNKSRAEYLRDLVFPDESEDFGPATRSGDFAEILIADLLESHFGFWVPRTRYDNKMVRNESPKGTDVLAFKFDGIGPSRPSTKDILISFESKAQLSGKKAKPRLQDAVIDSIKDVYRISESLNAMKRRLIDRQDEEGADRVERFQEGLDVPYVRMTGAAAVFCSSLYDSVHISETTDCTSHENIKNLMLVVIHAKSLMKFVHALYWRAENEA

SEQ ID NO: 53099 - protein, 1042 aa, Klebsiella pneumoniae; identical to SEQ ID NO: 53057

SEQ ID NO: 53100 - protein, 259 aa, Klebsiella pneumoniae; identical to SEQ ID NO: 52976

SEQ ID NO: 53101 - protein, 1174 aa, Klebsiella pneumoniae; identical to SEQ ID NO: 52987

SEQ ID NO: 53102 - protein, 260 aa, Klebsiella pneumoniae; identical to SEQ ID NO: 53018

SEQ ID NO: 53103 - protein, 1168 aa, Klebsiella pneumoniae; identical to SEQ ID NO: 53019

SEQ ID NO: 53104 - protein, 260 aa, Klebsiella pneumoniae; identical to SEQ ID NO: 53018

SEQ ID NO: 53105 - protein, 1168 aa, Klebsiella pneumoniae; identical to SEQ ID NO: 53019

SEQ ID NO: 53106 - protein, 260 aa, Klebsiella pneumoniae; identical to SEQ ID NO: 53018

SEQ ID NO: 53107 - protein, 1168 aa, Klebsiella pneumoniae; identical to SEQ ID NO: 53019

SEQ ID NO: 53108 - protein, 260 aa, Klebsiella pneumoniae; identical to SEQ ID NO: 53018

SEQ ID NO: 53109 - protein, 1168 aa, Klebsiella pneumoniae; identical to SEQ ID NO: 53019

SEQ ID NO: 53110 - protein, 260 aa, Klebsiella pneumoniae; identical to SEQ ID NO: 53018

SEQ ID NO: 53111 - protein, 1168 aa, Klebsiella pneumoniae; identical to SEQ ID NO: 53019

SEQ ID NO: 53112 - protein, 260 aa, Klebsiella pneumoniae; identical to SEQ ID NO: 53018

SEQ ID NO: 53113 - protein, 1168 aa, Klebsiella pneumoniae; identical to SEQ ID NO: 53019

SEQ ID NO: 53114 - protein, 260 aa, Klebsiella pneumoniae; identical to SEQ ID NO: 53018

SEQ ID NO: 53115 - protein, 1168 aa, Klebsiella pneumoniae; identical to SEQ ID NO: 53019

SEQ ID NO: 53116 - protein, 260 aa, Klebsiella pneumoniae; identical to SEQ ID NO: 53018

SEQ ID NO: 53117 - protein, 1168 aa, Klebsiella pneumoniae; identical to SEQ ID NO: 53019

SEQ ID NO: 53118 - protein, 260 aa, Klebsiella pneumoniae; identical to SEQ ID NO: 53018

SEQ ID NO: 53119 - protein, 1168 aa, Klebsiella pneumoniae; identical to SEQ ID NO: 53019

SEQ ID NO: 53120 - protein, 260 aa, Klebsiella pneumoniae; identical to SEQ ID NO: 53018

SEQ ID NO: 53121 - protein, 1168 aa, Klebsiella pneumoniae; identical to SEQ ID NO: 53019

SEQ ID NO: 53122 - protein, 260 aa, Klebsiella pneumoniae; identical to SEQ ID NO: 53018

SEQ ID NO: 53123 - protein, 1168 aa, Klebsiella pneumoniae; identical to SEQ ID NO: 53019

SEQ ID NO: 53124 - protein, 260 aa, Klebsiella pneumoniae; identical to SEQ ID NO: 53018

SEQ ID NO: 53125 - protein, 1168 aa, Klebsiella pneumoniae; identical to SEQ ID NO: 53019

SEQ ID NO: 53126 - protein, 260 aa, Klebsiella pneumoniae; identical to SEQ ID NO: 53018

SEQ ID NO: 53127 - protein, 1168 aa, Klebsiella pneumoniae; identical to SEQ ID NO: 53019

SEQ ID NO: 53128 - protein, 260 aa, Klebsiella pneumoniae; identical to SEQ ID NO: 53018

SEQ ID NO: 53129 - protein, 1168 aa, Klebsiella pneumoniae; identical to SEQ ID NO: 53019

SEQ ID NO: 53130 - protein, 271 aa, Proteus mirabilis
MPWTKEHIKWLRDTGDVIPISTGENVPIYELIYDVLNNEVMSLWARHFRNHYCSDLEIEVLKPKEMTNSDYLLQLKFPDNSPGLGPSTRSGDFAEILVADYLEFLHDYYVPRTRYDRKIIGNESSKGSDVLGFKQKNEKPSNKDELIIYEVKARLSENKAQNTLQTAIDDSLKDEFRLAESLNGVKQRLYDRKDFTNMGIISRFQQNVDHPYKTKFGAAAVLTDSSCCVKTLAKASTHEYTSQTRLEMIVIKGSVLMSLVHTLYERAANEA

SEQ ID NO: 53131 - protein, 1035 aa, Proteus mirabilis
MKLEMHSKKMLAITKSKAKMYEFAIDEASHIDLLVDPRKLLITTIGILGDLSAFEARGELADEHEDLKSELISVGQYFDALIQSRLADEMTIYLKIIGSSAYYLANMPGSSVVLAKSLPYKIEPLTDTNIEGILIWILKSDFDQNWYRINGTYLTQIIDNVGNNTREFFKLKINDERVKHSIQALRQEVYEKGSDRELFFVDIISSILLRKIENSSINCLPKYTQIPITQWMNVITKPRFIQEFWPAQRLLGEKGVLSGLSAVIQMPTSAGKTKSTELIIRSSFLSERSDVAIIVAPFRSLCREITSTFKYAFEGEDVNINELQDVLNISDSDDQLIRFLIGQTAQDGMTTKSIVVTTPEKLVYLLRHEPTLADTIGLLVFDEGHQFDTGQRGVTYELLMANLKSRLGDSVQKVLISAVMSNANSIAEWLNGETGVEIQGVGCLPTVRSTAFASWQSAMGQLQYIDQDRESDRNFFVPRVIEQINLGKRGQEKKDRLFPVKNDNSSVAAYLGVKLCHQGPVAIFCGVKSTVTSICKLLVDYYDRGLVLPPPCISSVQSELDKITYLSSLHFGDAFIFTRSISLGILPHSSNIPNGIRVSVEWAMEFNKSVLVVCTSTLAQGVNLPIRYLVVSSTFQAGQEITTRDFHNLIGRAGRSGYHTEGSVIFADTDVFDKRTNFSEKWRWQRAMHLLDFTNAEDCVSSLLDLISPFNFTKFNVNVIHFIADPSVYRQNCIEEGKQYDIDISSLLEQMDYKEAFIEAIESYFLSYLKDNPDAPKTFFVELAQETLAYFLSDGEQKKQLQRAFLLIASRVLSVPKEKVPFFGKSLLGLKDLFSIENWLDENWGQITQVQNADELLVSCWPLLFQINKNKMFLKIKPEGVILDFAKLWISGSSYAELHAHLIQSTAYYQAGSKQRAIKMDHVLDLADGALSFDSMLYVGAIADIAEGKGLDEDVLGLIRSLQTRLKLGLLNNLEMWLYSQGYVDREVCKKLASVLNGQGVDSDVFDTNILKTYQEVVSDYMSKYPSYFSKSVVV

SEQ ID NO: 53132 - protein, 269 aa, Providencia rettgeri DSM 1131
MPWTNEHIQWLHDTGGVLTLECGREAKVFRFNHDVNDQRKMTAWAKHFRNHYCNDTQIDLLKAPGQTRADYLLSMKFPSATIAPGPSIRAGDFAEILVADYLTYLHNYFVPRTRYDRKGVPNESTKGSDVLAFKQVERDPNNDELLVYEVKAKLSAGPKSMLQEAIDHSAKDHLRLAESLNGIKQRMIDRNDFTGIGTINRFQDSVNRPYKLKFGAAAICSDSAYDAAVLSGASTTKHPYAQDLELLAIQGNELMTLAHTLFERAANEV

SEQ ID NO: 53133 - protein, 1036 aa, Providencia rettgeri DSM 1131
MRFENQSSKLLSITKAKAKMYEFSLDEEHHIHLTESPSKLLLMTIGILGDLCREELSSERNVTLYEQRRGEIRNVAKYFDALIGSKLQTEYDYYLCLLGAASYYLADMLGSSAVLSNKLDELKVDLTESGIEVLLEWLLKDRFHEPLTLVKETPLTQLMLELSVSIKAYFDINLDTSISVLEASRNIRKYCHAIGSDRELLLADILTSVIARKIKNSSLNLLPIYTGLPLERWLPILAKATFIREFWPAQRLLGDADVFIGRSAVVQLPTSAGKTKSAELIIRSSFLSGRASVAVIIAPFRSLCREISSSLSAAFTDEDVLVNQLNDIPQLDDFENELLSHLFEQKVESSTTPTIIVATPEKLVYLLRHKPELAEVISLVIYDEGHQFDTGSRGVTYELLLTSLKRELRKDTQHVLISAVLPNAQTIGDWLYAGNGTVVNGSEYLSTERSIAFASWRMGRGQFHYVDPFNINVEEFFVPRVMESLKIPKKKSEKVQKLFPPKDDKSLVAAYLGLKLSENGPVAVFCGQKNSVIKICREIIKPLDRIDQLEAPIAYSDQTEIKKIARLSELHLGIDAVVTKAIERGVLPHSASIPNGLRISVEHAMENGLGRCVICTSTLAQGVNLPIKYLVVSGVFQGEKLISTRDFHNLLGRAGRAGKHTEGSIIFSDTELFDLRRSAKRWQWSQMNNLLDPSNTESCLSSLLSIIQPLFDENYSIDPIEFLKSPYNYEERYVELARRGENVTELLKQMQQRIKYLESLESFLLANLSSDEMLDGKALTELYNGTLAFCLANDAEKEKLAQAFRVVAEKVKQVEPEKRTYYGKALLGIQKLDYLEQWLRENIITLDEESDVLGVLEFLWPVIEHIGMDNNLGKLIGENAGLSIAKQWCSGVPYNEILLQANKNGFKYRAGSQHRNLKIENIINICDNSLGYEAMLIVGACADLFENFLENTAIAESIRKLQMFLRIGLNDSLATELYALGLADRVVASGISASLTSSGAELTEYGKKMVLTHRHIIESELRKYPSVFFDSLYGRD

SEQ ID NO: 53134 - protein, 282 aa, Serratia marcescens VGH107
MPWSSEHLKWFSDNGERLTTSDGKEIEVWEFNHAQDDVVLSAWARHFRNHYCLDADIDFLRGKLARKDYLNNIKFPSETSKLGPGIRAGDFGEILVCDYLQWLLDCWVPRVRWSSKVVRDESPKGSDVVGFRFHHKNGEYSIDDVMFVFESKTKFSASTVNRLQNAINDSAKDHIRIDESLNFIKQKLYEYREINQAKKIERFQNPVDIPFKENYGAAAIISSDFFDVEELTSSDCNKIPTTAKSKEYTPHPHHGNLKLLVIRGANMMQLVHELYRRAADEA

SEQ ID NO: 53135 - protein, 896 aa, Serratia marcescens VGH107
MYFGGAEGQIGNYIDSVFDLLVLFINNGDNAKELINKAIELREAAYKFGTPRQLLLGDIAVALVRKKIENSCWNALPIYSGLSKNSWSKSIKKESFIKELWPAQHLLGKADVFKGKSAIVQMPTSAGKTKAIEIVLRSAFISERVLLAIIIAPFRALCHEIKNSLVEAFYDEPILVDELSDALQTDFEIASILAQQQILVVTPEKLLYVLRHAPELVSHLGLLIFDEGHQFDSGKRGITYELLLTSLRSMIREDTQKVLISAVISNAEAVGEWLNGESNVVEGTSLIPTFRSVGFASWMDQLGRIEYVDSRDAEQNEFFVPRVIESINLGKKNRERTDRVFPEKTDGQGIALYLGLKLVPNGSIAIFCGRKSTAANICEKAVDIIERGAPLSFPADFSDSQEVERLSHLHVANLGIDAPASRSAAYGIFSHHGNTPHGIRLAVEHAMRDDLVRFVVCTSTLAQGVNLPIRYLIVTSVYQGMERIKVRDFHNLIGRAGRAGMHTEGSILFADPVIYDKRKVRNDKWRWKQVKELLEPSNSEPCISNLLSIFDPIKSDDEKYTITMEALDFAKAYIDHPDEVTKLAAGIAAQHGDKNFSRDGVERQVTWRINLICAIESFLLSHWDESEDGLSEIDVTDLAEGTLAFHLADEQKKKNIRELFKLLAENISANITDPVRRKIYGRTLYGIQDAQAIEGWVQSNTESLLSMVDETETLAIVWPLLTRYINSGVFTKFDNPEVLEEISHGWISGKPFCDLLKIIRKRKAKMIWGNRLREFKIDHVVEVCEGALAYDGALIVGAVSELIEIVTQVDTVQLRNYLQLFQKRMKYGLPTATTISLYEIGFSDRIISQDLAVSLNLASTQKRDLVQELKRNREGARMVMEKYPDYFQKRMNELLQ

SEQ ID NO: 53136 - protein, 275 aa, Serratia marcescens subsp. marcescens
MTQTTTHTAWLKKTRAKVQTADGIAIAVYELNINHSDDLALTLWAKHFREHYCLDAQIDRLRRGTKKSRAQYLTDLVFPDKSEDFGPATRSGDFAEILIADLLESQLGFWTPRTRYDDKLVRNESPKGTDVLGFKFGGAGPSKPSKKDTLISFESKAQLSGKKAKARLQDAVNDSAKDVYRISESLNAMKRRLIARADDEGADRVERFQDGLEVPYLRMSGAAAVFCSSVYDSNQISKTDCTGHENVDNLMVIVVHSATLMAFVHALYERAANEA

SEQ ID NO: 53137 - protein, 1026 aa, Serratia marcescens subsp. marcescens
MYEYGVPEDDHIALPEGLDLEMQFPMAVGTVGDFASETVAKVIGAEGDAHTTRDEVIFSAQVLQAFDDSLLNQDLSFNLRLLAAAGFYLGDVPGNAAVQISKLSQLANPEGDPLALAAKTAMDKPWGQTGNIVNSSYATDLLGALGEHFKTGGGGDRATAAIRKLRSWSYASASAHELLMADLLGAISATRIANSAWTLLPQYSELSGNSWQPYLSRPTSIKEMWPSQRMVGEAGLYKGQSGVVQMPTSAGKSRATELVIRSAFLSARTKLALVIAPFRALCQEIASDLERAFRDDGYNVNQLSDALQPDIEFDIFDVSIESAPQVVVLTPEKLLYTLRQEPDIVQRAGLVVYDEGHQFDTGTRGVTYELLLTSIKRLLPDSAQSVLISAVIQNAAAVATWLLKDESRVVSDKSLQARRLIAFASLPQGRDGQLQFNVASDSEQDFFVPRVIIPEQQPRLPREKTDRYFPTKESGSIALYLGLRLLKNGGVAIYAGRKASAAKIVRDAVEQTFRRGISLEPPSAHSDPEEIRRFVNLYSKNFGADAYLTKGAALGIFAHHGNTPQGIRVAIEYAMRQRLIRLIVCTSTLAQGVNLPIRYLLVTSAMQGRELIKARDFHNLMGRAGRAGMYGEGTVIFTDHRLYDERDTESRRWSNSVNLINPDNAEPTGSTLLSLFEPMKNETGTRTLGKPSPAEFATMIVDNWEELYEAIGNISTELQSKKFSVGSLREQLRAKKKIVEAIESFLMTYRSDVDTENFVANAKDLASETLAFSLADQEQQALLAGIFESVARRIEVRVPNTEDQHRFGRTLLGIDQALVVEAWVIENESAIGASKSADDLFDLLWPLLTQLSSEKRLIDTVPEGALKALADGWLAGRSFAILLQELNVLDASYPYGKYKKSFDLDLVVDLCEQTFGFEFSLLLASVKESFVARATEELGKSLTGHLDLLQKRLKYGLPDQDSISYYEAGFSERVIAQALSEGMIWESARSRNGARKLIRQYPNDIEVILRDFPSHFTDVFRSTVAS

SEQ ID NO: 53138 - protein, 275 aa, Serratia marcescens subsp. marcescens; identical to SEQ ID NO: 53136

SEQ ID NO: 53139 - protein, 1026 aa, Serratia marcescens subsp. marcescens; identical to SEQ ID NO: 53137

SEQ ID NO: 53140 - protein, 259 aa, Yersinia enterocolitica
MANFEDWCDSTERNISGHYLQSITARDAELMFGIHAMAALIPEHYASPRNIANAFEALGKPGLAAYIAGKLPETKQIRSGDLGEIFATEWINARSNGYTTPIKRLRWKDHRNMSMRGEDVIGVYIDQSSQQLFFLKTEAKSRAKMTGEVVSEARDNLNKEQGLPSSHALMFIADRLNEQGEELLAKAILNATLRQGIVPGCVRHLIFLLSGNSSETMLTTSIEKYTDQNNQWGVCLRIARHGEFIAATFEKVISDASNS

SEQ ID NO: 53141 - protein, 1174 aa, Yersinia enterocolitica
MPATADEIIEAIKEASAVGFRGRLIARGQARSVIWRDGDLPPDAPEFSALLSQDLQGYAYALIDLGLRLRELNGDDAYVRIAFEQAGTALESAIAKGKRDSRDTDFHFVMAAASYHLAHLSARAYSLLAMVGQDDNFSPIERALTQLIRRDLRTLRENALGFRLRGDGSDVKITEILQARLNSPQDEDGASESEEDILFDGLDLALTDVYMSAISLYLLAVERGESRLLSKAIEKLRISLSICAQFNMLPQWWLNFITIHLLSDLWSDTFHERLPLVPIGGDAAEWPTLRELFIALLQRRPRAEIDLWPSQREAAGRSVNDNDDLVVSLPTSAGKTRIAELCILRCLAGGKRVVFITPLRALSAQTEATLSRTFGPLGKTISMLYGSIGVSGMDEDAIRQRDIVVATPEKLDFALRNDPSIINDVGLFIFDEGHMIGADEREVRYEVQIQRLLRRQDADMRRIVCLSAILPDGEQLEDFAGWLRRDKPGGPIKNNWRPTRLQFGEVIWSPPAGRLNLSVGYEAAWVSRFIVSRQPPKVKLPNKKQRTKMFPSDSKELCLATAWRLIEDGQTVLIYCPLRRSVEPFAETIVDLHQRGLLPSLFDAAPDILNAAISLGEEWLGAHSPILACLRLGVALHHGALPTAYRKEIERLLRDGVLKVTISSPTLAQGLNLSATAIVMHSLHRNRELIKVSEFRNVIGRAGRAYVDVEGLVVYPIFDKVNKRQANWHTLTSDTGAREMESGLIQLVCALLIRMHTRLGGDLSALTEYVTNNAVAWEFPEIMTEAPQERDIAQVIWEKQLSTLDTAILSLLGENDILDDQIEAALDDILQSSLWQRSLQRYGDENDRVLLKSGLLSRSRYIWQSSTAAGRRGYFLSGVGLTTGLRLDAIAAKANQLLIDANAAIMGGDAEEAIDAITSLAEDVFTFYPFMPDPLPGNWRGILRSWLLGEPMTNVANTQAPETLQFIENGLVYRLPWAMEAIRVRATANGDLIGDTDTTLDDYELGFAVAAVETGTLSRSSSLLIQAGFSSRLAAIKVVTDTAADFQSGQELRRWLNSEEVISHTDNPDWPTPETRDMWLEFLGSLSPKDSQVWSRHRYTGMVDWRDTPAVIGTPLQLYTVDGIHHVLADDGTPLGSINGRINTNRKGLLRAEVNDKNGRAMFDYLGPDDFIST

SEQ ID NO: 53142 - protein, 259 aa, Yersinia enterocolitica; identical to SEQ ID NO: 53140

SEQ ID NO: 53143 - protein, 1174 aa, Yersinia enterocolitica; identical to SEQ ID NO: 53141

SEQ ID NO: 53144 - protein, 264 aa, Yersinia intermedia
MEVKSVVQFNDWCDSADNPVGQHSLRVMTGRVANLTVGVQATAAAIPVHYASEEHVARALRRLGKPAAAALIEGKLPTTKNIRSGDLGEIFATEWIDAQSGGYHAPIKRLRWKDHRNMAMRGEDVIGIFQDPQTHRLNFLKTEAKSRATLTAQVVTEARANLDKDGGLPSGHALSFISARLLELGNVPLADAIDDALLKYGIPPASVRHLLFTFSGNSPEAMLTASLQAYPGLFNQYGIGLRVESHADFIGAIYEQVITNANNA

SEQ ID NO: 53145 - protein, 1172 aa, Yersinia intermedia
MPTTPEDIIADINEASASGFRGRLIARGQARAIIWRDGVLPPDAPEFSTQLSHELHSYAYALIGLGLRLRELGGDASKARIAFEQAATALEAVIAKGNREDVDRDFHFVIAAASYHLAHLSARAYSLLTIVENDDNFSPIEWVIARLIRRDFGTLRASVLNYRANDEGSDEYITAAIQASLDEIDSGDNFAGSGNDFLFGGLDTALTDAFMAAASLFLLAVERGERPLLHQAIARLRESLTICGELNMLPQWWVHIIAIHLMSDLWSTTFHERLPLLPEGGGAPEWPKLRELFIALLQSRHKAEIDLWPSQIEAAARAVNQSDDLVVSLPTSAGKTRIAELCILRCLAGGKRVVFITPLRALSAQTETTLLRSFGPLGKTISALYGSIGVSGFDEDAIRERDIVVATPEKLDFALRNDPTLLNDVGLLIFDEGHMIGLNEREVRYEVQIQRLLRRPDAHERRIVCLSAILPDGDQLDDFAAWLRRDQPGGVVRKDWRPTRLRFGDVVWISPTARLNLRVGDERPWVQRFLTGTAPPNWVPPKRRRTRTFPDNQRELCLATAWRLIEDGQTVLIFCPQRRSVEPYAEVIVDLHERGALRSLLKVDPIVLNTAITLGEEWLGANSMILKCLRLGVALHHGALPTAYRKEVERLLRDNVLKVTISSPTLAQGLNLSATAIVMHSLHRNGEVIEVSEFKNVIGRAGRAYVDVEGIVLFPIFDKIAWRQSQWEALITDLGARQMESGLIQLVSTLLLRMHARIGGDINELTEYVINNAEAWKFPEVENEKPEEQERARTDWEQHVATLDTAILSLLGENDVPDEAIEEALDGILQSSLWQRRLLRHNEQEQQVLKAGLVSRSRFIWSNSTAVLRRGYFLAGVGLATGHALDAIAVNVNLLLLEANNAILHDDVEEAIATITALAEQVFAFHPFKPDILPDSWRDILRAWLLGQPLAGIAAGHESETLQFIEGGLVYRLPWAMEAIRVRAVANGDAVGELGLQLDDYELGQAVLSVETGTLNRSASILIQAGFNSRLAAIKAITDIGATFHNGRELRQWLNSEIVAGWSVQQDWPTAETKTIWTDFVQSFSPTENRTWEERRYWANVAWFGVPPPPGTPVQIYHGVGQPRVLAADGKPLGSIPAALNPARSGLLRAQVAQDVTRIDLTYLGPADLLQI

SEQ ID NO: 53146 - protein, 264 aa, Yersinia intermedia; identical to SEQ ID NO: 53144

SEQ ID NO: 53147 - protein, 1172 aa, Yersinia intermedia
MPTTPEDIIADINEASASGFRGRLIARGQARAIIWRDGVLPPDAPEFSTQLSHELHSYAYALIGLGLRLRELGGDASKARIAFEQAATALEAVIAKGNREDVDRDFHFVIAAASYHLAHLSARAYSLLTIVENDDNFSPIEWVIARLIRRDFGTLRASVLNYRANDEGSDEYITAAIQASLDEIDSGDNFAGSGNDFLFGGLDTALTDAFMAAASLFLLAVERGERPLLHQAIARLRESLTICGELNMLPQWWVHIIAIHLMSDLWSTTFHERLPLLPEGGGAPEWPKLRELFIALLQSRHKAEIDLWPSQIEAAARAVNQSDDLVVSLPTSAGKTRIAELCILRCLAGGKRVVFITPLRALSAQTETTLLRSFGPLGKTISALYGSIGVSGFDEDAIRERDIVVATPEKLDFALRNDPTLLNDVGLLIFDEGHMIGLNEREVRYEVQIQRLLRRPDAHERRIVCLSAILPDGDQLDDFAAWLRRDQPGGVVRKDWRPTRLRFGDVVWISPTARLNLRVGDERPWVQRFLTGTAPPNWVPPKRRRTRTFPDNQRELCLATAWRLIEDGQTVLIFCPQRRSVEPYAEVIVDLHERGALRSLLKVDPIVLNTAITLGEEWLGANSMILKCLRLGVALHHGALPTAYRKEVERLLRDNVLKVTISSPTLAQGLNLSATAIVMHSLHRNGEVIEVSEFKNVIGRAGRAYVDVEGIVLFPIFDKIAWRQSQWEALITDLGARQMESGLIQLVSTLLLRMHARIGGDINELTEYVINNAEAWKFPEVENEKPEEQERARTDWEQHVATLDTAILSLLGENDVPDEAIEEALDGILQSSLWQRRLLRHNEQEQQVLKAGLVSRSRFIWSNSTAVLRRGYFLAGVGLATGHALDAIAVNVNLLLLEANNAILHDDVEEAIATITALAEQVFAFHPFKPDILPGSWRDILRAWLLGQPLAGIAAGHESETLQFIEGGLVYRLPWAMEAIRVRAVANGDAVGELGLQLDDYELGQAVLSVETGTLNRSASILIQAGFNSRLAAIKAITDIGATFHNGRELRQWLNSEIVAGWSVQQDWPTAETKTIWTDFVQSFSPTENRTWEERRYWANVAWFGVPPPPGTPVQIYHGVGQPRVLAADGKPLGSIPAALNPARSGLLRAQVAQDVTRIDLTYLGPADLLQI

SEQ ID NO: 53148 - protein, 264 aa, Yersinia intermedia; identical to SEQ ID NO: 53144

SEQ ID NO: 53149 - protein, 1172 aa, Yersinia intermedia; identical to SEQ ID NO: 53147

SEQ ID NO: 53150 - protein, 264 aa, Yersinia intermedia; identical to SEQ ID NO: 53144

SEQ ID NO: 53151 - protein, 1172 aa, Yersinia intermedia; identical to SEQ ID NO: 53145

SEQ ID NO: 53152 - protein, 257 aa, Aeromonas hydrophila
MLYQTWCDRHVEEEDNKQLWRFEERNGGRATIEAILTTCLRSHYDKLDQIAEDVRELGYPGAAAILSERMPRSARARSGELGEILATELVEEHLDFMVPVRRLRYKDGREMALRGDDFVGLKLDAQSNLHFLKGESKSRANLTKATISEAREALSRDNGRPTATSLLFVADRLMEGEGERREMGRMIRNEVASRAAPPARTSHMLFTMSGNATPQALLDDLAAADGIRPHLSAHLRIEDHQAFIQAYYERALALGND

SEQ ID NO: 53153 - protein, 1130 aa, Aeromonas hydrophila
METIEELTGFLRETTQDGYRGRLQARGQARALIRHDGHLPPDAPAFSEGIDSDLADYGFSVLRASLALRELGGDQDTWRRGFVHAGGAFEALVQNGPQDDAFRGFYRTVGAASYHLANYSALAFSLLTQAQTDQNRSPTEDALALLIVRDLQGLGQHARVWLRDPKNRDEGISRAAAEEELDPDEVVSRVATSTMFRALVFFEFGLQTGHDSLVVEASNLLRRAISLTKAASAVSLWWILRITANLIDDLWSSSLHKVLPLEGPPGSGDYAQLRKLFVSELYSRRSSEVELWPSQLLAAQRAVDVSDDLVVALPTSAGKTRIAEIAALMALACGHRVLIVTPLRALSAQTERSFRRTFTPLGFSVSSLYGSSGIAGTDEDALREQNIVIATPEKLDFALRNDPDIINDVGLIVLDEGHLIGPSEREIRYENLVQRLLRRSDHADRRIVCLSAILPAGDQLNDLTAWIRSDAPGDPIQSSWRPTRQRFGTLSWLGTSARLSFDLEPDGPFIRHFVPEVPPIRPRRTPFPKDNKELTLAAAWKFSEQGKRALVFCTQRDHVEGFAEAALDLQRRGFLPSLLANAQEVERAMAVGREWLGAEHPAVRCLSLGVAIHHGRLPGPFLREVEALLAAGVLRVTVASPTLAQGLNLNAAVLLIPNLYRAGTLITGEEFANVAGRAGRAFVDLEGLVLHVMHEPQDWRHQRWRELVTSAKARSLSSGIIVVVNEVIRRLSASGVFARGDAMEYLSSTQGAWFPDAVEEDQDSDSMESLIERLDATVLGLIEALDAESAELPRLLDEALVGSLWARQIARLDALEKQKQLWILVSRAQLIWNKTTVEQRKGQFAMGVGLESGLAIDALAAELTELLDLGDTAALVGDADALTAALIGMGERLLAIRPFIPDDPLPANWKELLGAWIRGEDVAAIGQEGMRVVDDAFVYRLVWAIEAVRMNRRINGGESEMLVEGAAAACLEAGLPSNAMAMLVRAGLPSRVAAKTVIEQMTPGFTNRAEMKAWLRSAEVAAFDHAPGWPTLETHSIWQQFRRDVLSSVDGKWASQEWTMQWPSRSAFPMRVEVDPQSGQVSIATPDFAQLTTIKQKLQAESPSLFEVEPLQDGKSVRIHRIGRGEARWV

SEQ ID NO: 53154 - protein, 282 aa, Vibrio fluvialis PG41
MPWTSEHINWLTDTGERLKTADGKEVEIWAFHHKKDEAVLSAWAKHFRNHYCLDTDIDFLRGQQSRKDYLNTLKFPCSSTKLGPGIRAGDFGEILVADYLQWRLGFWVPRIRWSSKVVRDESPKGSDVIGFRFRNQDYSTSPEDLLIVFEAKTQFSGSGKNRLQDAINDSAKDHLRIGESLYYIKQKLFEKGSRGEAQLIDRFQNPVDIPYKESFGAAAIISDEHFDTNVIGSSNCETIPKSPKSKEHISHPNSENLVLLVIKGADMMALVHELYRRAADEA

SEQ ID NO: 53155 - protein, 444 aa, Vibrio fluvialis PG41
MKPEQKSQLLLGVTRSKAKMIEYSVPDEHHIKITQDPAKLFPISIGLLGDLAATMNRDNPDPELLSDLRRSLLFSAHFFDSYVQSKLNESLDPYLLLVGASSYYLCDLPGSASVLARKVDTDFPDLDAYGLENLIFWMLRGDISTYFGGAEGELGNYIDVVFEALVQFVKNGTGEKELLDKLRQLRSAVYELGSPRQLLLGDIATALIRKKIQNSCWNALPFYSGLSRDKWQSSIQKKSFIKELWPAQHLLGRADVLKGKSAIVQMPTSAGKTKAAELILRSAFLADRVALAIIIAPFRALCHEIKNSLIEAFHDEPTKVDELSDALQTDFEIAELLGHQQILVVTPEKLLYVLRHAPELADHIGLLVFDEGHQFDSGTRGITYELLLTSLRSMIPERTQKVLISAVISNAKSVGEWLNGEPNVVEGSTLIPTFRSVGFASWLD

SEQ ID NO: 53156 - protein, 269 aa, Vibrio fluvialis
MPWTNEHIQWLQDTGSVLTLACGKQAPVYRFHHDVNDQIKMSAWAKHFRNHYCDDNQIDLFKAPGQSRADYLLSMRFPSSTTAPGPSIRAGDFSEILVADYLTYLHDYTVPRTRYDRKGVPNESTKGSDVLAFKYNQASPVDDELLVYEVKAKLSAGPKPMLQEAIEHSAKDHLRLAESLHGIKQRMIDRNELTSVGMINRFQDSVNQPYQLRFGAAAVCSDSAYDATLLAEADTTAHPHAQDLELLAIQGSELMALANALYERAAHEI

SEQ ID NO: 53157 - protein, 1038 aa, Vibrio fluvialis
MRFENQSAKLLSITKSKAKMHEFGLDEEHHIRLTESPTKLLLMTIGILGDLCQEELSAEKDAATYELRKGEIRNVARYFDALISSKLQTEYEYYLCLLGAASYYLADMPGSAVVLSNKFDELRVDLTASRIEKLLEWLLKGSFVEPLRLDEETTLAPLMLELSESISAYIGSDISARSNTLNTSKSIRRFCHENGSDRELLIADIVASVVERKMNNASINLLPAYTGLPVEAWLPSLAKKTFVSEFWPAQRLLGEAGVLSGQSAVVQLPTSAGKTKSAELIIRSSFLSGRATVAVIIAPFRSLCREISSSLSLAFAGEDVLVNQLSDVPQIDDFDVELFLQLFGKAEKTLSETQTIVVATPEKLVYLLRHKPELAGAISLVIYDEGHQFDTGARGVTYELLLTSLKRKLREQTQHILISAVLSNAESIGDWLYAGEGSVVNGAECLSTERSIAFASWRRGRGQFHYVEPFNIDEEQFFVPRVMESLKLPKRGNETVQRHFPPKDDKSLVAAYLGIKLSEHGPVAVFCGQKSSVIKICREVLKPLERIEQLDDPIRYSDQDEIQKIGKLSELHLGSSSVVTKAIKRGVLPHSANIPNGLRVSVEYAMENGLGRCVVCTSTLAQGVNLPIKYLVVSGVFQGEKLISTRDFHNLLGRAGRAGKHTEGSIIFADTELFDNRRTSKWRQWVQMNHLLDPSQSESCLSSLLTLVQPFVDDPFNIDPIKQIQSPEKYERLSIQAADRQGIDITSLLRQMQQRVGYIESLESYLLANLASNEMLDGEALTELCYGTFAYNLASDTEKEKLVQVFKVVAERVKQIEVEKRPCFGKALLGINELQFLEGWLVDNIGALDEGADVLGTLESLWPAIENLGMNNSLGKLIGENAPLLVAKQWCSGVSYNEILLKAKRENFKLRAGSQQWNLKIENITDICDGALGYEVMLIVGACADLIESLFGNQPLADSLRDLQLSLRIGLSDHIAKELYAIGLADRAVASIISDSIVKSGAEVTEYGKRLAVAHRAIIEPELHKLPTVFSNSLYGYA

SEQ ID NO: 53158 - protein, 271 aa, Chlamydia trachomatis
MAVTPAYLNWLQDTGVALKTKDGAPVKVFELVHETDQAILSEWAKHFRSQYCSDLHIDFLREFTGKTRAEYLNDLKFPTKTGGFGPGTRSGDFAEILVSDYLEFISGYWVPRTRYDRKTIRNESTKGSDVLGFKMLSPTDSPDDCLAMYEVKAQLSGKKANERLQVAIDDSGKDNVRKAESLNAIRQRFYEAGSIQDAQKIGRFQNPVDRPYKDVYGAVALYENGIYEPLEASSSDATGHPSKNSLALIIIKGKDFMELVHSLYKRAADEA

SEQ ID NO: 53159 - protein, 339 aa, Chlamydia trachomatis
MKPERASRVLLGVTRSKAKMYEYNVPSEHHIETNSDPSKLLILSIATLGEVCLAVNATDTPAERLAELKADLQFSAQFFDSYLQSKLDVEIDPYLILLASASYYLCDLPGSSSVLIRKLPSECPYLEASHLEDLLHWLLVGDFSTYFNDAREKYKSNIIGVSQKLSEYYGSGEGVSGIEVELVNLRTKAYDIGSDRELLFADVICAIVKFRLKNSSWMLLPRFSGLPKETWSSYLSKDDSIKELWPSQRLLGEEGVLKDSSAIIQMPTSAGKTKSIELIIRSAFLSARASLVIVVAPFKALCQEIRSELSRSFDGEIVSIDGVSDVPQMDFSEFDLDGC

SEQ ID NO: 53160 - protein, 275 aa, Bacteroides fragilis str. 3725 D9 ii
MTKQELLIGKHPDNSHPYGKWLAANDLPDSYMKCHRELTEITAVDDELIEWMAKKIINHHYTQFRISRLKEKYKSLGFAKYAEQHRKLPITDKVKKGNATEILLTDYIQASQKKEFIKVYKLKYNPNVDQAIKGDDTLMVDLFEENGNEKIKIYLGESKFRTTPQKNVVEDITKSLNKDTLPLSYTFLVEEIAKSDELLARKLDDYIVQDIKDRGDLIYVGLLLSNTKTSETVEKHLNSDNSNLVFISIGIGQPEEFIKSIFEKAEELISNPDLL

SEQ ID NO: 53161 - protein, 1116 aa, Bacteroides fragilis str. 3725 D9 ii
MNIEHVEKSYQELESDSTLQNLIAQANARYILYNTEESKENFPRYTIKDEQLNILAFKYLNIGCNYFSEHNYLKASHSLEKGALILEYIHGSIHIQTKNKKLFCLISALSYYVCFQYSKAFILIGKLESDTMISSLVSLFLNRKFDQLLSEIDKLITNSSYGDEYLAEHFEEDNATKIYEIIIAKSLNYYVQFYQTGNKDFLEIAKKDLVNLQEVAAMRGEPDVWWVIRLLLLIIDGFKESSLWYVLGNYFNTEDKLPLKYIQSLVYKNGSITELFLTQRNSLPKVLNNKQGSIVSIPTSSGKTRIGEIAILNCLLNEPKAKILFIAPYRSLAYEIENSFDEIFSNLDVSVSHLYGGSLFSKLDERIIDESSVIVATPEKAKALFRSNEDILSCIKLVIIDEGHLLGTDKRLIVNEMFYEELKYHVKANGGRFLLLSAVLPNAEDLSEWLTDSTDNVYKENWRPSDERIGIMEWNGVSVNLNWKSTDAERNSFNPNFIMRQKLPKKPKERIMHYFPENKNQAIASTAYKLRKFGPVLIFVGIKKSVFAIAREYEKCIQPEEQKFRFRNKANWRAFKLACIESYGEDTEWVKFAKQGIFCHNADLISDVRIPLERLMRSEKPRVIIATSTLGQGVNLGVSTVIFSTLYQSGNPITKRDFWNIAGRAGHAFVDHEGKILVAHDITKKDENKINWERKMISAYLNKSNIDRAESGCLELIRTLKTVAQLNGIAFDNLINLLAENRINEIDESLDEVNDLLDLIDDGLLSLHNSNNFEGNTLEWIDSYFTKSLAYIQAQYYEDITGDEVLDFIKARIKGITKKVGIEKSIWESIVSSGIPINSDLQIDEKLSEIISIVQSYIVSDKTLEERISLLENIEDVIRDVNIYKEKFEDSVDIKEIRKKWLSGISMSDIVQHENAVNIVTQHYSFNMPWVLNGISKKMKKQNLIEEADTIEELAILVELGLPNIKSVKIYQAGIRSRISAYEIANLYDDDLWEKSIRTYKQDLIDHADYYKNQVSENAALWIDLLVRFSKRKFIKIKKVPNFRYGKVHKRTKRLMARIINDKQYLVSPNFSVINEIGESDIDFSKVSNINGIYFDYDEDDKLWKITCMNPYVVFT

SEQ ID NO: 53162 - protein, 275 aa, Oxalobacter formigenes HOxBLS
MSDSPWTSEHIKWLVDTGERISTVDGKKVKVLELCHKKDEVVLSAWARHFRNHYCLDSEIDYWRRGYKYSPQEYLNTIKFPSPKDAPGPSIRSGDFGEVLVADYLEYLLGYWVPRTRYGDKTIRNESTKGSDIIGFHIVKDGKASLKDRLAIFEAKAQFSGNKAKARLQDAVDGSAKDIARKAESLNAIKQKLYGRNELDNAEKIERFQNEVDHPYKEVYGAVALFENPLFDGHLISLTNASSHPRSSDLALVVIKGDQMMDLVHELYRRAADEA

SEQ ID NO: 53163 - protein, 1050 aa, Oxalobacter formigenes HOxBLS
MRPERKSHRLLGVTRSKAKMIEYNVPEEYQDIDLSVHPNKLFTLTIGLLGDLAVAINREEPDSDSLSKLRTNLLFSARFFDSYLQSKLNETLDPYLVLLGSASYYLCDLPGSASVLAKRIDGKCPNLDSDGLEDLLLWLLQADLKTYFNGTKGPFSKFIDGISKGILQFFRNGNGEDNLLNLATKLRNTVYEFCTPRQLLFGDVIAAVLRKKLQNSTWKALPSYSGLPREKWLHALQKDSFIKELWPAQHLLGQAEVLKGKSAIVQMPTSAGKTKATELIIRSAFLAERVSLAIIVAPFRALCHEIKNSLVEAFHNEHTKVDELSDALQTDFEIDDLLGEHQQILVITPEKLVYILRHEPSLANQVGLLIFDEGHQFDNGIRGITYELLLTSLRFMIPEKTQKVLISAVITNAEFVGEWLNSNPNVVKGTTLIPTFRSVGFASWLDQLGRIEYVDNRDVEQSEFFVPRVIERFNLGRRGREQKDRHFPERNDGQAIALYLGIKLVPNGSIAIFCGKKSTATSICEKAVEFINHGIPLPLPQVFSDRREVERLYYLHVANLGTDASASMIAEHGIFSHHGNTPHGIRLSVEHAMRENLVRFVVCTSTLAQGVNLPIRYLIVTSVYQGMERIKVRDFHNLIGRAGRAGMHTEGSILFADPIVYDKRRNRKDGWRWDIVKELLDPAKSEECASSLFQLIPLVIRNDRTKSKDKKNHTLTWDILSFAAAHIAGWDSLNEIISKIAKQNGGNGFTVDVVKPQFEFFSLTLASIEGFLLSNWDAVDNGLTEADIADLAEQTLAYFLADDEKREQIQELFKLLAENISKNITDVNRRKAFGKTLYGVNDAKVIEGWVQDNADELIAAQVGNEVLDLVWPLIMGHVHNKAFNKFDKKDVLKEITKKWISGTPFNQLFQIADNNKCKLGRGKRPRKVKIENIIDICEGGLAYDGALLVSALCEFLEMLDREGTGDPISRLQIFQKRMKYGLPTETTIALYELGFSDRVIAQDLAASLNLAAPQKKDLVKALKKDQAGAKAVMEKYPRYFQTRLSELLRQ

SEQ ID NO: 53164 - protein, 282 aa, Dichelobacter nodosus VCS1703A
MPWTSEHTKWLIDTGERLKTADGKEVEVWEFRHEKDEAVLSAWAKHFRNHYCLDAEIDFLRGKRPRPDYLDNIKFPCKTSKLGPGIRAGDFGEILVSDYLQWLLGYWVPRVRWSSKVVRDESPKGSDVIGFRFHKKDGDASTKDVLFVFESKTKFSASKINRLQDAINDSAKDHIRIDESLNFIKQKLFEKKEIEQAQRIERFQSPVDMPYKETYGAAAIISDECFDADELASADCQKIPKSAKSKEVFPHPNGDSLVLLVIKGPGMMDLVHELYRRAADEA

SEQ ID NO: 53165 - protein, 1130 aa, Dichelobacter nodosus VCS1703A
MRPEKKSQLLLGVTRSKAKMLEYGVPEEHHIKITQDPAKLFTLSIGLLGDLAAAINREEPDPDSLAELKTNLLFSARFFDSYLQSKLNETLDPYLVLLGSASYYLCDLPGSASVLAKRIDGDCPDLDGDALEELLLWLLQADLRTYFDETEGPFGGFIDGISKWILQFFEDGNGEENLLDLATKLRDAVYEFGTPRQLLFGDVIAAVLRKKLENSAWKALPSYSWLPRDKWLHALQKDSFIKELWPAQHLLGKADVLKGESAIVQMPTSAGKTKATELILRSAFLAERVSLAIIIAPLRTLCHEIKNSLVEAFHNEPTKVDELSDALQTDFEIAELLGHQQILVVTPEKLLYVLRHAPELAAHIGLLVFDEGHQFDSGTRGITYELLLTSLRSMIPAGTQKVLISAVISNAEAVGEWLNGEPNVVEGTTLIPTFRSVGFASWLDQLGRIEYVDSRDAEQGEFFVPRVIERFNLGRKKRERTDRFFPEKTDGQAIALYLGLKLVPNGSIALFCGRKSTAASVCEKAVDIIERGAPVVLPSDFSDAQEVERLTHLHVENLGADAPASQSEAHGIFSHHGNTPHGIRLVVEHAMRDDLVRFVVCTSTLAQGVNLPIRYLIVTSVYQGMERIKVRDFHNLIGRAGRAGMHTEGSILFADPVIYDKRKARNDKWRWDQVKELLEPRNSEPCISNLLSIFDPIKSDDEKYTITMEALDFAKAYIDDPAEVAKLAAGIAAQHGDKNFSRDGVERQVAWRISLICAVESFLLSHWDESEDGLSEADVTRLAEGTLAFFLADDQKKEHIRELFQLLAGNISANINSRQLARTWPYTRYKSFEASLRKAAEQWFSERGCETHHRMGYCLARHDLWPMNLICEDVADYIRQEQERHLGEDSFPLHKYLHHGLSSQAMAFNLIGPLIVRNDLGPLKIAIERLGIDWPGGDVAAVFEHDDRSVFNEDNGQPTSIDIILSGTCNSLFIEAKLVEREFGGCSVFAGGDCEGRNPYPDRLGECYLHHLGRKYWQRLDGLGFLEATLVNGAICPFANYYQFFREAMFAFAKQGTFILLHDARNPAFLRSTDDGMAHGGSWSFLYEAIPQNLRHRVGRLTIQMVVEAIQESGGHEDWIEDFKKKYGLQ

SEQ ID NO: 53166 - protein, 272 aa, Desulfococcus multivorans DSM 2059
MPWTSEHTKWLIDTGERLKTADGKEVEVWEFRHENDEAVLSAWAKHFRNHYCFDSEIDYWRRGYKCSRGEYLNTIKFPAPKDAPGPSIRAGDFGEVLVADFLEYLLGYWVPRTRYGDKTIRNESTKGSDIIGFHIVKDGKASSKDKLAIFEAKAQFSGKKAKARLQDAVDGSAKDIARKAESLNAIKQRLHGRNELDDAEKIERFQNEVDHPYKEVYGAVALFENPLFDGHLTSSTDASSHPHSGDLALVVIKGDQMMALVHELYRRAADEA

SEQ ID NO: 53167 - protein, 1040 aa, Desulfococcus multivorans DSM 2059
MRPEQKSQLLLGVTRSKAKMLEYGVPEEHHIKITQDPAKLFTLSIGLLGDLAAAINREEPDPDSLAELKTNLLFSARFFDSYLQSKLNETLDPYLVLLGSASYYLCDLPGSASVLAKRIDGDCPDLDGDALEDLLLWLLQADLRTYFDETEGPFGGFIDGISKWILQFFEDGNGEENLLDLATKLRDAVYEFGTPRQLLFGDVIAAVLRKKLENSAWKALPSYSGLPRDKWLHALQKDSFIKELWPAQHLLGKADVLKGESSIVQMPTSAGKTKATELILRSAFLAERVSLAIIIAPFRALCHEIKNSLVEAFHNEPNKVDELSDALQTDFEIAELLGHQQILVVTPEKLLYVLRHAPELAAHIGLLVFDEGHQFDSGTRGITYELLLTSLRSMIPEGTQKVLISAVISNAEAVGEWLNGEPNVVEGTTLIPTFRSVGFASWLDQLGRIEYVDSRDAEQGEFFVPRVIERFNLGRKKRERTDRFFPEKTDGQAIALYLGLKLVPNGSIALFCGRKSTAASVCEKAVDIIERGAPVALPSDFSDAQEVERLTHLHVENLGADAPASQSAAHGIFSHHGNTPHGIRLAVEHAMRDDLVRFVVCTSTLAQGVNLPIRYLIVTSVYQGMERIKVRDFHNLIGRAGRAGMHTEGSILFADPVIYDKRKARNDKWRWDQVKELLEPRNSEPCISNLLSIFDPIKSDDEKYTITMEALDFAKAYIDDPAEVAKLAAGIVAQHGDKNFSRDGVERQVAWRISLICAVESFLLSHWDESEDGLSEADVTRLAEGTLAFFLADDQKKKHIRELFQLLAGNISANITDPARRKIYGRTLYGIQDAQAIEGWVQSNADSLLSIVDETEALDLAWPLLTRHINGGVFTKFDKPEVLKEIAHGWISGKPFSDLLKIILKRKAKMIWGTRRREFKIDHVVDVCEGTLAYDGALVVGAVTEFIETLDQDGTGDLINHLQLFQKRLKYGLPTETTIALYELGFSDRVIAQDLAASLNLAATQKKDLVKALKKDRDGARAVMEKYPAYFQERMNELLQ

SEQ ID NO: 53168 - protein, 279 aa, Solitalea canadensis DSM 3403
MSLHKQLIGSHPITPYIFERWLNCTDIEPTDERCYRSLNPKIPSTDPDLIQWLGQKLVHHHYDENRIQKLKQKFTELGFPEYAEQHRKLPRADKTKKGNATEILLIEYIESCQNKALIKAYKLRYNPNVDQAIKGDDMLLVDILTNQQGSEEVKLYLGEAKFRKTPTKTIVDTISEALGKEKLPLSYSFLVDELNRKDESKAIADLLDKFLVKEIKDKGNICYTGFLLSNTDTFKVVDTHFKSDNPTLILISIGIENPEDLINEAFKKAEEMIANPTSL

SEQ ID NO: 53169 - protein, 1123 aa, Solitalea canadensis DSM 3403
MRNEIIRKKLVLIERDRVIQNLIAQANARYILLNTSENRENFPPYTINDDKLNILSFYYLNFGCSFAENQAFDEAIEPLEKGASLLEFIHAAETNKKNASNYYGLIASLAYYVGFQYSKSFILIKKFETTSVIAKLIHLFLLRDFIQLSEEINKILIDPSYRDSFISNNIDEIDGTTKIYEITIAKALDGFLKYFFTGNVDLLNNAKALLKSIKEISEIETDPGIWWVIRLLLLISDGFNESSLWNALKSYFDLDHPKVSQYIKSLVFLAPRGIFELFITQRKSLNKVLNAENGCIISIPTSSGKTRIAEIAILNCMINDPANKVLYIAPFRSLAFEVESTLEPILDNADISVSHLYGGSLYSKLDEKIIEDSDVIIATPEKAKAILRGNTELVRQIKLIIIDEGHLLGPDKRLIVNEIFYEELRFYVQKNGGKFLLLSAVLPNSEELAEWLTRSSETIYKNSWRPSDERLGILDWDGNFVNINWISQDEDRQSFNNKFIISEELPLKPRQRKIRYFPSNKNEAIAATAYKFRTFGSVLIFVGLKSSVFTMAEAYFKRLGNAPDNHQWKNLFDWRAFELACIETYGEEGNSWLSYARKGILCHNADLHADVRLPLERLMRSDKPLVIISTSTLGQGVNLGVSTVIFSTLYQAGELINARDFWNIAGRAGRAYVDHEGKILVALDSENLSKKQIEYRVNSIKKYFDKSKIDLAHSGILSLMVVLKNIAQENGVSFDLLVQLIAENKTQEIGEKVGDIDEALDWIDDTLLSLLHVNNPEGEIDLSWAESFFTQSLAYIQSKNEQAISGEEVINFLSSRITGIVEKVGNNRIKWQSLIKSGIPLNSDLMLEELLPEFIRLVQEYFNANEITIERKIILLSSIEALLTDIPIFIEDGDSIKSKDVNSIRQMWINASPISTIIPFENGIEIITKLYTFKLPWILNGIAKKMRNIENEDEAVIIEELSILVESGLPSLTKVKIYQAGIRSRSSADELGELFDDELWERSISDYKRDLVLHKDSYKEQVSATAGEWLDLLSRTANRRVTKVKNIPPFTFGNIHEKTNTLIAKNINGKQYLLSPDLSILEDISESDIDFSTINSIPGIDFKYSPENGTWVMKINNPYIQLS

SEQ ID NO: 53170 - protein, 256 aa, Rhodopseudomonas palustris BisB5
MNFNDWCHSADGPVGIHFCRVMTAHASAAGVQSTAAVIPGHYAAEEQLARALRRLGKPAAAALIEGKLPTTKAIRSGDLGEIYATEWIDAHSGGYRAPIKRLRWKDHRNMAMRGDDVIGIHLDPATQRLSFLKTEAKSRVALTAQVLTEARTGLDKDGGKPSAHALGFISARLMELGDLPLTDAIDDALLKHSIPVQSVKHLLFTFSGNPPGELMTSSLQAYPGPITQWGIGLRVEGHVEFVAAVYDKVIADANNS

SEQ ID NO: 53171 - protein, 1173 aa, Rhodopseudomonas palustris BisB5
MPTTPETIAADIEEAATAGFRGNLLARGQARAIIWRDGALPAEAPAFAPQLSYDLHSYAYALLGLALRLREIGGDAARARIAFEQAATALEAVISKGDRQEVDRDFHFVMAAASYHLAHLSARAYSLLATVDADENFSRIERALAQLMRRNFEALRAGVLDYRASATGSDARIAAEFQARLDQPEGAGDPEARGEFIFEGLDVALTDAFLSAISMFVLALDRGDRSLVDQALARLRENLSICSELNLLPQWWAHRLAIHLLSDLWSNTFHERVPRQPTGGEAADWPRLRQLFIALLQRRPKAEIDLWPSQLEAAERAVDQGDDLVVSLPTSAGKTRIAELCILRCLAGGKRVVFVTPLRALSAQTETTLQRTFGPLGKTISALYGSIGVSGFDEDAIRERDIVVSTPEKLDFALRNDPSLLDDVGLLVFDEGHMIGPNEREIRYEVQIQRLLRRRDAHARRIVCLSAILPDGDQLDDFAAWLRRDHPGGLIKNDWRPTRLRFGEVIWTPASASARLNLRVGDERPWVQRFLTGAAPPLFIPPKRLRTKVFPGNQRELCLATAWRLVEDGQTVLIFCPERRGVEPFADVVVDLHERGALRSLLEVDPGVLSTAITLGEEWLGHDSAILKCLRLGVALHHGALPTAYRKEVEQLLRANVLKVTVSSPTLAQGLNLSATAVVMFSLHRAGELIEISEFKNVIGRAGRAYVDVEGIVLFPMFDEIVKKRRSWEALITDLGAREMESGLVRLVSALLLRMRARVGGDLNQLIEYVVNSAAAWVFPEVQNETPKDRERALADWNRHVATLDTAILSLIGENEIADHEVEAALDHILQSSLWHRRLLRQNDQVRHLLKAGLLSRSRLIWSQSTSTRRRGYFLAGVGLTTGQALDAIAADANLLLLQANAGIGAGDAGAAIDAVTRLAELVFTFYPFTPDPWPGNWRDILRSWLLGQPLGALAAGQASDTLQFIEGSLVYRLPWAMEAVRVRAAANGDTVGLFGLTLEDHELSLAVLSVETGTMNRSASILIQAGFTSRLAAIKAVTDSGATFQNGGQLRAWLSSEALAAWNALPDWPTAETKAMWTEFTQGFTPRASNIWSDRRYWASATWYGVPPLPGVPVQLHDWNGQRLVLSADCTPLGTLRNALNANRKGLIQATVSPTAGRIDLVYIGPDDLSAT

SEQ ID NO: 53172 - protein, 259 aa, Rhodopseudomonas palustris BisB18
MVQFNDWCDSADTPVGNHHVRVMTGRPADSATGIQVTATAVPAHYAAEERIAGALARLGKAAAAKMITDLLPQTPQIRSGDLGEIYATEWIDAHSGYRAPIKRLRWKDHRNMAMRGDDVIGMILDPATQRLRFLKTEAKSRIDLRAQTLQEARTGLDKDGGLPSSHALSFISARLMELGADAPLVDAIDEALYRHGIPPESVKHLLFTFSGNSPQALLTQALQAYPGPIGQWGVGLHVDGHAAFVGAVYAQVITDANQP

SEQ ID NO: 53173 - protein, 1173 aa, Rhodopseudomonas palustris BisB18
MPTSPEAIIAAITDAAATGFRGRLIARGQARAMIWRDGVLPPGAPAFSSQLSFDLHSYAYGLLGLGLRLLELDGDPNQARIAFEQAATALEAVMAKGNRAEVDRDFHFVMAAASYHLAHLSARAYSLLAIVAAEENFSPIEQALALLMRRDITELRARVYAFRLDGRGSDATIAALFQQRLAEPAAADAPERDGQDFLFEGLDLALTDSFFGAFAMFLLALDRGERALVDQAIAQLRESLEICAELNLLPQWWVHRVAIHLLSDLWSNTFHEKVPLLPAGGAAPSWPGLRELFIALLARRPRAEVDLWPSQTEAASRAVDQTDNLVVSLPTSAGKTRIAELSILRCLAGGRRVMFVTPLRALSAQTETTLQRTFGPLGKTISALYGSIGVSGFDEDAIRERDIVVATPEKLDFALRNDPSLLDDVGLLVFDEGHMIGPGEREVRYEVQIQRLLRRQDADQRRIVCLSAILPDGDQLEDFSAWLRRDQPGGPIKHDWRPTRLRFGEVTWNSPTARLNLRVGEEKPFVPRFLTGAAPPLFVPPKKLRTRLFPDNQQELSLATAWRLVSDGQTVLIYCPERRSVEPFAKVIVELHSRGALASLLTVNPATLQTAIALGEEWLGPDSDILKCLRLGVALHHGALPTAYRKEVERLLRDGVLKVTISSPTLAQGLNLSATAVVMHSLYRHGEKIKVSEFKNVIGRAGRAYVDVEGLVLYPIFEDAKNRKLNEWIELIEDLGAREMESGLIQLIFSLLKRMHARLGGNLDQLIDYVVNNAAAWTFPEVAGEKPDKRERALNEWERHMATLDTAILSLIGEADVPDDQIETALDNILQSSLWQRRLLRVDDASRAAYRAALLTRSRYIWANSTAATRRGYFLAGLGLEAGHALDAVAAEANDLLVQANAALMVSDHEAAIAAITGIAERVFAFYPFEPDPFPVNWRDILRCWLLGQPLAATVAGQEGEALQFIEGGLVYRLPWAMEALRVRAAANGDVVGVFGLALGDYELGLAVPAVETGTINRSASILIQAGFNSRLAAIKIITDTGATFTSGAELRAWLRTPGVAIWSAEPDWPTAETRAMWLEFIREFAPADNRTWARRDYLGNVQWFAAPAPPGTPVNLCHRNGQPLVLAPDGRAIGLLQHPLNSNRRGLVRANVSQNVAHLDLSYLGPDDLWGA

SEQ ID NO: 53174 - protein, 260 aa, Rhodopseudomonas palustris DX-1
MGLYEKWCEATKEKDKRKRYWTYVEKDGGRNEIRDDLAETIRSHYDRLERIAEDVERLGYKVAAKIFSEAMPQTPKGRSGDLGEILATELVEEEIGLRVPVRRLRYKDGRNMAMRGDDFIGAGYDAAGEKLWLLKGEAKSNKVLGKATVTNARKVLNRDNGRCTPDSLLFVANRLLESNDPDDNALGRSLRDEVGLKSLRADRIDHMLFTVSGNGPHASLKEDLDATSTNRDHYVVNIHVEDHQDFIAAMYEEAEDLGDD

SEQ ID NO: 53175 - protein, 1169 aa, Rhodopseudomonas palustris DX-1
METIDELTTFLTTATVDGILGRLLYRGAAWSLMREDGVLPPNAPPLGATIETDLAEHGFALLRGAMALRAQAGASDLTSKAFERAANAFEALVRNGDPESPDRGFRRTIAAAAYHLAGFSAVAYSLFNEIADDLNASPGETAIQHLILRDLGQLRGFVREWLDDEAHDDEQIAESLRGEEPDVDDALSTILNTTICRALAHFDLALETGEPEPIETARTLLATAVRLADNAENVPLWWISNICRHLIDDLWQHSLHQNLPTEPPEGTEEKYPDLRRLFISSLYARKTSEVELWPSQREAAQRSTDVTDDLVVALPTSAGKTRVAEIAALMTLSSARRVLIVTPLRALSAQTERSFRKTFAPLGFSVSSLYGASGLSAGDEDALRTREIIIATPEKLDFALRSDPSLIDDVGLIVLDEGHMIGPSEREIRYETLVQRLLRRADAGERRIVCLSAILPSGDELDDLTAWIRSDEPGEPVLSDWRPTRQRFGALTWRGKDALLRLDLDDDGPFLDKFVVQKPARGKEKKPYPRKNSHLALFAAWEFAGQGKRTLIFSTQANWVEGYGKQIVDLCKRGYLDSLLEDEASIARALEVGKEWLGEDHPAVACLKAGVAIHHGRLPSPFLRELEVLLSEGVLKVIVASPTLSQGLNLNAAVLLVPALYRAGEKIKGEEFANVAGRAGRAFVDVEGLIVHVMFDNINWRKKEWGKLVASAKARTLKSGLIQIVAEILERLSREGVLDRDDAWEYLANAREAWRSPEEEASVAERLAAARQNDGDVAHDDDGEDDDDDAEETIEEEPLSQIVERLDATVFGLIEALDSDRADLPKLLDEALRGSLWARQIAREDEDVAPLHKRVIEARADLIWKTTTASARRGHFAMGVGLEAGLAIDAMADVLAELLDRADVAALSGDIDELVETLGGLGERLLFMRPFIPSKNNALPANWKAILHSWVSGEDVAKIGPQNMRAVEEAFTYRLVWALEAVRTRRMSLGWSPDTVAGGAAAAVETGVPQFMMSMLIRAGLPSRRAAMAAIEDAKPIFVTPAEMRAWLESDEITAYTDAGDWPTPDTAALWARFRTEALSGGIQKWSVEHYKRLLDTAAAPPAGLYRIVTDEGDGRTWLVTPDYQRVAAFKKPAVDPKPSLFSGRSPGNTRLVEALRVGRGKLRWPSAD

SEQ ID NO: 53176 - protein, 261 aa, Rhodopseudomonas palustris
MLLYKTWCDATKEKNERKEYWTLVEKDGGRDKIRDALAETVRSHYERLERIADDVARLGFKTAAEILRAELPQTPTSRSGDLGEILATELVEEEIGLRVPVRRLRYKDGRNMALRGDDFIGAGYGPGNDGELWLLKGEAKSNKVLGKTTVTNARKVLNRDNGRCTPDSLLFVANRLLESADEDDVKLGRTIRDEVGLKALRADRIDHMLFTMSGNAPPAALKEDLDGASTNRDQFVVNLRIQDHQEFIKETFEEVENLGDD

SEQ ID NO: 53177 - protein, 1176 aa, Rhodopseudomonas palustris
METIEELQTFLTSATQEGVLRRLLYRGTAWSLMRTDGVLPDNAPALGATIDTDLAEHGFALLRAAMALRGREGASPLTSKAFERAANAFEALVRNADPGATDRGFRRTIAAAAYHLAGYSAVAYSLFNEAPEDLNSAPGETAVMLLILRDLDRLRGFVRDWLTDDAHGDAQVSAALSGDDADSDDVLATILNTTICRALAFFEFALETGEEEPLEVARSLLAAGISLADNAENVPLWWISNLCRHLIDDLWAHSLHQNLPVQPPDGAEERYSELRHLFVSSLFARKSAEVELWPSQREAARRSTDMTDDLVVALPTSAGKTRVAEIAALMTLSAARRVLIVTPLRALSAQTERSFRKTFAPLGFSVSSLYGASGLSSGDEDALRSREIVISTPEKLDFALRSDPSLIDDVGLIVLDEGHMIGPSEREIRYETLVQRLLRRTDAADRRIICLSAILPSGDELNDLTAWIRSDQPGEPVRSDWRPTRQRFGMLTWRARDARLTLDLTANGPFIDKFVLRKAALGREKKPYPREAGQLALFAAWEFAGQGKRTLIFSTQANWVEGYGKRVVDLCKRGYLASLLEDEPAIARALEVGKEWLGEEHPAVACLRLGVAIHHGRLPSPFLRELEVLLSDGVLKVIVASPTLSQGLNLNAAVLLVPALYRSGALITGEEFANVAGRAGRAFVDVEGLIVHVMFDKVDWRSKEWRTLVASSKARTLKSGLIQIVAEILERLSREGVLDRADAWEYLANARDAWKSDAEEAALASVLADGADDVSGDDDAIDDEETGDDGGDGEEAIDEEPLSQLVERLDATVFGLIEALDADRADLPKLLDEALRGSLWARQISREGEATKALHQKVFEARANLIWTSTTPQARKGHFAMGVGLEAGLTIDAMADELGALVDRADMASLPGDVEELSEALAGLGERLLVMRPFIPDKKNALPSNWKSILRQWISGIDVSEIGPENMRVVEEAFTYRLVWALEAIRTRRVSLGWSPDIIPGGGAASLETGVPRFMMSMLVRAGLPSRRAAMVAIESTDPVFVTPAEMRAWLESDEIAAFTDAGDWPTPETAALWARFRTEALSGGIQKWTVERNKRLLDVPAGTAVPPPGLYRIVTDAGDGRTWLATPDYRRLASFRKAALDPKPSLFSGRISGKTTLVDVLRVGRGKMRWPTANA

SEQ ID NO: 53178 - protein, 266 aa, Streptococcus agalactiae LDS 628
MHSYIKYLTQEDPIITDEGKQIEILHLDIQDDSEIFEDWAKQFRRNYCSDDELAEMTGCMNISTKEYLENFKLPSDSGIGLSTMSGDFGEILVSDYLQYVEEYVVPRTRYNRKVNKDTSTQGSDVLGYKKDSLNAVNDEVVVIEVKSSASNSSTVKAKNKLQEAINHSNKDFKRFSTSIVASYLRLKESNIDQANVVERFLNITDNPFNVIYGAAAVHSGQSYDIDIIKQAVSKNHKDYQKLRLLVIHSDELMEFIKELYSKASEV

SEQ ID NO: 53179 - protein, 1027 aa, Streptococcus agalactiae LDS 628
MIEFGKQSLYYSKLVRSKAKMFEFDIPMESHIPISEEAQKSFLVALAIVADTAREYFEDYINHKKFNLQLKNQLHNAAEYFDAFLASGLGNSAEYQDYIAILGATAYYLGDYNGSSRVMINYISDDIHLLEDSMTLIKVFIDVITDEIFLNHTPIEGKFSSELNTLVESYRNYILLKTEFSKEIFRNLQYKVYGDGSDFSIIIVNCLLAVVCKKINSSSAKLLPEFSRLDFSLWRDYIQSEDSIKELWPSQIELGRQGIFSGESGIVQMPTSSGKTASVNLILRSAFYSNRIDNALIIAPFRALCREIYRDINAHFVDENNVIVSEVFDLPEIPPDFSIFNDGKKRVFILTPEKLLFLLRNHQSFIDEIGLCIFDEAHLFDDPSRGTNFELLLSTVKQIFPKAIQKILISAVIPNSEAINRWFNEDGVIVSNNSIKTTEKRVAFSDLNGSNEQLYFIDPITFEEEFFVPRTVSVSELEYLGKERKQKVFPELTNANDISIYYGTKLINNGGVGIFCGRKDTVNVVLKRFIDLNNRNYDLTNFLKNSDRSEVEKIGNLISQNLGNDSVEYICSQIGVFSHHSGIPMGIRIAIEYAFSKSKINNVVCTSTLAQGVNLPIKYLIISSVYQAGDAIKVRDFQNLIGRAGRAGKYTEGTIILTEPNIYKSPKNKWKKQNYEKLLNPINTEGCQSNILNIIQFKSVVSTNYRIGEKEFDFWSMIIERFINNIEYRAKIGDMLSNLRKQNNPYFKDFNSKINLIEKTLVAIENYIASMYATELETDRLAENTFGYFLGNEEEQGKIKELFALIKTKVTDSSVKTEIIAKNSIGLYQSELLKKWVQENIAFILACEREEDLLSVLTDIIIVFSNNKEIKRLSIGNLNYISQLWIKGISYFQILESCTEKSISIKKSGKLKLIDMSDIISICDNGLGYETSMILNAINNILEELNGEKTDVLNKLVKRLKYGLSLEKEINIYELGFSDRIVVQVIGQEINSISKNQIRNEIKQKSIDLKGILTDFPSYYTKLISEM

SEQ ID NO: 53180 - protein, 274 aa, Streptococcus agalactiae GB00975
MFFDNGKYFVFDKSIPYSSGKEIQVYKLNNELLADSILNSWASGLRNNYVEEILLEPLIKGTGLTKQEFLEKNIFPSHQNSIGASTMSGEFGEILVYDYINFTLKHYVTRTRYLEKVNPDMPVSGSDVIGYQVKNIDKPSKTDHLIVAEVKTRSSKSGNKKSLCEKTVKDAIKHSVKDRVRLGESLNAEKRRLFNRLRIEEAKIVERFQNKTDNPFIIDFFAVAVLDSDLYSDQVVLDVVNSQHENVKSTSILIIHSKELLLFLRDLYRRACSC

SEQ ID NO: 53181 - protein, 1032 aa, Streptococcus agalactiae GB00975
MLIESASKYYLKKVRAKAKMYEYGVPENLHIEVEEQANDLILLSIGVVGDISNEIWKMKQAPIILSKEKEEELYFVSRFFDAYFQSEMSIDLNPYYILMGAVTYYFCNMNGSSKVMMSIMHNLNNFKFSASGLENVIIWLLDGNYKFDVSDIDEKYRSYIMQLINYHNRFFDSENLEKVQFEEFRNYVYHFGNDREILFTDIILAILKKKIYNSCINLMPLYSEIDKNEWIATFKSNVLMKEMWASQILLGEKGIFKGKSGVIQMPTSSGKTTSVSLAIQSAFLSKRTSIVIVVAPFRALCKEILFDMEKFFAFDENITITEFSDIPEPSEIELVTSESIVKKVFVMTPEKLAYILKHNTEIIESINMIVFDEAHLFDDEARGTDYELLLTTINSYLKPDAQKILVSAVISNAEQLNTWINKDGIVIRNNTIKTSEKTVAFNTFTSTNINNAYSNLYFVEPNKNLEEEFYVPRVVQTKKLKKIDGERKLRYFPDFKNNKQDVGIYYAIKLIANGNIAIFCSKKGTVNNILKRFIDLKERGISLEDFSTLSDETECLKIAYLIKEHLGENNLYIAALNGIVGHHSGVPNGVRIAEEYALKKSLIRCVVCTSTLAQGVNLPIKYLIVSSIYQSKQIIKVRDFHNLIGRTARAGKETEGTIILTEDIYKNSKEAYKLNNYKRLLNADNSEECYSNLLKLVREVDLGNNRVIPFDFLKKYIESRYSNKAEYAETKKDILVYKEQEKEYGEHIFYKMNEIEHILVSLENFILGFADIEDESFEIIKSTYGYYLANEDEKEELKNIYNLIRSNIESLEVADRLLYRKSMLGILTMKELYRFVDENLYEIANADFDTLINLVANKLKESKNCKLIPKLIDDSHIYELLKMWINGKSYIQIWDYSKSVNLLIKWGKKSRKISLEDIITLCDSDFGFASLTIIQAIVEILNTKDCSENIQEALNDIIYRIRYGLPNKESVCVYELGFADRIISQKIVNEIRGYDCSTKKKTKSAIKNNREKLRELLANYPSYFMDRLEKLR

SEQ ID NO: 53182 - protein, 274 aa, Streptococcus agalactiae BSU442; identical to SEQ ID NO: 53180

SEQ ID NO: 53183 - protein, 1032 aa, Streptococcus agalactiae BSU442; identical to SEQ ID NO: 53181

SEQ ID NO: 53184 - protein, 262 aa, Streptococcus agalactiae str. Gottschalk 1005B
MSSYMKYLKPEEPIITDEGRTIEVFHLDIQEEPEIFEEWAIQFRRNYCSDEKLQHMTYVMGIESSKYLNENKLPSVPSTKSGDFGEILVSDYLQYFENYLVPRTRFNSRENKDKPTLGSDALGYRYDPKSPSNAEVIVIEVKSSASNKTDFKAKNRLQEAINDSNKDFERFSTSIVASYEKLFNSNQDEANILSRFLNITDNPYQVTYGAVAVHSNVSFNLDTIKQVITEDHVACDKLKLLVIHSEKLMDFINALYLKAGEV

SEQ ID NO: 53185 - protein, 1027 aa, Streptococcus agalactiae str. Gottschalk 1005B
MIEFGKRSLYYSKLVRSKAKMFEFDVPKESHIPISEEAQKSFLVALAIVADTARKYFEDYINHKKFSLQLKNQLHYAAEYFDALLASGLGNSAEYQDYIAILGTTAYYLGDYNGSSRVMINYISDDIQLLEDSMTLIKVFIDVLMDELFLKHTPIEGKYSRELNTLVESYRNYILSKTEFSPDVFSDLQDKVYRTGSDFSVIIVNCLLAVVCKKIDSSSTKLLPEFSGLDFSFWQDYIQSTGSIKELWPSQIELGRKGMFSGKSGIVQMPTSSGKTASINLTLRSAFYSNRIDNALIVAPFRALCREIYRDINAHFVDENNVIVSEVFDLPEIPQDFSIFNDGKKRVFILTPEKLLFLLRNHQSFIDEIGLCIFDEAHLFDDPSRGTNFELLLSTVKQIFPKEIQKILISAVIPNSEAINRWFNEDGVIISNNSIKTTEKRVAFSDLNGSNEQLFFIDPITFEEEFFVPRTVSVSELEQLGKERKQKVFPELTNANDISIYYGTKLINNGGVGIFCGRKDTVNVVLKRFIDLNNRNYDLTNFIKNSDSSEVEKIGNLISQNLGYDSVEYICSQLGVFSHHSGIPMGIRIAIEYAFSKSKINNVVCTSTLAQGVNLPIKYLIISSVYQAGDAIKVRDFQNLIGRAGRAGKYTEGTIILTEPNIYKSPKNRRKEQNYKALLNPINTEGCQSNILNIIQFNSVVPTDYRLDSKIFDFWSLIKERFDSTVDYRTKINIILSKLKKQKNPYFKDFNSKIDQTEKTLIAIENYIASMNDTELETDRLAENTFGYFLGNEEEQEKIKELFILIKSKMNISKVKTEIIAKNSIGLYQSELLKEWVQENKTSILSCEKEEDLLGVLTKIIIDFSNNKEMRKLSIENLNYISQLWIKGISYYQILESCTEKSISIEKRGKPKPIDMSDIISICDNGLGYETSMVLNAISNILEELVGEELDVLTMLIKRLKYGLPLEKEINIYELGFSDRIVVQVIGQEINSVSKNQIRNEIKRKSARLEDKLSDFPSYYTQIINEM

SEQ ID NO: 53186 - protein, 266 aa, Streptococcus agalactiae FSL S3-277; identical to SEQ ID NO: 53178

SEQ ID NO: 53187 - protein, 1027 aa, Streptococcus agalactiae FSL S3-277; identical to SEQ ID NO: 53179

SEQ ID NO: 53188 - protein, 274 aa, Streptococcus agalactiae GB00174; identical to SEQ ID NO: 53180

SEQ ID NO: 53189 - protein, 1032 aa, Streptococcus agalactiae GB00174
MLIESASKYYLKKVRAKAKMYEYGVPENLHIEVEEQANDLILLSIGVVGDISNEIWKMKQAPIILSKEKEEELYFVSRFFDAYFQSEMSIDLNPYYILMGAVTYYFCNMNGSSKVMMSIMHNLNNFKFSASGLENVIIWLLDGNYKFDVSDIDEKYRSYIMQLINYHNSFFDSENLEKVQFEEFRNYVYHFGNDREILFTDIILAILKKKIYNSCINLMPLYSEIDKNEWIATFKSNVLMKEMWASQILLGEKGIFKGKSGVIQMPTSSGKTTSVSLAIQSAFLSKRTSIVIVVAPFRALCKEILFDMEKFFAFDENITITEFSDIPEPSEIELVTSESIVKKVFVMTPEKLAYILKHNTEIIESINMIVFDEAHLFDDEARGTDYELLLTTINSYLKPDAQKILVSAVISNAEQLNTWINKDGIVIRNNTIKTSEKTVAFNTFTSTNINNAYSNLYFVEPNKNLEEEFYVPRVVQTKKLKKIDGERKLRYFPDFKNNKQDVGIYYAIKLIANGNIAIFCSKKGTVNNILKRFIDLKERGISLEDFSTLSDETECLKIAYLIKEHLGENNLYIAALNGIVGHHSGVPNGVRIAEEYALKKSLIRCVVCTSTLAQGVNLPIKYLIVSSIYQSKQIIKVRDFHNLIGRTARAGKETEGTIILTEDIYKNSKEAYKLNNYKRLLNADNSEECYSNLLKLVREVDLGNNRVIPFDFLKKYIESRYSNKAEYAETKKDILVYKEQEKEYGEHIFYKMNEIEHILVSLENFILGFADIEDESFEIIKSTYGYYLANEDEKEELKNIYNLIRSNIESLEVADRLLYRKSMLGILTMKELYRFVDENLYEIANADFDTLINLVANKLKESKNCKLIPKLIDDSHIYELLKMWINGKSYIQIWDYSKSVNLLIKWGKKSRKISLEDIITLCDSDFGFASLTIIQAIVEILNTKDCSENIQEALNDIIYRIRYGLPNKESVCVYELGFADRIISQKIVNEIRGYDCSTKKKTKSAIKNNREKLRELLANYPSYFMDRLEKLR

SEQ ID NO: 53190 - protein, 266 aa, Streptococcus agalactiae LDS 623; identical to SEQ ID NO: 53178

SEQ ID NO: 53191 - protein, 1027 aa, Streptococcus agalactiae LDS 623; identical to SEQ ID NO: 53179

SEQ ID NO: 53192 - protein, 266 aa, Streptococcus agalactiae MRI Z1-219
MHSYIKYLTQEDPIITDEGKQIEILHLDIQDDSEIFEDWAKQFRRNYCSDDELAEMTGCMNISTKEYLENFKLPSDSGIGLSTMSGDFGEILVSDYLQYVKEYVVPRTRYNRKVNKDTSTQGSDVLGYKKDSLNAVNDEVVVIEVKSSASNSSTVKAKNKLQEAINHSNKDFKRFSTSIVASYLRLKESNIDQANVVERFLNITDNPFNVIYGAAAVHSGQSYDIDIIKQAVSKNHKDYQKLRLLVIHSDELMEFIKELYSKASEV

SEQ ID NO: 53193 - protein, 1027 aa, Streptococcus agalactiae MRI Z1-219
MIEFGKQSLYYSKLVRSKAKMFEFDIPMESHIPISEEAQKSFLVALAIVADTAREYFEDYINHKKFNLQLKNQLHNAAEYFDAFLASGLGNSAEYQDYIAILGATAYYLGDYNGSSRVMINYISDDIHLLEDSMTLIKVFIDVITDEIFLNHTPIEGKFSSELNTLVESYRNYILLKTEFSKEIFRNLQYKVYGDGSDFSIIIVNCLLAVVCKKINSSSAKLLPEFSRLDFSLWRDYIQSEDSIKELWPSQIELGRQEIFSGESGIVQMPTSSGKTASVNLILRSAFYSNRIDNALIIAPFRALCREIYRDINAHFVDENNVIVSEVFDLPEIPPDFSIFNDGKKRVFILTPEKLLFLLRNHQSFIDEIGLCIFDEAHLFDDPSRGTNFELLLSTVKQIFPKAIQKILISAVIPNSEAINRWFNEDGVIVSNNSIKTTEKRVAFSDLNGSNEQLYFIDPITFEEEFFVPRTVSVSELEYLGKERKQKVFPELTNANDISIYYGTKLINNGGVGIFCGRKDTVNDVLKRFIDLNNRNYDLTNFLKNSDRSEVEKIGNLISQNLGNDSVEYICSQIGVFSHHSGIPMGIRIAIEYAFSKSKVNNVVCTSTLAQGVNLPIKYLIISSVYQAGDAIKVRDFQNLIGRAGRAGKYTEGTIILTEPNIYKSPKNKWKKQNYEKLLNPINTEGCQSNILNIIQFKSVVSTNYRIGEKEFDFWSMIIERFINNIEYRAKIGDMLSNLRKQNNPYFKDFNSKINLIEKTLVAIENYIASMYATELETDRLAENTFGYFLGNEEEQGKIKELFALIKTKVTDSSVKTEIIAKNSIGLYQSELLKKWVQENIAFILACEREEDLLSVLTDIIIVFSNNKEIKRLSIENLNYISQLWIKGISYFQILESCTEKSICIKKRGKLKLIDMSDIISICDNGLGYETSMILNAINNILEELNGEKTDVLNKLVKRLKYGLSLEKEINIYELGFSDRIVVQVIGQEINSISKNQIRNEIKQKSIDLKGILTDFPSYYTKLISEM

SEQ ID NO: 53194 - protein, 274 aa, Streptococcus agalactiae FSL S3-005; identical to SEQ ID NO: 53180

SEQ ID NO: 53195 - protein, 1032 aa, Streptococcus agalactiae FSL S3-005; identical to SEQ ID NO: 53181

SEQ ID NO: 53196 - protein, 274 aa, Streptococcus agalactiae FSL S3-268; identical to SEQ ID NO: 53180

SEQ ID NO: 53197 - protein, 1032 aa, Streptococcus agalactiae FSL S3-268; identical to SEQ ID NO: 53181

SEQ ID NO: 53198 - protein, 274 aa, Streptococcus agalactiae; identical to SEQ ID NO: 53180

SEQ ID NO: 53199 - protein, 1032 aa, Streptococcus agalactiae; identical to SEQ ID NO: 53181

SEQ ID NO: 53200 - protein, 274 aa, Streptococcus agalactiae; identical to SEQ ID NO: 53180

SEQ ID NO: 53201 - protein, 1032 aa, Streptococcus agalactiae; identical to SEQ ID NO: 53181

SEQ ID NO: 53202 - protein, 274 aa, Streptococcus agalactiae; identical to SEQ ID NO: 53180

SEQ ID NO: 53203 - protein, 1032 aa, Streptococcus agalactiae; identical to SEQ ID NO: 53181

SEQ ID NO: 53204 - protein, 274 aa, Streptococcus agalactiae; identical to SEQ ID NO: 53180

SEQ ID NO: 53205 - protein, 1032 aa, Streptococcus agalactiae; identical to SEQ ID NO: 53181

SEQ ID NO: 53206 - protein, 262 aa, Streptococcus agalactiae; identical to SEQ ID NO: 53184

SEQ ID NO: 53207 - protein, 1027 aa, Streptococcus agalactiae; identical to SEQ ID NO: 53185

SEQ ID NO: 53208 - protein, 274 aa, Streptococcus agalactiae; identical to SEQ ID NO: 53180

SEQ ID NO: 53209 - protein, 1032 aa, Streptococcus agalactiae; identical to SEQ ID NO: 53181

SEQ ID NO: 53210 - protein, 266 aa, Streptococcus agalactiae; identical to SEQ ID NO: 53192

SEQ ID NO: 53211 - protein, 1027 aa, Streptococcus agalactiae
MIEFGKQSLYYSKLVRSKAKMFEFDIPMESHIPISEEAQKSFLVALAIVADTAREYFEDYINHKKFNLQLKNQLHNAAEYFDAFLASGLGNSAEYQDYIAILGATAYYLGDYNGSSRVMINYISDDIHLLEDSMTLIKVFIDVITDEIFLNHTPIEGKFSSELNTLVESYRNYILLKTEFSKEIFRNLQYKVYGDGSDFSIIIVNCLLAVVCKKINSSSAKLLPEFSRLDFSLWRDYIQSEDSIKELWPSQIELGRQGIFSGESGIVQMPTSSGKTASVNLILRSAFYSNRIDNALIIAPFRALCREIYRDINAHFVDENNVIVSEVFDLPEIPPDFSIFNDGKKRVFILTPEKLLFLLRNHQSFIDEIGLCIFDEAHLFDDPSRGTNFELLLSTVKQIFPKAIQKILISAVIPNSEAINRWFNEDGVIVSNNSIKTTEKRVAFSDLNGSNEQLYFIDPITFEEEFFVPRTVSVSELEYLGKERKQKVFPELTNANDISIYYGTKLINNGGVGIFCGRKDTVNVVLKRFIDLNNRNYDLTNFLKNSDRSEVEKIGNLISQNLGNDSVEYICSQIGVFSHHSGIPMGIRIAIEYAFSKSKVNNVVCTSTLAQGVNLPIKYLIISSVYQAGDAIKVRDFQNLIGRAGRAGKYTEGTIILTEPNIYKSPKNKWKKQNYEKLLNPINTEGCQSNILNIIQFKSVVSTNYRIGEKEFDFWSMIIERFINNIEYRAKIGDMLSNLRKQNNPYFKDFNSKINLIEKTLVAIENYIASMYATELETDRLAENTFGYFLGNEEEQGKIKELFALIKTKVTDSSVKTEIIAKNSIGLYQSELLKKWVQENIAFILACEREEDLLSVLTDIIIVFSNNKEIKRLSIENLNYISQLWIKGISYFQILESCTEKSICIKKRGKLKLIDMSDIISICDNGLGYETSMILNAINNILEELNGEKTDVLNKLVKRLKYGLSLEKEINIYELGFSDRIVVQVIGQEINSISKSQIRNEIKQKSIDLKGILTDFPSYYTKLISEM

SEQ ID NO: 53212 - protein, 274 aa, Streptococcus agalactiae; identical to SEQ ID NO: 53180

SEQ ID NO: 53213 - protein, 1032 aa, Streptococcus agalactiae; identical to SEQ ID NO: 53181

SEQ ID NO: 53214 - protein, 274 aa, Streptococcus agalactiae; identical to SEQ ID NO: 53180

SEQ ID NO: 53215 - protein, 1032 aa, Streptococcus agalactiae; identical to SEQ ID NO: 53181

SEQ ID NO: 53216 - protein, 269 aa, Streptococcus pneumoniae GA47461
MEKMHSYIKYLTQEDPIITDEGKQIEILHLDIQDDPEIFEDWAKQFRRNYCSDDELAEMIGFMNISPKEYLENFKLPSDSGIGLSTMSGDFGEILVSDYLQYIEEYVVPRTRYDSKVNKNTSTQGSDVLGYKQDSSNVSNDEVVVIEVKSSASDSSSSKAKNKLQEAINHSDKDFERFSTSIVASYLRLKKSNSDQANVVERFLNITDKPFNVIYGAVAVYSNQSYDIDVIKTVVSKNHRDFQKLRLLVIHSNELMKFIRELYSKASEV

SEQ ID NO: 53217 - protein, 1027 aa, Streptococcus pneumoniae GA47461
MIEFGRRSLYFSKLVRSKAKMIEFDIPLESHLPISEDAQKSFLGALAIVADTARKYFEVYINRKSFNLQLKNQLHNAAEYFDALLVSGLGNSAEYQDYIAILGTTAYYLCDYNGSSRVMINYISDDIQLLEDCMTLIKVFIDVVTDELFLNHTPIEGKYSSELNTLVESYRNYILSKTEFSIDIYRDLQDKVYRNGSDFSVIIVNCLLAVVCKKINSSSTKLLPEFSGLDFSLWQDYIQSTGSIKELWPSQIELGKQGIFSGKSGIVQMPTSSGKTASINLTLRSAFYSNRIDNALIVAPFRALCREIYRDINAHFVDENNVIVSEVFDLPEIPQDFSIFNDGKKRVFILTPEKLLFLLRNHQSFIDEIGLCIFDEAHLFDDPSRGTNFELLLSTVKQIFPKGIQKILISAVIPNSEAINRWFNEDGVIVSNNSIKTTEKRVAFSDLNGSNEQLYFIDPITFEEEFFVPRTVSVSELEQLGKERKQKVFPELTNANDISIYYGTKLINNGGVGIFCGRKDTVNVILRRFIDLNNRNYDLTDFLKNSDRSEVEKIGNLIGQNLGYDSVEYTCSQLGVFSHHSGIPMGIRIAIEYAFSKSKINNVVCTSTLAQGINLPIKYLIISSVYQAGDAIKVRDFQNLIGRAGRAGKYTEGTIILTEPNIYKSPKNKWKKQNYKALLNPINTEGCQSNILSIIQFKSVVPTDYRFAPIKFDFWNLIKERFDSSVDYRTKINNILSKLKRKNSLYFKDFNSKIDQIDNTLIAIENYIASMYATELETDSLAENTFGYFLGNEEEKEKIKELFILIKSKIITSSVETEIIAKNSIGLYQSELLKEWVQENKTSILSCEKEEELLGVLTKKIIDFSNNKEMRKLSIENLNYISQLWIKGISYFQILESCTEKSISIEKRGKSKPIDMSDIISICDNGLGYETSMVLNAINNILEKLVGEELDVLTMLIKRLKYGLPLEKEINIYELGFSDRIVVQVIGQEINSVSKNQIRNEIKQKSARLEDKLSDFPSYYTQIINEM

SEQ ID NO: 53218 - protein, 269 aa, Streptococcus pneumoniae 2090008; identical to SEQ ID NO: 53216

SEQ ID NO: 53219 - protein, 678 aa, Streptococcus pneumoniae 2090008
MIEFGRRSLYFSKLVRSKAKMIEFDIPLESHLPISEDAQKSFLGALAIVADTARKYFEVYINRKSFNLQLKNQLHNAAEYFDALLVSGLGNSAEYQDYIAILGTTAYYLCDYNGSSRVMINYISDDIQLLEDCMTLIKVFIDVVTDELFLNHTPIEGKYSSELNTLVESYRNYILSKTEFSIDIYRDLQDKVYRNGSDFSVIIVNCLLAVVCKKINSSSTKLLPEFSGLDFSLWQDYIQSTGSIKELWPSQIELGKQGIFSGKSGIVQMPTSSGKTASINLTLRSAFYSNRIDNALIVAPFRALCREIYRDINAHFVDENNVIVSEVFDLPEIPQDFSIFNDGKKRVFILTPEKLLFLLRNHQSFIDEIGLCIFDEAHLFDDPSRGTNFELLLSTVKQIFPKGIQKILISAVIPNSEAINRWFNEDGVIVSNNSIKTTEKRVAFSDLNGSNEQLYFIDPITFEEEFFVPRTVSVSELEQLGKERKQKVFPELTNANDISIYYGTKLINNGGVGIFCGRKDTVNVILRRFIDLNNRNYDLTDFLKNSDRSEVEKIGNLIGQNLGYDSVEYTCSQLGVFSHHSGIPMGIRIAIEYAFSKSKINNVVCTSTLAQGINLPIKYLIISSVYQAGDAIKVRDFQNLIGRAGRAGKYTEGTIILTEPNIYKSPKNKWKNKTIKHC

SEQ ID NO: 53220 - protein, 269 aa, Streptococcus pneumoniae 2061376; identical to SEQ ID NO: 53216

SEQ ID NO: 53221 - protein, 830 aa, Streptococcus pneumoniae 2061376
MIEFGRRSLYFSKLVRSKAKMIEFDIPLESHLPISEDAQKSFLGALAIVADTARKYFEVYINRKSFNLQLKNQLHNAAEYFDALLVSGLGNSAEYQDYIAILGTTAYYLCDYNGSSRVMINYISDDIQLLEDCMTLIKVFIDVVTDELFLNHTPIEGKYSSELNTLVESYRNYILSKTEFSIDIYRDLQDKVYRNGSDFSVIIVNCLLAVVCKKINSSSTKLLPEFSGLDFSLWQDYIQSTGSIKELWPSQIELGKQGIFSGKSGIVQMPTSSGKTASINLTLRSAFYSNRIDNALIVAPFRALCREIYRDINAHFVDENNVIVSEVFDLPEIPQDFSIFNDGKKRVFILTPEKLLFLLRNHQSFIDEIGLCIFDEAHLFDDPSRGTNFELLLSTVKQIFPKGIQKILISAVIPNSEAINRWFNEDGVIVSNNSIKTTEKRVAFSDLNGSNEQLYFIDPITFEEEFFVPRTVSVSELEQLGKERKQKVFPELTNANDISIYYGTKLINNGGVGIFCGRKDTVNVILRRFIDLNNRNYDLTDFLKNSDRSEVEKIGNLIGQNLGYDSVEYTCSQLGVFSHHSGIPMGIRIAIEYAFSKSKINNVVCTSTLAQGINLPIKYLIISSVYQAGDAIKVRDFQNLIGRAGRAGKYTEGTIILTEPNIYKSPKNKWKKQNYKALLNPINTEGCQSNILSIIQFKSVVPTDYRFAPIKFDFWNLIKERFDSSVDYRTKINNILSKLKRKNSLYFKDFNSKIDQIDNTLIAIENYIASMYATELETDSLAENTFGYFLGNEEEKEKIKELFILIKSKIITSSVETEIIAKKLNWIISI

SEQ ID NO: 53222 - protein, 266 aa, Streptococcus pneumoniae GA56348
MHSYIKYLTQEDPIITDEGKQIEILHLDIQDDPEIFEDWAKQFRRNYCSDDELAEMIGFMNISPKEYLENFKLPSDSGIGLSTMSGDFGEILVSDYLQYIEEYVVPRTRYDSKVNKNTSTQGSDVLGYKQDSSNVSNDEVVVIEVKSSASDSSSSKAKNKLQEAINHSDKDFERFSTSIVASYLRLKKSNSDQANVVERFLNITDKPFNVIYGAVAVYSNQSYDIDVIKTVVSKNHRDFQKLRLLVIHSNELMKFIRELYSKASEV

SEQ ID NO: 53223 - protein, 1007 aa, Streptococcus pneumoniae GA56348
MIEFDIPLESHLPISEDAQKSFLGALAIVADTARKYFEVYINRKSFNLQLKNQLHNAAEYFDALLVSGLGNSAEYQDYIAILGTTAYYLCDYNGSSRVMINYISDDIQLLEDCMTLIKVFIDVVTDELFLNHTPIEGKYSSELNTLVESYRNYILSKTEFSIDIYRDLQDKVYRNGSDFSVIIVNCLLAVVCKKINSSSTKLLPEFSGLDFSLWQDYIQSTGSIKELWPSQIELGKQGIFSGKSGIVQMPTSSGKTASINLTLRSAFYSNRIDNALIVAPFRALCREIYRDINAHFVDENNVIVSEVFDLPEIPQDFSIFNDGKKRVFILTPEKLLFLLRNHQSFIDEIGLCIFDEAHLFDDPSRGTNFELLLSTVKQIFPKGIQKILISAVIPNSEAINRWFNEDGVIVSNNSIKTTEKRVAFSDLNGSNEQLYFIDPITFEEEFFVPRTVSVSELEQLGKERKQKVFPELTNANDISIYYGTKLINNGGVGIFCGRKDTVNVILRRFIDLNNRNYDLTDFLKNSDRSEVEKIGNLIGQNLGYDSVEYTCSQLGVFSHHSGIPMGIRIAIEYAFSKSKINNVVCTSTLAQGINLPIKYLIISSVYQAGDAIKVRDFQNLIGRAGRAGKYTEGTIILTEPNIYKSPKNKWKKQNYKALLNPINTEGCQSNILSIIQFKSVVPTDYRFAPIKFDFWNLIKERFDSSVDYRTKINNILSKLKRKNSLYFKDFNSKIDQIDNTLIAIENYIASMYATELETDSLAENTFGYFLGNEEEKEKIKELFILIKSKIITSSVETEIIAKNSIGLYQSELLKEWVQENKTSILSCEKEEELLGVLTKKIIDFSNNKEMRKLSIENLNYISQLWIKGISYFQILESCTEKSISIEKRGKSKPIDMSDIISICDNGLGYETSMVLNAINNILEKLVGEELDVLTMLIKRLKYGLPLEKEINIYELGFSDRIVVQVIGQEINSVSKNQIRNEIKQKSARLEDKLSDFPSYYTQIINEM

SEQ ID NO: 53224 - protein, 266 aa, Streptococcus pneumoniae GA17484; identical to SEQ ID NO: 53222

SEQ ID NO: 53225 - protein, 798 aa, Streptococcus pneumoniae GA17484
MIEFGRRSLYFSKLVRSKAKMIEFDIPLESHLPISEDAQKSFLGALAIVADTARKYFEVYINRKSFNLQLKNQLHNAAEYFDALLVSGLGNSAEYQDYIAILGTTAYYLCDYNGSSRVMINYISDDIQLLEDCMTLIKVFIDVVTDELFLNHTPIEGKYSSELNTLVESYRNYILSKTEFSIDIYRDLQDKVYRNGSDFSVIIVNCLLAVVCKKINSSSTKLLPEFSGLDFSLWQDYIQSTGSIKELWPSQIELGKQGIFSGKSGIVQMPTSSGKTASINLTLRSAFYSNRIDNALIVAPFRALCREIYRDINAHFVDENNVIVSEVFDLPEIPQDFSIFNDGKKRVFILTPEKLLFLLRNHQSFIDEIGLCIFDEAHLFDDPSRGTNFELLLSTVKQIFPKGIQKILISAVIPNSEAINRWFNEDGVIVSNNSIKTTEKRVAFSDLNGSNEQLYFIDPITFEEEFFVPRTVSVSELEQLGKERKQKVFPELTNANDISIYYGTKLINNGGVGIFCGRKDTVNVILRRFIDLNNRNYDLTDFLKNSDRSEVEKIGNLIGQNLGYDSVEYTCSQLGVFSHHSGIPMGIRIAIEYAFSKSKINNVVCTSTLAQGINLPIKYLIISSVYQAGDAIKVRDFQNLIGRAGRAGKYTEGTIILTEPNIYKSPKNKWKKQNYKALLNPINTEGCQSNILSIIQFKSVVPTDYRFAPIKFDFWNLIKERFDSSVDYRTKINNILSKLKRKNSLYFKDFNSKIDQIDNTLIAIENYIASMYATELETDSLAENTFGYFLGNEEEKEK

SEQ ID NO: 53226 - protein, 266 aa, Streptococcus pneumoniae GA58981; identical to SEQ ID NO: 53222

SEQ ID NO: 53227 - protein, 1007 aa, Streptococcus pneumoniae GA58981; identical to SEQ ID NO: 53223

SEQ ID NO: 53228 - protein, 269 aa, Streptococcus pneumoniae MNZ41
MEKMHSYIKYLIHEDPIITDEGKQVEILHLDIQDDPEIFEDWANQFRRNYCSDDELAEMIGFMNISPKEYLKNFKLPSDSGIGLSTMSGDFGEILVSDYLQNIEEYVVPRTRYDSRVNKDTSTQGSDVLGYKQDSSNVSNDEVVVIEVKSSASDSSSSQAKNKLQEAINHSDKDFERFSTSIVASYLRLKKSNSDQENVVERFLNITDKPFNVIYGAVAVYSNQSYDIDVIKTVVSKKHRDFQKLRLLVIHSDELMKFIRELYSKASEV

SEQ ID NO: 53229 - protein, 990 aa, Streptococcus pneumoniae MNZ41
MIEFGKKSLYFSKLVRSKAKMIEFEIPLESHIPISEDAQKSFLGALAIAADTARKYFEDYINHKSFDSQLKNQLHNVAEYFDALLVSGLGNSAEYQDYIAILGTTAYYLGDYNGSSRVMVNYISDDMQLLEESITLVKVFINVITDKLFLNHTPIEGKYSSELNTLVESYRNYILSKTEFSIDIYRDLQDKVYRNGSDFSVIIVNCLLAVVCKKIDSSSTKLLPEFSGLDFSLWQDYIQSTGSIKELWPSQIELGKQAIFSGKSGIVQMPTSSGKTASINLTLRSAFYSNRIDNALIVAPFRALCREIYRDINAHFVDENNVIVSEVFDLPEIPQDFSIFNDGKKRVFILTPGKLLFLLRNHQSFIDEIGLCIFDEAHLFDDPSRGTNFELLLSTVKQIFPKGIQKILISAVIPNSEAINRWFNEDGVIVSNNSIKTTEKRVAFSDLNGSNEQLYFIDPITFEEEFFVPRTVSVSELEQLGKERKQKVFPELTNENDISIYYGINLINNGGVGIFCGRKDTVNVILRRFIDLNNRNYDLTDFLKNSDRSEVEKIGNLIGQNLGYDSVEYTCSQLGVFSHHSGIPMGIRIAIEYAFSKSKINNVVCTSTLAQGINLPIKYLIISSVYQAGDAIKVRDFQNLIGRAGRAGKYTEGTIILTEPNIYKSPKNKWKKQNYKALLNPINTEGCQSNILSIIQFKSVVPTDYRFAPIKFDFWNLIKERFDSSVDYRTKINNILSKLKRKNSLYFKDFNSKIDQIDNTLIAIENYIASMYATELETDSLAENTFGYFLGNNEEEKEKIKELFILIKSKIITSSVETEIIAKNSIGLYQSELLKEWVQENKTSIISCEKEEELLGVLTKKIIDFSNNKEMRKLSIENLNYISQLWIKGISYFQILESCTEKSISIEKRGKSKPIDMSDIISICDNGLGYETSMVLNAINNILEKLVGEELDVLTMLIKRLKYGLPLEKEINIYELGFSDRIVVQVIIHR

SEQ ID NO: 53230 - protein, 269 aa, Streptococcus pneumoniae 1719; identical to SEQ ID NO: 53228

SEQ ID NO: 53231 - protein, 990 aa, Streptococcus pneumoniae 1719; identical to SEQ ID NO: 53229

SEQ ID NO: 53232 - protein, 266 aa, Streptococcus pneumoniae
MHSYIKYLIHEDPIITDEGKQVEILHLDIQDDPEIFEDWANQFRRNYCSDDELAEMIGFMNISPKEYLKNFKLPSDSGIGLSTMSGDFGEILVSDYLQNIEEYVVPRTRYDSRVNKDTSTQGSDVLGYKQDSSNVSNDEVVVIEVKSSASDSSSSQAKNKLQEAINHSDKDFERFSTSIVASYLRLKKSNSDQENVVERFLNITDKPFNVIYGAVAVYSNQSYDIDVIKTVVSKKHRDFQKLRLLVIHSDELMKFIRELYSKASEV

SEQ ID NO: 53233 - protein, 990 aa, Streptococcus pneumoniae; identical to SEQ ID NO: 53229

SEQ ID NO: 53234 - protein, 269 aa, Streptococcus pneumoniae ECC_3510; identical to SEQ ID NO: 53228

SEQ ID NO: 53235 - protein, 533 aa, Streptococcus pneumoniae ECC_3510
MIEFGKKSLYFSKLVRSKAKMIEFEIPLESHIPISEDAQKSFLGALAIAADTARKYFEDYINHKSFDSQLKNQLHNVAEYFDALLVSGLGNSAEYQDYIAILGTTAYYLGDYNGSSRVMVNYISDDMQLLEESITLVKVFINVITDKLFLNHTPIEGKYSSELNTLVESYRNYILSKTEFSIDIYRDLQDKVYRNGSDFSVIIVNCLLAVVCKKIDSSSTKLLPEFSGLDFSLWQDYIQSTGSIKELWPSQIELGKQAIFSGKSGIVQMPTSSGKTASINLTLRSAFYSNRIDNALIVAPFRALCREIYRDINAHFVDENNVIVSEVFDLPEIPQDFSIFNDGKKRVFILTPGKLLFLLRNHQSFIDEIGLCIFDEAHLFDDPSRGTNFELLLSTVKQIFPKGIQKILISAVIPNSEAINRWFNEDGVIVSNNSIKTTEKRVAFSDLNGSNEQLYFIDPITFEEEFFVPRTVSVSELEQLGKERKQKVFPELTNENDISIYYGIKLINNGGVGIFCGRKDTVNVILRRFIDLT

SEQ ID NO: 53236 - protein, 269 aa, Streptococcus pneumoniae; identical to SEQ ID NO: 53228

SEQ ID NO: 53237 - protein, 533 aa, Streptococcus pneumoniae; identical to SEQ ID NO: 53235

SEQ ID NO: 53238 - protein, 269 aa, Streptococcus pneumoniae; identical to SEQ ID NO: 53228

SEQ ID NO: 53239 - protein, 824 aa, Streptococcus pneumoniae
MESYRNYILSKTEFSIDIYRDLQDKVYRNGSDFSVIIVNCLLAVVCKKIDSSSTKLLPEFSGLDFSLWQDYIQSTGSIKELWPSQIELGKQAIFSGKSGIVQMPTSSGKTASINLTLRSAFYSNRIDNALIVAPFRALCREIYRDINAHFVDENNVIVSEVFDLPEIPQDFSIFNDGKKRVFILTPGKLLFLLRNHQSFIDEIGLCIFDEAHLFDDPSRGTNFELLLSTVKQIFPKGIQKILISAVIPNSEAINRWFNEDGVIVSNNSIKTTEKRVAFSDLNGSNEQLYFIDPITFEEEFFVPRTVSVSELEQLGKERKQKVFPELTNENDISIYYGINLINNGGVGIFCGRKDTVNVILRRFIDLNNRNYDLTDFLKNSDRSEVEKIGNLIGQNLGYDSVEYTCSQLGVFSHHSGIPMGIRIAIEYAFSKSKINNVVCTSTLAQGINLPIKYLIISSVYQAGDAIKVRDFQNLIGRAGRAGKYTEGTIILTEPNIYKSPKNKWKKQNYKALLNPINTEGCQSNILSIIQFKSVVPTDYRFAPIKFDFWNLIKERFDSSVDYRTKINNILSKLKRKNSLYFKDFNSKIDQIDNTLIAIENYIASMYATELETDSLAENTFGYFLGNNEEEKEKIKELFILIKSKIITSSVETEIIAKNSIGLYQSELLKEWVQENKTSIISCEKEEELLGVLTKKIIDFSNNKEMRKLSIENLNYISQLWIKGISYFQILESCTEKSISIEKRGKSKPIDMSDIISICDNGLGYETSMVLNAINNILEKLVGEELDVLTMLIKRLKYGLPLEKEINIYELGFSDRIVVQVIIHR

SEQ ID NO: 53240 - protein, 269 aa, Streptococcus pneumoniae; identical to SEQ ID NO: 53228

SEQ ID NO: 53241 - protein, 990 aa, Streptococcus pneumoniae; identical to SEQ ID NO: 53229

SEQ ID NO: 53242 - protein, 269 aa, Streptococcus pneumoniae; identical to SEQ ID NO: 53228

SEQ ID NO: 53243 - protein, 990 aa, Streptococcus pneumoniae; identical to SEQ ID NO: 53229

SEQ ID NO: 53244 - protein, 266 aa, Streptococcus pneumoniae; identical to SEQ ID NO: 53222

SEQ ID NO: 53245 - protein, 835 aa, Streptococcus pneumoniae
MIEFGRRSLYFSKLVRSKAKMIEFDIPLESHLPISEDAQKSFLGALAIVADTARKYFEVYINRKSFNLQLKNQLHNAAEYFDALLVSGLGNSAEYQDYIAILGTTAYYLCDYNGSSRVMINYISDDIQLLEDCMTLIKVFIDVVTDELFLNHTPIEGKYSSELNTLVESYRNYILSKTEFSIDIYRDLQDKVYRNGSDFSVIIVNCLLAVVCKKINSSSTKLLPEFSGLDFSLWQDYIQSTGSIKELWPSQIELGKQGIFSGKSGIVQMPTSSGKTASINLTLRSAFYSNRIDNALIVAPFRALCREIYRDINAHFVDENNVIVSEVFDLPEIPQDFSIFNDGKKRVFILTPEKLLFLLRNHQSFIDEIGLCIFDEAHLFDDPSRGTNFELLLSTVKQIFPKEIQKILISAVIPNSEAINRWFNEDGVIVSNNSIKTTEKRVAFSDLNGSNEQLYFIDPITFEEEFFVPRTVSVSELELLGKERKQKVFPELSNANDISIYYGTKLINNGGVGIFCGRKDTVNVVLRRFIDLNNRNYDLTDFLKNSDKYEVEKIGNLLGQNLGYDSVEYACSQLGVFSHHSGIPMGIRIAIEYAFSKSKINNVVCTSTLAQGVNLPIKYLIISSVYQAGDAIKVRDFQNLIGRAGRAGKYTEGTIILTEPNIYKSPKNKRKKQNYEALLNPINTEGCQSNILSIIQFKSVVPTDYRFNPIKFDYWSLIKERFDSTVDYRTKINNILSELKEQNSPYFKDFHSKIDQIDKTLIAIENYIASMYATELETDSLAEKTFGYFLGNEEEQEKIKELFVLVKSKIVTSLVETEIIAKSSIGLYQSELLKE

SEQ ID NO: 53246 - protein, 269 aa, Streptococcus pneumoniae
MEKMHSYIKYLIHEDPIITDEGKQVEILHLDIQDDPEIFEDWANQFRRNYCSDDELAEMIGFMNISPKEYLKNFKLPSDSGIGLSTMSGDFGEILVSDYLQNIEEYVVPRTRYDSRVNKDTSTQGSDVLGYKQDSSNVSNDEVVVIEVKSSASDSSSSQAKNKLQEAINHSDKDFERFSTSIVASYLRLKKSNSDQANVVERFLNITDKPFNVIYGAVAVYSNQSYDIDVIKTVVSKKHRDFQKLRLLVIHSDELMKFIRELYSKASEV

SEQ ID NO: 53247 - protein, 1027 aa, Streptococcus pneumoniae
MIEFGKKSLYFSKLVRSKAKMIEFEIPLESHIPISEDAQKSFLVALAIAADTARKYFEDYINHKSFDSQLKNQLHNVAEYFDALLVSGLGNSAEYQDYIAILGTTAYYLGDYNGSSRVMVNYISDDMQLLEESITLVKVFIDVITDKLFLNHTPIEGKYSSELNTLVESYRNYILSKTEFSIDIYRGLQDKVYRNGSDFSVIIVNCLLAVVCKKIDSSSTKLLPEFSGLDFSLWQDYIQSTGSIKELWPSQIELGKQAIFSGKSGSVQMPTSSGKTASINLTLRSAFYSNRIDNALIVAPFRALCREIYRDINAHFVDENNVIVSEVFDLPEIPQDFSIFNDGKKRVFILTPEKLLFLLRNHQSFIDEIGLCIFDEAHLFDDPSRGTNFELLLSTVKQIFPKGIQKILISAVIPNSEAINRWFNEDGVIVSNNSIKTTEKRVAFSDLNGSNEQLYFIDPITFEEEFFVPRTVSVSELEQLGKERKQKVFPELTNANDISIYYGTKLINNGGVGIFCGRKDTVNVILRRFIDLNNRNYDLTDFLKNSDRSEVEKIGNLIGQNLGYDSVEYTCSQLGVFSHHSGIPMGIRIAIEYAFSKSKINNVVCTSTLAQGINLPIKYLIISSVYQAGEAIKVRDFQNLIGRAGRAGKYTEGTIILTEPNIYKSPKNKWKKQNYKALLNPINTEGCQSNILSIIQFKSVVPTDYRFAPIKFDFWNLIKERFDSSVDYRTKINNILSKLKRKNSLYFKDFNSKIDQIDNTLIAIENYIASMYATELETDSLAENTFGYFLGNEEEKEKIKELFILIKSKIITSSVETEIIAKNSIGLYQSELLKEWVQENKTSILSCEKEEELLGVLTKKIIDFSNNKEMRKLSIENLNYISQLWIKGISYFQILESCTEKSISIEKRGKSKPIDMSDIISICDNGLGYETSMVLNAINNILEKLVGEELDVLTMLIKRLKYGLPLEKEINIYELGFSDRIVVQVIGQEINSVSKNQIRNEIKQKSARLEDKLSDFPSYYTQIINEM

SEQ ID NO: 53248 - protein, 269 aa, Streptococcus pneumoniae; identical to SEQ ID NO: 53228

SEQ ID NO: 53249 - protein, 533 aa, Streptococcus pneumoniae; identical to SEQ ID NO: 53235

SEQ ID NO: 53250 - protein, 266 aa, Streptococcus pneumoniae; identical to SEQ ID NO: 53222

SEQ ID NO: 53251 - protein, 815 aa, Streptococcus pneumoniae
MIEFDIPLESHLPISEDAQKSFLGALAIVADTARKYFEVYINRKSFNLQLKNQLHNAAEYFDALLVSGLGNSAEYQDYIAILGTTAYYLCDYNGSSRVMINYISDDIQLLEDCMTLIKVFIDVVTDELFLNHTPIEGKYSSELNTLVESYRNYILSKTEFSIDIYRDLQDKVYRNGSDFSVIIVNCLLAVVCKKINSSSTKLLPEFSGLDFSLWQDYIQSTGSIKELWPSQIELGKQGIFSGKSGIVQMPTSSGKTASINLTLRSAFYSNRIDNALIVAPFRALCREIYRDINAHFVDENNVIVSEVFDLPEIPQDFSIFNDGKKRVFILTPEKLLFLLRNHQSFIDEIGLCIFDEAHLFDDPSRGTNFELLLSTVKQIFPKEIQKILISAVIPNSEAINRWFNEDGVIVSNNSIKTTEKRVAFSDLNGSNEQLYFIDPITFEEEFFVPRTVSVSELELLGKERKQKVFPELSNANDISIYYGTKLINNGGVGIFCGRKDTVNVVLRRFIDLNNRNYDLTDFLKNSDKYEVEKIGNLLGQNLGYDSVEYACSQLGVFSHHSGIPMGIRIAIEYAFSKSKINNVVCTSTLAQGVNLPIKYLIISSVYQAGDAIKVRDFQNLIGRAGRAGKYTEGTIILTEPNIYKSPKNKRKKQNYEALLNPINTEGCQSNILSIIQFKSVVPTDYRFNPIKFDYWSLIKERFDSTVDYRTKINNILSELKEQNSPYFKDFHSKIDQIDKTLIAIENYIASMYATELETDSLAEKTFGYFLGNEEEQEKIKELFVLVKSKIVTSLVETEIIAKSSIGLYQSELLKE

SEQ ID NO: 53252 - protein, 269 aa, Streptococcus pneumoniae; identical to SEQ ID NO: 53228

SEQ ID NO: 53253 - protein, 533 aa, Streptococcus pneumoniae; identical to SEQ ID NO: 53235

SEQ ID NO: 53254 - protein, 269 aa, Streptococcus pneumoniae; identical to SEQ ID NO: 53228

SEQ ID NO: 53255 - protein, 533 aa, Streptococcus pneumoniae; identical to SEQ ID NO: 53235

SEQ ID NO: 53256 - protein, 266 aa, Streptococcus pneumoniae; identical to SEQ ID NO: 53222

SEQ ID NO: 53257 - protein, 815 aa, Streptococcus pneumoniae; identical to SEQ ID NO: 53251

SEQ ID NO: 53258 - protein, 269 aa, Streptococcus pneumoniae; identical to SEQ ID NO: 53246

SEQ ID NO: 53259 - protein, 1027 aa, Streptococcus pneumoniae; identical to SEQ ID NO: 53247

SEQ ID NO: 53260 - protein, 269 aa, Streptococcus pneumoniae; identical to SEQ ID NO: 53246

SEQ ID NO: 53261 - protein, 1027 aa, Streptococcus pneumoniae
MIEFGKKSLYFSKLVRSKAKMIEFEIPLESHIPISEDAQKSFLVALAIAADTARKYFEDYINHKSFDSQLKNQLHNVAEYFDALLVSGLGNSAEYQDYIAILGTTAYYLGDYNGSSRVMVNYISDDMQLLEESITLVKVFIDVITDKLFLNHTPIEGKYSSELNTLVESYRNYILSKTEFSIDIYRGLQDKVYRNGSDFSVIIVNCLLAVVCKKIDSSSTKLLPEFSGLDFSLWQDYIQSTGSIKELWPSQIELGKQAIFSGKSGSVQMPTSSGKTASINLTLRSAFYSNRIDNALIVAPFRALCREIYRDINAHFVDENNVIVSEVFDLPEIPQDFSIFNDGKKRVFILTPEKLLFLLRNHQSFIDEIGLCIFDEAHLFDDPSRGTNFELLLSTVKQIFPKGIQKILISAVIPNSEAINRWFNEDGVIVSNNSIKTTEKRVAFSDLNGSNEQLYFIDPITFEEEFFVPRTVSVSELEQLGKERKQKVFPELTNANDISIYYGTKLINNGGVGIFCGRKDTVNVILRRFIDLNNRNYDLTDFLKNSDRSEVEKIGNLIGQNLGYDSVEYTCSQLGVFSHHSGIPMGIRIAIEYAFSKSKINNVVCTSTLAQGINLPIKYLIISSVYQAGEAIKVRDFQNLIGRAGRAGKYTEGTIILTEPNIYKSPKNKWKKQNYKALLNPINTEGCQSNILSIIQFKSVVPTDYRFAPIKFDFWNLIKERFDSSVDYRTKINNILSKLKRKNSLYFKDFNSKIDQIDNTLIAIENYIASMYATELETDSLAENTFGYFLGNEEEKEKIKELFILIKSKIITGSVETEIIAKNSIGLYQSELLKEWVQENKTSILSCEKEEELLGVLTKKIIDFSNNKEMRKLSIENLNYISQLWIKGISYFQILESCTEKSISIEKRGKSKPIDMSDIISICDNGLGYETSMVLNAINNILEKLVGEELDVLTMLIKRLKYGLPLEKEINIYELGFSDRIVVQVIGQEINSVSKNQIRNEIKQKSARLEDKLSDFPSYYTQIINEM

SEQ ID NO: 53262 - protein, 269 aa, Streptococcus pneumoniae; identical to SEQ ID NO: 53228

SEQ ID NO: 53263 - protein, 990 aa, Streptococcus pneumoniae; identical to SEQ ID NO: 53229

SEQ ID NO: 53264 - protein, 269 aa, Streptococcus pneumoniae; identical to SEQ ID NO: 53228

SEQ ID NO: 53265 - protein, 990 aa, Streptococcus pneumoniae; identical to SEQ ID NO: 53229

SEQ ID NO: 53266 - protein, 269 aa, Streptococcus pneumoniae; identical to SEQ ID NO: 53228

SEQ ID NO: 53267 - protein, 533 aa, Streptococcus pneumoniae; identical to SEQ ID NO: 53235

SEQ ID NO: 53268 - protein, 269 aa, Streptococcus pneumoniae; identical to SEQ ID NO: 53246

SEQ ID NO: 53269 - protein, 1027 aa, Streptococcus pneumoniae; identical to SEQ ID NO: 53261

SEQ ID NO: 53270 - protein, 269 aa, Streptococcus pneumoniae; identical to SEQ ID NO: 53246

SEQ ID NO: 53271 - protein, 1027 aa, Streptococcus pneumoniae; identical to SEQ ID NO: 53247

SEQ ID NO: 53272 - protein, 269 aa, Streptococcus pneumoniae; identical to SEQ ID NO: 53228

SEQ ID NO: 53273 - protein, 533 aa, Streptococcus pneumoniae; identical to SEQ ID NO: 53235

SEQ ID NO: 53274 - protein, 269 aa, Streptococcus pneumoniae; identical to SEQ ID NO: 53246

SEQ ID NO: 53275 - protein, 1027 aa, Streptococcus pneumoniae; identical to SEQ ID NO: 53247

SEQ ID NO: 53276 - protein, 269 aa, Streptococcus pneumoniae; identical to SEQ ID NO: 53228

SEQ ID NO: 53277 - protein, 990 aa, Streptococcus pneumoniae; identical to SEQ ID NO: 53229

SEQ ID NO: 53278 - protein, 269 aa, Streptococcus pneumoniae; identical to SEQ ID NO: 53216

SEQ ID NO: 53279 - protein, 1027 aa, Streptococcus pneumoniae; identical to SEQ ID NO: 53217

SEQ ID NO: 53280 - protein, 269 aa, Streptococcus pneumoniae; identical to SEQ ID NO: 53216

SEQ ID NO: 53281 - protein, 1027 aa, Streptococcus pneumoniae; identical to SEQ ID NO: 53217

SEQ ID NO: 53282 - protein, 269 aa, Streptococcus pneumoniae; identical to SEQ ID NO: 53246

SEQ ID NO: 53283 - protein, 1027 aa, Streptococcus pneumoniae
MIEFGKKSLYFSKLVRSKAKMIEFEIPLESHIPISEDAQKSFLVALAIAADTARKYFEDYINHKSFDSQLKNQLHNVAEYFDALLVSGLGNSAEYQDYIAILGTTAYYLGDYNGSSRVMVNYISDDMQLLEESITLVKVFIDVITDKLFLNHTPIEGKYSSELNTLVESYRNYILSKTEFSIDIYRGLQDKVYRNGSDFSVIIVNCLLAVVCKKIDSSSTKLLPEFSGLDFSLWQDYIQSTGSIKELWPSQIELGKQAIFSGKSGSVQMPTSSGKTASINLTLRSAFYSNRIDNALIVAPFRVLCREIYRDINAHFVDENNVIVSEVFDLPEIPQDFSIFNDGKKRVFILTPEKLLFLLRNHQSFIDEIGLCIFDEAHLFDDPSRGTNFELLLSTVKQIFPKGIQKILISAVIPNSEAINRWFNEDGVIVSNNSIKTTEKRVAFSDLNGSNEQLYFIDPITFEEEFFVPRTVSVSELEQLGKERKQKVFPELTNANDISIYYGTKLINNGGVGIFCGRKDTVNVILRRFIDLNNRNYDLTDFLKNSDRSEVEKIGNLIGQNLGYDSVEYTCSQLGVFSHHSGIPMGIRIAIEYAFSKSKINNVVCTSTLAQGINLPIKYLIISSVYQAGEAIKVRDFQNLIGRAGRAGKYTEGTIILTEPNIYKSPKNKWKKQNYKALLNPINTEGCQSNILSIIQFKSVVPTDYRFAPIKFDFWNLIKERFDSSVDYRTKINNILSKLKRKNSLYFKDFNSKIDQIDNTLIAIENYIASMYATELETDSLAENTFGYFLGNEEEKEKIKELFILIKSKIITSSVETEIIAKNSIGLYQSELLKEWVQENKTSILSCEKEEELLGVLTKKIIDFSNNKEMRKLSIENLNYISQLWIKGISYFQILESCTEKSISIEKRGKSKPIDMSDIISICDNGLGYETSMVLNAINNILEKLVGEELDVLTMLIKRLKYGLPLEKEINIYELGFSDRIVVQVIGQEINSVSKNQIRNEIKQKSARLEDKLSDFPSYYTQIINEM

SEQ ID NO: 53284 - protein, 269 aa, Streptococcus pneumoniae; identical to SEQ ID NO: 53228

SEQ ID NO: 53285 - protein, 533 aa, Streptococcus pneumoniae; identical to SEQ ID NO: 53235

SEQ ID NO: 53286 - protein, 269 aa, Streptococcus pneumoniae; identical to SEQ ID NO: 53228

SEQ ID NO: 53287 - protein, 533 aa, Streptococcus pneumoniae; identical to SEQ ID NO: 53235

SEQ ID NO: 53288 - protein, 269 aa, Streptococcus pneumoniae; identical to SEQ ID NO: 53246

SEQ ID NO: 53289 - protein, 1027 aa, Streptococcus pneumoniae; identical to SEQ ID NO: 53261

SEQ ID NO: 53290 - protein, 269 aa, Streptococcus pneumoniae; identical to SEQ ID NO: 53228

SEQ ID NO: 53291 - protein, 990 aa, Streptococcus pneumoniae; identical to SEQ ID NO: 53229

SEQ ID NO: 53292 - protein, 269 aa, Streptococcus pneumoniae; identical to SEQ ID NO: 53246

SEQ ID NO: 53293 - protein, 1027 aa, Streptococcus pneumoniae; identical to SEQ ID NO: 53247

SEQ ID NO: 53294 - protein, 269 aa, Streptococcus pneumoniae; identical to SEQ ID NO: 53246

SEQ ID NO: 53295 - protein, 1027 aa, Streptococcus pneumoniae; identical to SEQ ID NO: 53247

SEQ ID NO: 53296 - protein, 269 aa, Streptococcus pneumoniae; identical to SEQ ID NO: 53246

SEQ ID NO: 53297 - protein, 1027 aa, Streptococcus pneumoniae; identical to SEQ ID NO: 53247

SEQ ID NO: 53298 - protein, 269 aa, Streptococcus pneumoniae; identical to SEQ ID NO: 53228

SEQ ID NO: 53299 - protein, 784 aa, Streptococcus pneumoniae
MIEFGKKSLYFSKLVRSKAKMIEFEIPLESHIPISEDAQKSFLGALAIAADTARKYFEDYINHKSFDSQLKNQLHNVAEYFDALLVSGLGNSAEYQDYIAILGTTAYYLGDYNGSSRVMVNYISDDMQLLEESITLVKVFINVITDKLFLNHTPIEGKYSSELNTLVESYRNYILSKTEFSIDIYRDLQDKVYRNGSDFSVIIVNCLLAVVCKKIDSSSTKLLPEFSGLDFSLWQDYIQSTGSIKELWPSQIELGKQAIFSGKSGIVQMPTSSGKTASINLTLRSAFYSNRIDNALIVAPFRALCREIYRDINAHFVDENNVIVSEVFDLPEIPQDFSIFNDGKKRVFILTPGKLLFLLRNHQSFIDEIGLCIFDEAHLFDDPSRGTNFELLLSTVKQIFPKGIQKILISAVIPNSEAINRWFNEDGVIVSNNSIKTTEKRVAFSDLNGSNEQLYFIDPITFEEEFFVPRTVSVSELEQLGKERKQKVFPELTNENDISIYYGINLINNGGVGIFCGRKDTVNVILRRFIDLNNRNYDLTDFLKNSDRSEVEKIGNLIGQNLGYDSVEYTCSQLGVFSHHSGIPMGIRIAIEYAFSKSKINNVVCTSTLAQGINLPIKYLIISSVYQAGDAIKVRDFQNLIGRAGRAGKYTEGTIILTEPNIYKSPKNKWKKQNYKALLNPINTEGCQSNILSIIQFKSVVPTDYRFAPIKFDFWNLIKERFDSSVDYRTKINNILSKLKRKNSLYFKDFNSKIDQIDNTLIAIENYIRLVRNLVHFIIDDGTN

SEQ ID NO: 53300 - protein, 269 aa, Streptococcus pneumoniae; identical to SEQ ID NO: 53228

SEQ ID NO: 53301 - protein, 990 aa, Streptococcus pneumoniae; identical to SEQ ID NO: 53229

SEQ ID NO: 53302 - protein, 269 aa, Streptococcus pneumoniae; identical to SEQ ID NO: 53228

SEQ ID NO: 53303 - protein, 990 aa, Streptococcus pneumoniae; identical to SEQ ID NO: 53229

SEQ ID NO: 53304 - protein, 269 aa, Streptococcus pneumoniae; identical to SEQ ID NO: 53216

SEQ ID NO: 53305 - protein, 1027 aa, Streptococcus pneumoniae; identical to SEQ ID NO: 53217

SEQ ID NO: 53306 - protein, 269 aa, Streptococcus pneumoniae; identical to SEQ ID NO: 53246

SEQ ID NO: 53307 - protein, 1027 aa, Streptococcus pneumoniae; identical to SEQ ID NO: 53261

SEQ ID NO: 53308 - protein, 269 aa, Streptococcus pneumoniae; identical to SEQ ID NO: 53216

SEQ ID NO: 53309 - protein, 1027 aa, Streptococcus pneumoniae; identical to SEQ ID NO: 53217

SEQ ID NO: 53310 - protein, 269 aa, Streptococcus pneumoniae; identical to SEQ ID NO: 53228

SEQ ID NO: 53311 - protein, 990 aa, Streptococcus pneumoniae; identical to SEQ ID NO: 53229

SEQ ID NO: 53312 - protein, 269 aa, Streptococcus pneumoniae; identical to SEQ ID NO: 53246

SEQ ID NO: 53313 - protein, 1027 aa, Streptococcus pneumoniae; identical to SEQ ID NO: 53261

SEQ ID NO: 53314 - protein, 269 aa, Streptococcus pneumoniae; identical to SEQ ID NO: 53216

SEQ ID NO: 53315 - protein, 1027 aa, Streptococcus pneumoniae; identical to SEQ ID NO: 53217

SEQ ID NO: 53316 - protein, 269 aa, Streptococcus pneumoniae; identical to SEQ ID NO: 53216

SEQ ID NO: 53317 - protein, 1027 aa, Streptococcus pneumoniae; identical to SEQ ID NO: 53217

SEQ ID NO: 53318 - protein, 269 aa, Streptococcus pneumoniae; identical to SEQ ID NO: 53216

SEQ ID NO: 53319 - protein, 1027 aa, Streptococcus pneumoniae; identical to SEQ ID NO: 53217

SEQ ID NO: 53320 - protein, 269 aa, Streptococcus pneumoniae; identical to SEQ ID NO: 53246

SEQ ID NO: 53321 - protein, 1027 aa, Streptococcus pneumoniae; identical to SEQ ID NO: 53247

SEQ ID NO: 53322 - protein, 266 aa, Streptococcus pneumoniae; identical to SEQ ID NO: 53222

SEQ ID NO: 53323 - protein, 835 aa, Streptococcus pneumoniae; identical to SEQ ID NO: 53245

SEQ ID NO: 53324 - protein, 269 aa, Streptococcus pneumoniae; identical to SEQ ID NO: 53228

SEQ ID NO: 53325 - protein, 533 aa, Streptococcus pneumoniae; identical to SEQ ID NO: 53235

SEQ ID NO: 53326 - protein, 269 aa, Streptococcus pneumoniae; identical to SEQ ID NO: 53246

SEQ ID NO: 53327 - protein, 1027 aa, Streptococcus pneumoniae; identical to SEQ ID NO: 53247

SEQ ID NO: 53328 - protein, 269 aa, Streptococcus pneumoniae; identical to SEQ ID NO: 53246

SEQ ID NO: 53329 - protein, 1027 aa, Streptococcus pneumoniae; identical to SEQ ID NO: 53247

SEQ ID NO: 53330 - protein, 269 aa, Streptococcus pneumoniae; identical to SEQ ID NO: 53216

SEQ ID NO: 53331 - protein, 1027 aa, Streptococcus pneumoniae; identical to SEQ ID NO: 53217

SEQ ID NO: 53332 - protein, 269 aa, Streptococcus pneumoniae; identical to SEQ ID NO: 53246

SEQ ID NO: 53333 - protein, 1027 aa, Streptococcus pneumoniae; identical to SEQ ID NO: 53261

SEQ ID NO: 53334 - protein, 269 aa, Streptococcus pneumoniae; identical to SEQ ID NO: 53228

SEQ ID NO: 53335 - protein, 533 aa, Streptococcus pneumoniae; identical to SEQ ID NO: 53235

SEQ ID NO: 53336 - protein, 269 aa, Streptococcus pneumoniae; identical to SEQ ID NO: 53228

SEQ ID NO: 53337 - protein, 990 aa, Streptococcus pneumoniae; identical to SEQ ID NO: 53229

SEQ ID NO: 53338 - protein, 269 aa, Streptococcus pneumoniae; identical to SEQ ID NO: 53228

SEQ ID NO: 53339 - protein, 533 aa, Streptococcus pneumoniae; identical to SEQ ID NO: 53235

SEQ ID NO: 53340 - protein, 269 aa, Streptococcus pneumoniae; identical to SEQ ID NO: 53228

SEQ ID NO: 53341 - protein, 533 aa, Streptococcus pneumoniae; identical to SEQ ID NO: 53235

SEQ ID NO: 53342 - protein, 269 aa, Streptococcus pneumoniae; identical to SEQ ID NO: 53228

SEQ ID NO: 53343 - protein, 533 aa, Streptococcus pneumoniae; identical to SEQ ID NO: 53235

SEQ ID NO: 53344 - protein, 269 aa, Streptococcus pneumoniae; identical to SEQ ID NO: 53216

SEQ ID NO: 53345 - protein, 1027 aa, Streptococcus pneumoniae; identical to SEQ ID NO: 53217

SEQ ID NO: 53346 - protein, 269 aa, Streptococcus pneumoniae; identical to SEQ ID NO: 53246

SEQ ID NO: 53347 - protein, 1027 aa, Streptococcus pneumoniae; identical to SEQ ID NO: 53247

SEQ ID NO: 53348 - protein, 269 aa, Streptococcus pneumoniae; identical to SEQ ID NO: 53228

SEQ ID NO: 53349 - protein, 533 aa, Streptococcus pneumoniae; identical to SEQ ID NO: 53235

SEQ ID NO: 53350 - protein, 269 aa, Streptococcus pneumoniae; identical to SEQ ID NO: 53228

SEQ ID NO: 53351 - protein, 990 aa, Streptococcus pneumoniae; identical to SEQ ID NO: 53229

SEQ ID NO: 53352 - protein, 269 aa, Streptococcus pneumoniae; identical to SEQ ID NO: 53216

SEQ ID NO: 53353 - protein, 1027 aa, Streptococcus pneumoniae; identical to SEQ ID NO: 53217

SEQ ID NO: 53354 - protein, 269 aa, Streptococcus pneumoniae; identical to SEQ ID NO: 53246

SEQ ID NO: 53355 - protein, 1027 aa, Streptococcus pneumoniae; identical to SEQ ID NO: 53247

SEQ ID NO: 53356 - protein, 269 aa, Streptococcus pneumoniae; identical to SEQ ID NO: 53216

SEQ ID NO: 53357 - protein, 1027 aa, Streptococcus pneumoniae
MIEFGRRSLYFSKLVRSKAKMIEFDIPLESHLPISEDAQKSFLGALAIVADTARKYFEVYINRKSFNLQLKNQLHNAAEYFDALLVSGLGNSAEYQDYIAILGTTAYYLCDYNGSSRVMINYISDDIQLLEDCMTLIKVFIDVVTDELFLNHTPIEGKYSSELNTLVESYRNYILSKTEFSIDIYRDLQDKVYRNGSDFSVIIVNCLLAVVCKKINSSSTKLLPEFSGLDFSLWQDYIQSTGSTKELWPSQIELGKQGIFSGKSGIVQMPTSSGKTASINLTLRSAFYSNRIDNALIVAPFRALCREIYRDINAHFVDENNVIVSEVFDLPEIPQDFSIFNDGKKRVFILTPEKLLFLLRNHQSFIDEIGLCIFDEAHLFDDPSRGTNFELLLSTVKQIFPKGIQKILISAVIPNSEAINRWFNEDGVIVSNNSIKTTEKRVAFSDLNGSNEQLYFIDPITFEEEFFVPRTVSVSELEQLGKERKQKVFPELTNANDISIYYGTKLINNGGVGIFCGRKDTVNVILRRFIDLNNRNYDLTDFLKNSDRSEVEKIGNLIGQNLGYDSVEYTCSQLGVFSHHSGIPMGIRIAIEYAFSKSKINNVVCTSTLAQGINLPIKYLIISSVYQAGDAIKVRDFQNLIGRAGRAGKYTEGTIILTEPNIYKSPKNKWKKQNYKALLNPINTEGCQSNILSIIQFKSVVPTDYRFAPIKFDFWNLIKERFDSSVDYRTKINNILSKLKRKNSLYFKDFNSKIDQIDNTLIAIENYIASMYATELETDSLAENTFGYFLGNEEEKEKIKELFILIKSKIITSSVETEIIAKNSIGLYQSELLKEWVQENKTSILSCEKEEELLGVLTKKIIDFSNNKEMRKLSIENLNYISQLWIKGISYFQILESCTEKSISIEKRGKSKPIDMSDIISICDNGLGYETSMVLNAINNILEKLVGEELDVLTMLIKRLKYGLPLEKEINIYELGFSDRIVVQVIGQEINSVSKNQIRNEIKQKSARLEDKLSDFPSYYTQIINEM

SEQ ID NO: 53358 - protein, 269 aa, Streptococcus pneumoniae; identical to SEQ ID NO: 53228

SEQ ID NO: 53359 - protein, 533 aa, Streptococcus pneumoniae; identical to SEQ ID NO: 53235

SEQ ID NO: 53360 - protein, 269 aa, Streptococcus pneumoniae; identical to SEQ ID NO: 53228

SEQ ID NO: 53361 - protein, 990 aa, Streptococcus pneumoniae; identical to SEQ ID NO: 53229

SEQ ID NO: 53362 - protein, 269 aa, Streptococcus pneumoniae; identical to SEQ ID NO: 53228

SEQ ID NO: 53363 - protein, 533 aa, Streptococcus pneumoniae; identical to SEQ ID NO: 53235

SEQ ID NO: 53364 - protein, 269 aa, Streptococcus pneumoniae; identical to SEQ ID NO: 53228

SEQ ID NO: 53365 - protein, 990 aa, Streptococcus pneumoniae; identical to SEQ ID NO: 53229

SEQ ID NO: 53366 - protein, 269 aa, Streptococcus pneumoniae; identical to SEQ ID NO: 53228

SEQ ID NO: 53367 - protein, 533 aa, Streptococcus pneumoniae; identical to SEQ ID NO: 53235

SEQ ID NO: 53368 - protein, 269 aa, Streptococcus pneumoniae; identical to SEQ ID NO: 53246

SEQ ID NO: 53369 - protein, 1027 aa, Streptococcus pneumoniae; identical to SEQ ID NO: 53247

SEQ ID NO: 53370 - protein, 269 aa, Streptococcus pneumoniae; identical to SEQ ID NO: 53228

SEQ ID NO: 53371 - protein, 533 aa, Streptococcus pneumoniae; identical to SEQ ID NO: 53235

SEQ ID NO: 53372 - protein, 269 aa, Streptococcus pneumoniae; identical to SEQ ID NO: 53246

SEQ ID NO: 53373 - protein, 1027 aa, Streptococcus pneumoniae; identical to SEQ ID NO: 53247

SEQ ID NO: 53374 - protein, 269 aa, Streptococcus pneumoniae; identical to SEQ ID NO: 53228

SEQ ID NO: 53375 - protein, 990 aa, Streptococcus pneumoniae; identical to SEQ ID NO: 53229

SEQ ID NO: 53376 - protein, 269 aa, Streptococcus pneumoniae; identical to SEQ ID NO: 53228

SEQ ID NO: 53377 - protein, 990 aa, Streptococcus pneumoniae; identical to SEQ ID NO: 53229

SEQ ID NO: 53378 - protein, 269 aa, Streptococcus pneumoniae; identical to SEQ ID NO: 53246

SEQ ID NO: 53379 - protein, 1027 aa, Streptococcus pneumoniae; identical to SEQ ID NO: 53261

SEQ ID NO: 53380 - protein, 269 aa, Streptococcus pneumoniae; identical to SEQ ID NO: 53246

SEQ ID NO: 53381 - protein, 1027 aa, Streptococcus pneumoniae; identical to SEQ ID NO: 53247

SEQ ID NO: 53382 - protein, 269 aa, Streptococcus pneumoniae; identical to SEQ ID NO: 53228

SEQ ID NO: 53383 - protein, 533 aa, Streptococcus pneumoniae
MIEFGKKSLYFSKLVRSKAKMIEFEIPLESHIPISEDAQKSFLGALAIAADTARKYFEDYINHKSFDSQLKNQLHNVAEYFDALLVSGLGNSAEYQDYIAILGTTAYYLGDYNGSSRVMVNYISDDMQLLEESITLVKVFINVITDKLFLNHTPIEGKYSSELNTLVESYRNYILSKTEFSIDIYRDLQDKVYRNGSDFSVIIVNCLLAVVCKKIDSSSTKLLPEFSGLDFSLWQDYIQSTGRIKELWPSQIELGKQAIFSGKSGIVQMPTSSGKTASINLTLRSAFYSNRIDNALIVAPFRALCREIYRDINAHFVDENNVIVSEVFDLPEIPQDFSIFNDGKKRVFILTPGKLLFLLRNHQSFIDEIGLCIFDEAHLFDDPSRGTNFELLLSTVKQIFPKGIQKILISAVIPNSEAINRWFNEDGVIVSNNSIKTTEKRVAFSDLNGSNEQLYFIDPITFEEEFFVPRTVSVSELEQLGKERKQKVFPELTNENDISIYYGIKLINNGGVGIFCGRKDTVNVILRRFIDLT

SEQ ID NO: 53384 - protein, 269 aa, Streptococcus pneumoniae; identical to SEQ ID NO: 53216

SEQ ID NO: 53385 - protein, 1027 aa, Streptococcus pneumoniae; identical to SEQ ID NO: 53217

SEQ ID NO: 53386 - protein, 269 aa, Streptococcus pneumoniae; identical to SEQ ID NO: 53246

SEQ ID NO: 53387 - protein, 1027 aa, Streptococcus pneumoniae; identical to SEQ ID NO: 53247

SEQ ID NO: 53388 - protein, 269 aa, Streptococcus pneumoniae; identical to SEQ ID NO: 53228

SEQ ID NO: 53389 - protein, 990 aa, Streptococcus pneumoniae; identical to SEQ ID NO: 53229

SEQ ID NO: 53390 - protein, 269 aa, Streptococcus pneumoniae; identical to SEQ ID NO: 53216

SEQ ID NO: 53391 - protein, 1027 aa, Streptococcus pneumoniae; identical to SEQ ID NO: 53217

SEQ ID NO: 53392 - protein, 269 aa, Streptococcus pneumoniae; identical to SEQ ID NO: 53216

SEQ ID NO: 53393 - protein, 1027 aa, Streptococcus pneumoniae; identical to SEQ ID NO: 53217

SEQ ID NO: 53394 - protein, 269 aa, Streptococcus pneumoniae; identical to SEQ ID NO: 53216

SEQ ID NO: 53395 - protein, 1027 aa, Streptococcus pneumoniae; identical to SEQ ID NO: 53217

SEQ ID NO: 53396 - protein, 269 aa, Streptococcus pneumoniae; identical to SEQ ID NO: 53228

SEQ ID NO: 53397 - protein, 533 aa, Streptococcus pneumoniae; identical to SEQ ID NO: 53235

SEQ ID NO: 53398 - protein, 269 aa, Streptococcus pneumoniae
MEKMHSYIKYLIHEDPIITDEGKQVEILHLDIQDDPEIFEDWANQFRRNYCSDDELAEMIGFMNISPKEYLKNFKLPSDSGIGLSTMSGDFGEILVFDYLQNIEEYVVPRTRYDSRVNKDTSTQGSDVLGYKQDSSNVSNDEVVVIEVKSSASDSSSSQAKNKLQEAINHSDKDFERFSTSIVASYLRLKKSNSDQENVVERFLNITDKPFNVIYGAVAVYSNQSYDIYVIKTVVSKKHRDFQKLRLLVIHSDELMKFIRELYSKASEV

SEQ ID NO: 53399 - protein, 990 aa, Streptococcus pneumoniae
MIEFGKKSLYFSKLVRSKAKMIEFEIPLESHIPISEDAQKSFLGALAIAADTARKYFEDYINHKSFDSQLKNQLHNVAEYFDALLVSGLGNSAEYQDYIAILGTTAYYLGDYNGSSRVMVNYISDDMQLLEESITLVKVFINVITDKLFLNHTPIEGKYSSELNTLVESYRNYILSKTEFSIDIYRDLQDKVYRNGSDFSVIIVNCLLAVVCKKIDSSSTKLLPEFSGLDFSLWQDYIQSTGSIKELWPSQIELGKQAIFSGKSGIVQMPTSSGKTASINLTLRSAFYSNRIDNALIVAPFRALCREIYRDINAHFVDENNVIVSEVFDLPEIPQDFSIFNDGKKRVFILTPGKLLFLLRNHQSFIDEIGLCIFDEAHLFDDPSRGTNFELLLSTVKQIFPKGIQKILISAVIPNSEAINRWFNEDGVIVSNNSIKTTEKRVAFSDLNGSNEQLYFIDPITFEEEFFVPRTVSVSELEQLGKERKQKVFPELTNENDISIYYGIKLINNGGVGIFCGRKDTVNVILRRFIDLNNRNYDLTDFLKNSDRSEVEKIGNLIGQNLGYDSVEYTCSQLGVFSHHSGIPMGIRIAIEYAFSKSKINNVVCTSTLAQGINLPIKYLIISSVYQAGDAIKVRDFQNLIGRAGRAGKYTEGTIILTEPNIYKSPKNKWKKQNYKALLNPINTEGCQSNILSIIQFKSVVPTDYRFAPIKFDFWNLIKERFDSSVDYRTKINNILSKLKRKNSLYFKDFNSKIDQIDNTLIAIENYIASMYATELETDSLAENTFGYFLGNNEEEKEKIKELFILIKSKIITSSVETEIIAKNSIGLYQSELLKEWVQENKTSIISCEKEEELLGVLTKKIIDFSNNKEMRKLSIENLNYISQLWIKGISYFQILESCTEKSISIEKRGKSKPIDMSDIISICDNGLGYETSMVLNAINNILEKLVGEELDVLTMLIKRLKYGLPLEKEINIYELGFSDRIVVQVIIHR

SEQ ID NO: 53400 - protein, 269 aa, Streptococcus pneumoniae; identical to SEQ ID NO: 53228

SEQ ID NO: 53401 - protein, 533 aa, Streptococcus pneumoniae; identical to SEQ ID NO: 53235

SEQ ID NO: 53402 - protein, 269 aa, Streptococcus pneumoniae; identical to SEQ ID NO: 53228

SEQ ID NO: 53403 - protein, 990 aa, Streptococcus pneumoniae; identical to SEQ ID NO: 53229

SEQ ID NO: 53404 - protein, 269 aa, Streptococcus pneumoniae; identical to SEQ ID NO: 53216

SEQ ID NO: 53405 - protein, 1027 aa, Streptococcus pneumoniae; identical to SEQ ID NO: 53217

SEQ ID NO: 53406 - protein, 269 aa, Streptococcus pneumoniae; identical to SEQ ID NO: 53216

SEQ ID NO: 53407 - protein, 1027 aa, Streptococcus pneumoniae; identical to SEQ ID NO: 53217

SEQ ID NO: 53408 - protein, 269 aa, Streptococcus pneumoniae; identical to SEQ ID NO: 53216

SEQ ID NO: 53409 - protein, 1027 aa, Streptococcus pneumoniae; identical to SEQ ID NO: 53217

SEQ ID NO: 53410 - protein, 269 aa, Streptococcus pneumoniae; identical to SEQ ID NO: 53228

SEQ ID NO: 53411 - protein, 990 aa, Streptococcus pneumoniae; identical to SEQ ID NO: 53229

SEQ ID NO: 53412 - protein, 269 aa, Streptococcus pneumoniae; identical to SEQ ID NO: 53246

SEQ ID NO: 53413 - protein, 1027 aa, Streptococcus pneumoniae; identical to SEQ ID NO: 53261

SEQ ID NO: 53414 - protein, 266 aa, Streptococcus pneumoniae; identical to SEQ ID NO: 53222

SEQ ID NO: 53415 - protein, 815 aa, Streptococcus pneumoniae; identical to SEQ ID NO: 53251

SEQ ID NO: 53416 - protein, 269 aa, Streptococcus pneumoniae; identical to SEQ ID NO: 53246

SEQ ID NO: 53417 - protein, 1027 aa, Streptococcus pneumoniae; identical to SEQ ID NO: 53247

SEQ ID NO: 53418 - protein, 207 aa, Streptococcus pneumoniae
MNISPKEYLENFKLPSDSGIGLSTMSGDFGEILVSDYLQYIEEYVVPRTRYDSKVNKNTSTQGSDVLGYKQDSSNVSNDEVVVIEVKSSASDSSSSKAKNKLQEAINHSDKDFERFSTSIVASYLRLKKSNSDQANVVERFLNITDKPFNVIYGAVAVYSNQSYDIDVIKTVVSKNHRDFQKLRLLVIHSNELMKFIRELYSKASEV

SEQ ID NO: 53419 - protein, 835 aa, Streptococcus pneumoniae; identical to SEQ ID NO: 53245

SEQ ID NO: 53420 - protein, 269 aa, Streptococcus pneumoniae; identical to SEQ ID NO: 53228

SEQ ID NO: 53421 - protein, 533 aa, Streptococcus pneumoniae; identical to SEQ ID NO: 53235

SEQ ID NO: 53422 - protein, 269 aa, Streptococcus pneumoniae; identical to SEQ ID NO: 53216

SEQ ID NO: 53423 - protein, 1027 aa, Streptococcus pneumoniae; identical to SEQ ID NO: 53217

SEQ ID NO: 53424 - protein, 269 aa, Streptococcus pneumoniae; identical to SEQ ID NO: 53246

SEQ ID NO: 53425 - protein, 1027 aa, Streptococcus pneumoniae; identical to SEQ ID NO: 53247

SEQ ID NO: 53426 - protein, 269 aa, Streptococcus pneumoniae; identical to SEQ ID NO: 53228

SEQ ID NO: 53427 - protein, 990 aa, Streptococcus pneumoniae; identical to SEQ ID NO: 53229

SEQ ID NO: 53428 - protein, 269 aa, Streptococcus pneumoniae; identical to SEQ ID NO: 53216

SEQ ID NO: 53429 - protein, 1027 aa, Streptococcus pneumoniae; identical to SEQ ID NO: 53217

SEQ ID NO: 53430 - protein, 269 aa, Streptococcus pneumoniae; identical to SEQ ID NO: 53228

SEQ ID NO: 53431 - protein, 533 aa, Streptococcus pneumoniae; identical to SEQ ID NO: 53235

SEQ ID NO: 53432 - protein, 269 aa, Streptococcus pneumoniae; identical to SEQ ID NO: 53228

SEQ ID NO: 53433 - protein, 990 aa, Streptococcus pneumoniae; identical to SEQ ID NO: 53229

SEQ ID NO: 53434 - protein, 269 aa, Streptococcus pneumoniae; identical to SEQ ID NO: 53228

SEQ ID NO: 53435 - protein, 533 aa, Streptococcus pneumoniae; identical to SEQ ID NO: 53235

SEQ ID NO: 53436 - protein, 269 aa, Streptococcus pneumoniae; identical to SEQ ID NO: 53228

SEQ ID NO: 53437 - protein, 533 aa, Streptococcus pneumoniae; identical to SEQ ID NO: 53235

SEQ ID NO: 53438 - protein, 269 aa, Streptococcus pneumoniae; identical to SEQ ID NO: 53228

SEQ ID NO: 53439 - protein, 990 aa, Streptococcus pneumoniae; identical to SEQ ID NO: 53229

SEQ ID NO: 53440 - protein, 269 aa, Streptococcus pneumoniae; identical to SEQ ID NO: 53228

SEQ ID NO: 53441 - protein, 533 aa, Streptococcus pneumoniae; identical to SEQ ID NO: 53235

SEQ ID NO: 53442 - protein, 269 aa, Streptococcus pneumoniae; identical to SEQ ID NO: 53228

SEQ ID NO: 53443 - protein, 533 aa, Streptococcus pneumoniae; identical to SEQ ID NO: 53235

SEQ ID NO: 53444 - protein, 269 aa, Streptococcus pneumoniae; identical to SEQ ID NO: 53246

SEQ ID NO: 53445 - protein, 1027 aa, Streptococcus pneumoniae; identical to SEQ ID NO: 53261

SEQ ID NO: 53446 - protein, 269 aa, Streptococcus pneumoniae; identical to SEQ ID NO: 53228

SEQ ID NO: 53447 - protein, 533 aa, Streptococcus pneumoniae; identical to SEQ ID NO: 53235

SEQ ID NO: 53448 - protein, 269 aa, Streptococcus pneumoniae; identical to SEQ ID NO: 53228

SEQ ID NO: 53449 - protein, 533 aa, Streptococcus pneumoniae; identical to SEQ ID NO: 53235

SEQ ID NO: 53450 - protein, 269 aa, Streptococcus pneumoniae; identical to SEQ ID NO: 53228

SEQ ID NO: 53451 - protein, 990 aa, Streptococcus pneumoniae; identical to SEQ ID NO: 53229

SEQ ID NO: 53452 - protein, 269 aa, Streptococcus pneumoniae; identical to SEQ ID NO: 53228

SEQ ID NO: 53453 - protein, 990 aa, Streptococcus pneumoniae; identical to SEQ ID NO: 53229

SEQ ID NO: 53454 - protein, 269 aa, Streptococcus pneumoniae; identical to SEQ ID NO: 53246

SEQ ID NO: 53455 - protein, 1027 aa, Streptococcus pneumoniae; identical to SEQ ID NO: 53247

SEQ ID NO: 53456 - protein, 269 aa, Streptococcus pneumoniae; identical to SEQ ID NO: 53216

SEQ ID NO: 53457 - protein, 1027 aa, Streptococcus pneumoniae
MIEFGRRSLYFSKLVRSKAKMIEFDIPLESHLPISEDAQKSFLGALAIVADTARKYFEVYINRKSFNLQLKNQLHNAAEYFDALLVSGLGNSAEYQDYIAILGTTAYYLCDYNGSSRVMINYISDDIQLLEDCMTLIKVFIDVVTDELFLNHTPIEGKYSSELNTLVESYRNYILSKTEFSIDIYRDLQDKVYRNGSDFSVIIVNCLLAVVCKKINSSSTKLLPEFSGLDFSLWQDYIQSTGSIKELWPSQIELGKQGIFSGKSGIVQMPTSSGKTASINLTLRSAFYSNRIDNALIVAPFRALCREIYRDINAHFVDENNVIVSEVFDLPEIPQDFSIFNDGKKRVFILTPEKLLFLLRNHQSFIDEIGLCIFDEAHLFDDPSRGTNFELLLSTVKQIFPKGIQKILISAVIPNSEAINRWFNEDGVIVSNNSIKTTEKRVAFSDLNGSNEQLYFIDPITFEEEFFVPRTVSVSELEQLGKERKQKVFPELTNANDISIYYGTKLINNGGVGIFCGRKDTVNVILRRFIDLNNRNYDLTDFLKNSDRSEVEKIGNLIGQNLGYDSVEYTCSQLGVFSHHSGIPMGIRIAIEYAFSKSKINNVVCTSTLAQGINLPIKYLIISSVYQAGDAIKVRDFQNLIGRAGRAGKYTEGTIILTEPNIYKSPKNKWKKQNYKALLNPINTEGCQSNILSIIQFKSVVPTDYRFAPIKFDFWNLIKERFDSSVDYRTKINNILSKLKRKNSLYFKDFNSKIDQIDNTLIAIENYIASMYATELETDSLAENTFGYFLGNEEEKEKIKELFILIKSKIITSSVETEIIAKNSIGLYQSELLKEWVQENKTSILSCEKEEELLGVLTKKIIDFSNNKEMRKLSIENLNYISQLWIKGISYFQILESCTEKSISIEKRGKSKPIDMSDIISICDNGLGYETSMVLNAINNILEKLVGEELDVLTMLIKRLKYGLPLEKEINIYELGFSDRIVVQVIGQEINSVSKNQIRNEIKQKSARLEDKLSDFPSYYIQIINEM

SEQ ID NO: 53458 - protein, 266 aa, Streptococcus pneumoniae; identical to SEQ ID NO: 53222

SEQ ID NO: 53459 - protein, 815 aa, Streptococcus pneumoniae; identical to SEQ ID NO: 53251

SEQ ID NO: 53460 - protein, 269 aa, Streptococcus pneumoniae; identical to SEQ ID NO: 53246

SEQ ID NO: 53461 - protein, 1027 aa, Streptococcus pneumoniae; identical to SEQ ID NO: 53283

SEQ ID NO: 53462 - protein, 266 aa, Streptococcus pneumoniae; identical to SEQ ID NO: 53222

SEQ ID NO: 53463 - protein, 815 aa, Streptococcus pneumoniae; identical to SEQ ID NO: 53251

SEQ ID NO: 53464 - protein, 269 aa, Streptococcus pneumoniae; identical to SEQ ID NO: 53216

SEQ ID NO: 53465 - protein, 1027 aa, Streptococcus pneumoniae; identical to SEQ ID NO: 53217

SEQ ID NO: 53466 - protein, 269 aa, Streptococcus pneumoniae; identical to SEQ ID NO: 53216

SEQ ID NO: 53467 - protein, 1027 aa, Streptococcus pneumoniae; identical to SEQ ID NO: 53217

SEQ ID NO: 53468 - protein, 269 aa, Streptococcus pneumoniae; identical to SEQ ID NO: 53246

SEQ ID NO: 53469 - protein, 1027 aa, Streptococcus pneumoniae; identical to SEQ ID NO: 53247

SEQ ID NO: 53470 - protein, 269 aa, Streptococcus pneumoniae; identical to SEQ ID NO: 53228

SEQ ID NO: 53471 - protein, 533 aa, Streptococcus pneumoniae; identical to SEQ ID NO: 53235

SEQ ID NO: 53472 - protein, 266 aa, Streptococcus pneumoniae; identical to SEQ ID NO: 53222

SEQ ID NO: 53473 - protein, 835 aa, Streptococcus pneumoniae; identical to SEQ ID NO: 53245

SEQ ID NO: 53474 - protein, 269 aa, Streptococcus pneumoniae; identical to SEQ ID NO: 53246

SEQ ID NO: 53475 - protein, 1027 aa, Streptococcus pneumoniae; identical to SEQ ID NO: 53247

SEQ ID NO: 53476 - protein, 266 aa, Streptococcus pneumoniae; identical to SEQ ID NO: 53222

SEQ ID NO: 53477 - protein, 815 aa, Streptococcus pneumoniae; identical to SEQ ID NO: 53251

SEQ ID NO: 53478 - protein, 269 aa, Streptococcus pneumoniae; identical to SEQ ID NO: 53246

SEQ ID NO: 53479 - protein, 1027 aa, Streptococcus pneumoniae; identical to SEQ ID NO: 53247

SEQ ID NO: 53480 - protein, 269 aa, Streptococcus pneumoniae; identical to SEQ ID NO: 53228

SEQ ID NO: 53481 - protein, 533 aa, Streptococcus pneumoniae; identical to SEQ ID NO: 53235

SEQ ID NO: 53482 - protein, 269 aa, Streptococcus pneumoniae; identical to SEQ ID NO: 53246

SEQ ID NO: 53483 - protein, 1027 aa, Streptococcus pneumoniae; identical to SEQ ID NO: 53247

SEQ ID NO: 53484 - protein, 266 aa, Streptococcus pneumoniae; identical to SEQ ID NO: 53222

SEQ ID NO: 53485 - protein, 815 aa, Streptococcus pneumoniae; identical to SEQ ID NO: 53251

SEQ ID NO: 53486 - protein, 269 aa, Streptococcus pneumoniae; identical to SEQ ID NO: 53246

SEQ ID NO: 53487 - protein, 1027 aa, Streptococcus pneumoniae; identical to SEQ ID NO: 53247

SEQ ID NO: 53488 - protein, 269 aa, Streptococcus pneumoniae; identical to SEQ ID NO: 53246

SEQ ID NO: 53489 - protein, 1027 aa, Streptococcus pneumoniae; identical to SEQ ID NO: 53247

SEQ ID NO: 53490 - protein, 269 aa, Streptococcus pneumoniae; identical to SEQ ID NO: 53228

SEQ ID NO: 53491 - protein, 990 aa, Streptococcus pneumoniae; identical to SEQ ID NO: 53229

SEQ ID NO: 53492 - protein, 269 aa, Streptococcus pneumoniae; identical to SEQ ID NO: 53216

SEQ ID NO: 53493 - protein, 1027 aa, Streptococcus pneumoniae; identical to SEQ ID NO: 53217

SEQ ID NO: 53494 - protein, 269 aa, Streptococcus pneumoniae; identical to SEQ ID NO: 53216

SEQ ID NO: 53495 - protein, 1027 aa, Streptococcus pneumoniae; identical to SEQ ID NO: 53217

SEQ ID NO: 53496 - protein, 269 aa, Streptococcus pneumoniae; identical to SEQ ID NO: 53246

SEQ ID NO: 53497 - protein, 1027 aa, Streptococcus pneumoniae; identical to SEQ ID NO: 53247

SEQ ID NO: 53498 - protein, 269 aa, Streptococcus pneumoniae; identical to SEQ ID NO: 53228

SEQ ID NO: 53499 - protein, 990 aa, Streptococcus pneumoniae; identical to SEQ ID NO: 53229

SEQ ID NO: 53500 - protein, 269 aa, Streptococcus pneumoniae; identical to SEQ ID NO: 53216

SEQ ID NO: 53501 - protein, 1027 aa, Streptococcus pneumoniae; identical to SEQ ID NO: 53217

SEQ ID NO: 53502 - protein, 269 aa, Streptococcus pneumoniae; identical to SEQ ID NO: 53228

SEQ ID NO: 53503 - protein, 990 aa, Streptococcus pneumoniae; identical to SEQ ID NO: 53229

SEQ ID NO: 53504 - protein, 269 aa, Streptococcus pneumoniae; identical to SEQ ID NO: 53228

SEQ ID NO: 53505 - protein, 990 aa, Streptococcus pneumoniae; identical to SEQ ID NO: 53229

SEQ ID NO: 53506 - protein, 269 aa, Streptococcus pneumoniae; identical to SEQ ID NO: 53228

SEQ ID NO: 53507 - protein, 533 aa, Streptococcus pneumoniae; identical to SEQ ID NO: 53235

SEQ ID NO: 53508 - protein, 269 aa, Streptococcus pneumoniae; identical to SEQ ID NO: 53216

SEQ ID NO: 53509 - protein, 1027 aa, Streptococcus pneumoniae; identical to SEQ ID NO: 53217

SEQ ID NO: 53510 - protein, 269 aa, Streptococcus pneumoniae; identical to SEQ ID NO: 53246

SEQ ID NO: 53511 - protein, 1027 aa, Streptococcus pneumoniae; identical to SEQ ID NO: 53261

SEQ ID NO: 53512 - protein, 269 aa, Streptococcus pneumoniae; identical to SEQ ID NO: 53228

SEQ ID NO: 53513 - protein, 533 aa, Streptococcus pneumoniae; identical to SEQ ID NO: 53235

SEQ ID NO: 53514 - protein, 269 aa, Streptococcus pneumoniae; identical to SEQ ID NO: 53246

SEQ ID NO: 53515 - protein, 1027 aa, Streptococcus pneumoniae; identical to SEQ ID NO: 53247

SEQ ID NO: 53516 - protein, 269 aa, Streptococcus pneumoniae; identical to SEQ ID NO: 53228

SEQ ID NO: 53517 - protein, 533 aa, Streptococcus pneumoniae; identical to SEQ ID NO: 53235

SEQ ID NO: 53518 - protein, 266 aa, Streptococcus pneumoniae; identical to SEQ ID NO: 53222

SEQ ID NO: 53519 - protein, 835 aa, Streptococcus pneumoniae; identical to SEQ ID NO: 53245

SEQ ID NO: 53520 - protein, 269 aa, Streptococcus pneumoniae; identical to SEQ ID NO: 53228

SEQ ID NO: 53521 - protein, 533 aa, Streptococcus pneumoniae; identical to SEQ ID NO: 53235

SEQ ID NO: 53522 - protein, 269 aa, Streptococcus pneumoniae; identical to SEQ ID NO: 53228

SEQ ID NO: 53523 - protein, 990 aa, Streptococcus pneumoniae; identical to SEQ ID NO: 53229

SEQ ID NO: 53524 - protein, 269 aa, Streptococcus pneumoniae; identical to SEQ ID NO: 53228

SEQ ID NO: 53525 - protein, 990 aa, Streptococcus pneumoniae; identical to SEQ ID NO: 53229

SEQ ID NO: 53526 - protein, 269 aa, Streptococcus pneumoniae; identical to SEQ ID NO: 53228

SEQ ID NO: 53527 - protein, 533 aa, Streptococcus pneumoniae; identical to SEQ ID NO: 53235

SEQ ID NO: 53528 - protein, 269 aa, Streptococcus pneumoniae; identical to SEQ ID NO: 53216

SEQ ID NO: 53529 - protein, 1027 aa, Streptococcus pneumoniae; identical to SEQ ID NO: 53217

SEQ ID NO: 53530 - protein, 266 aa, Streptococcus pneumoniae; identical to SEQ ID NO: 53222

SEQ ID NO: 53531 - protein, 268 aa, Streptococcus pneumoniae
MIEFDIPLESHLPISEDAQKSFLGALAIVADTARKYFEVYINRKSFNLQLKNQLHNAAEYFDALLVSGLGNSAEYQDYIAILGTTAYYLCDYNGSSRVMINYISDDIQLLEDCMTLIKVFIDVVTDELFLNHTPIEGKYSSELNTLVESYRNYILSKTEFSIDIYRDLQDKVYRNGSDFSVIIVNCLLAVVCKKINSSSTKLLPEFSGLDFSLWQDYIQSTGSIKELWPSQIELGKQGIFSGKSGIVQMPTSSGKTASINLTLRSAFY

SEQ ID NO: 53532 - protein, 269 aa, Streptococcus pneumoniae
MEKMHSYIKYLTQEDPIITDEGKQIEILHLDIQDDPEIFEDWAKQFRRNYCSDDELAEMIGFMNISPKEYLENFKLPSDSGIGLSTMSGDFGEILVSDYLQYIEEYVVPRTSYDSKVNKNTSTQGSDVLGYKQDSSNVSNDEVVVIEVKSSASDSSSSKAKNKLQEAINHSDKDFERFSTSIVASYLRLKKSNSDQANVVERFLNITDKPFNVIYGAVAVYSNQSYDIDVIKTVVSKNHRDFQKLRLLVIHSNELMKFIRELYSKASEV

SEQ ID NO: 53533 - protein, 1027 aa, Streptococcus pneumoniae; identical to SEQ ID NO: 53217

SEQ ID NO: 53534 - protein, 269 aa, Streptococcus pneumoniae; identical to SEQ ID NO: 53228

SEQ ID NO: 53535 - protein, 990 aa, Streptococcus pneumoniae; identical to SEQ ID NO: 53229

SEQ ID NO: 53536 - protein, 269 aa, Streptococcus pneumoniae; identical to SEQ ID NO: 53228

SEQ ID NO: 53537 - protein, 990 aa, Streptococcus pneumoniae; identical to SEQ ID NO: 53229

SEQ ID NO: 53538 - protein, 269 aa, Streptococcus pneumoniae; identical to SEQ ID NO: 53216

SEQ ID NO: 53539 - protein, 1027 aa, Streptococcus pneumoniae; identical to SEQ ID NO: 53217

SEQ ID NO: 53540 - protein, 269 aa, Streptococcus pneumoniae; identical to SEQ ID NO: 53228

SEQ ID NO: 53541 - protein, 533 aa, Streptococcus pneumoniae; identical to SEQ ID NO: 53235

SEQ ID NO: 53542 - protein, 269 aa, Streptococcus pneumoniae; identical to SEQ ID NO: 53228

SEQ ID NO: 53543 - protein, 533 aa, Streptococcus pneumoniae; identical to SEQ ID NO: 53235

SEQ ID NO: 53544 - protein, 269 aa, Streptococcus pneumoniae; identical to SEQ ID NO: 53216

SEQ ID NO: 53545 - protein, 1027 aa, Streptococcus pneumoniae; identical to SEQ ID NO: 53217

SEQ ID NO: 53546 - protein, 269 aa, Streptococcus pneumoniae; identical to SEQ ID NO: 53246

SEQ ID NO: 53547 - protein, 1027 aa, Streptococcus pneumoniae; identical to SEQ ID NO: 53247

SEQ ID NO: 53548 - protein, 269 aa, Streptococcus pneumoniae; identical to SEQ ID NO: 53246

SEQ ID NO: 53549 - protein, 1027 aa, Streptococcus pneumoniae; identical to SEQ ID NO: 53247

SEQ ID NO: 53550 - protein, 269 aa, Streptococcus pneumoniae; identical to SEQ ID NO: 53228

SEQ ID NO: 53551 - protein, 533 aa, Streptococcus pneumoniae; identical to SEQ ID NO: 53235

SEQ ID NO: 53552 - protein, 269 aa, Streptococcus pneumoniae; identical to SEQ ID NO: 53246

SEQ ID NO: 53553 - protein, 1027 aa, Streptococcus pneumoniae; identical to SEQ ID NO: 53247

SEQ ID NO: 53554 - protein, 269 aa, Streptococcus pneumoniae; identical to SEQ ID NO: 53228

SEQ ID NO: 53555 - protein, 533 aa, Streptococcus pneumoniae; identical to SEQ ID NO: 53235

SEQ ID NO: 53556 - protein, 269 aa, Streptococcus pneumoniae; identical to SEQ ID NO: 53246

SEQ ID NO: 53557 - protein, 1027 aa, Streptococcus pneumoniae; identical to SEQ ID NO: 53247

SEQ ID NO: 53558 - protein, 269 aa, Streptococcus pneumoniae; identical to SEQ ID NO: 53216

SEQ ID NO: 53559 - protein, 1027 aa, Streptococcus pneumoniae; identical to SEQ ID NO: 53217

SEQ ID NO: 53560 - protein, 269 aa, Streptococcus pneumoniae; identical to SEQ ID NO: 53228

SEQ ID NO: 53561 - protein, 533 aa, Streptococcus pneumoniae; identical to SEQ ID NO: 53235

SEQ ID NO: 53562 - protein, 269 aa, Streptococcus pneumoniae; identical to SEQ ID NO: 53228

SEQ ID NO: 53563 - protein, 990 aa, Streptococcus pneumoniae; identical to SEQ ID NO: 53229

SEQ ID NO: 53564 - protein, 269 aa, Streptococcus pneumoniae; identical to SEQ ID NO: 53216

SEQ ID NO: 53565 - protein, 1027 aa, Streptococcus pneumoniae; identical to SEQ ID NO: 53217

SEQ ID NO: 53566 - protein, 269 aa, Streptococcus pneumoniae; identical to SEQ ID NO: 53246

SEQ ID NO: 53567 - protein, 1027 aa, Streptococcus pneumoniae; identical to SEQ ID NO: 53261

SEQ ID NO: 53568 - protein, 269 aa, Streptococcus pneumoniae; identical to SEQ ID NO: 53246

SEQ ID NO: 53569 - protein, 1027 aa, Streptococcus pneumoniae; identical to SEQ ID NO: 53247

SEQ ID NO: 53570 - protein, 269 aa, Streptococcus pneumoniae; identical to SEQ ID NO: 53246

SEQ ID NO: 53571 - protein, 1027 aa, Streptococcus pneumoniae; identical to SEQ ID NO: 53247

SEQ ID NO: 53572 - protein, 269 aa, Streptococcus pneumoniae; identical to SEQ ID NO: 53246

SEQ ID NO: 53573 - protein, 1027 aa, Streptococcus pneumoniae; identical to SEQ ID NO: 53247

SEQ ID NO: 53574 - protein, 269 aa, Streptococcus pneumoniae; identical to SEQ ID NO: 53228

SEQ ID NO: 53575 - protein, 533 aa, Streptococcus pneumoniae; identical to SEQ ID NO: 53235

SEQ ID NO: 53576 - protein, 269 aa, Streptococcus pneumoniae; identical to SEQ ID NO: 53216

SEQ ID NO: 53577 - protein, 1027 aa, Streptococcus pneumoniae; identical to SEQ ID NO: 53217

SEQ ID NO: 53578 - protein, 269 aa, Streptococcus pneumoniae; identical to SEQ ID NO: 53228

SEQ ID NO: 53579 - protein, 533 aa, Streptococcus pneumoniae; identical to SEQ ID NO: 53235

SEQ ID NO: 53580 - protein, 269 aa, Streptococcus pneumoniae; identical to SEQ ID NO: 53228

SEQ ID NO: 53581 - protein, 533 aa, Streptococcus pneumoniae; identical to SEQ ID NO: 53235

SEQ ID NO: 53582 - protein, 269 aa, Streptococcus pneumoniae; identical to SEQ ID NO: 53216

SEQ ID NO: 53583 - protein, 1027 aa, Streptococcus pneumoniae; identical to SEQ ID NO: 53217

SEQ ID NO: 53584 - protein, 269 aa, Streptococcus pneumoniae; identical to SEQ ID NO: 53228

SEQ ID NO: 53585 - protein, 533 aa, Streptococcus pneumoniae; identical to SEQ ID NO: 53235

SEQ ID NO: 53586 - protein, 269 aa, Streptococcus pneumoniae; identical to SEQ ID NO: 53228

SEQ ID NO: 53587 - protein, 533 aa, Streptococcus pneumoniae; identical to SEQ ID NO: 53235

SEQ ID NO: 53588 - protein, 269 aa, Streptococcus pneumoniae; identical to SEQ ID NO: 53216

SEQ ID NO: 53589 - protein, 1027 aa, Streptococcus pneumoniae; identical to SEQ ID NO: 53217

SEQ ID NO: 53590 - protein, 269 aa, Streptococcus pneumoniae; identical to SEQ ID NO: 53228

SEQ ID NO: 53591 - protein, 366 aa, Streptococcus pneumoniae
MIEFGKKSLYFSKLVRSKAKMIEFEIPLESHIPISEDAQKSFLGALAIAADTARKYFEDYINHKSFDSQLKNQLHNVAEYFDALLVSGLGNSAEYQDYIAILGTTAYYLGDYNGSSRVMVNYISDDMQLLEESITLVKVFINVITDKLFLNHTPIEGKYSSELNTLVESYRNYILSKTEFSIDIYRDLQDKVYRNGSDFSVIIVNCLLAVVCKKIDSSSTKLLPEFSGLDFSLWQDYIQSTGSIKELWPSQIELGKQAIFSGKSGIVQMPTSSGKTASINLTLRSAFYSNRIDNALIVAPFRALCREIYRDINAHFVDENNVIVSEVFDLPEIPQDFSIFNDGKKKSFYTYSRKIVVFIEKSSKFY

SEQ ID NO: 53592 - protein, 269 aa, Streptococcus pneumoniae; identical to SEQ ID NO: 53246

SEQ ID NO: 53593 - protein, 1027 aa, Streptococcus pneumoniae; identical to SEQ ID NO: 53247

SEQ ID NO: 53594 - protein, 269 aa, Streptococcus pneumoniae; identical to SEQ ID NO: 53216

SEQ ID NO: 53595 - protein, 1027 aa, Streptococcus pneumoniae; identical to SEQ ID NO: 53217

SEQ ID NO: 53596 - protein, 269 aa, Streptococcus pneumoniae; identical to SEQ ID NO: 53228

SEQ ID NO: 53597 - protein, 533 aa, Streptococcus pneumoniae; identical to SEQ ID NO: 53235

SEQ ID NO: 53598 - protein, 269 aa, Streptococcus pneumoniae; identical to SEQ ID NO: 53216

SEQ ID NO: 53599 - protein, 1027 aa, Streptococcus pneumoniae; identical to SEQ ID NO: 53217

SEQ ID NO: 53600 - protein, 269 aa, Streptococcus pneumoniae; identical to SEQ ID NO: 53216

SEQ ID NO: 53601 - protein, 1027 aa, Streptococcus pneumoniae; identical to SEQ ID NO: 53217

SEQ ID NO: 53602 - protein, 269 aa, Streptococcus pneumoniae; identical to SEQ ID NO: 53246

SEQ ID NO: 53603 - protein, 1027 aa, Streptococcus pneumoniae; identical to SEQ ID NO: 53247

SEQ ID NO: 53604 - protein, 269 aa, Streptococcus pneumoniae; identical to SEQ ID NO: 53246

SEQ ID NO: 53605 - protein, 1027 aa, Streptococcus pneumoniae; identical to SEQ ID NO: 53247

SEQ ID NO: 53606 - protein, 269 aa, Streptococcus pneumoniae; identical to SEQ ID NO: 53216

SEQ ID NO: 53607 - protein, 1027 aa, Streptococcus pneumoniae; identical to SEQ ID NO: 53217

SEQ ID NO: 53608 - protein, 269 aa, Streptococcus pneumoniae; identical to SEQ ID NO: 53246

SEQ ID NO: 53609 - protein, 1027 aa, Streptococcus pneumoniae; identical to SEQ ID NO: 53247

SEQ ID NO: 53610 - protein, 269 aa, Streptococcus pneumoniae; identical to SEQ ID NO: 53228

SEQ ID NO: 53611 - protein, 533 aa, Streptococcus pneumoniae; identical to SEQ ID NO: 53235

SEQ ID NO: 53612 - protein, 269 aa, Streptococcus pneumoniae; identical to SEQ ID NO: 53246

SEQ ID NO: 53613 - protein, 1027 aa, Streptococcus pneumoniae; identical to SEQ ID NO: 53247

SEQ ID NO: 53614 - protein, 269 aa, Streptococcus pneumoniae; identical to SEQ ID NO: 53228

SEQ ID NO: 53615 - protein, 533 aa, Streptococcus pneumoniae; identical to SEQ ID NO: 53235

SEQ ID NO: 53616 - protein, 269 aa, Streptococcus pneumoniae; identical to SEQ ID NO: 53228

SEQ ID NO: 53617 - protein, 533 aa, Streptococcus pneumoniae; identical to SEQ ID NO: 53235

SEQ ID NO: 53618 - protein, 269 aa, Streptococcus pneumoniae; identical to SEQ ID NO: 53216

SEQ ID NO: 53619 - protein, 1027 aa, Streptococcus pneumoniae; identical to SEQ ID NO: 53217

SEQ ID NO: 53620 - protein, 269 aa, Streptococcus pneumoniae; identical to SEQ ID NO: 53228

SEQ ID NO: 53621 - protein, 990 aa, Streptococcus pneumoniae; identical to SEQ ID NO: 53229

SEQ ID NO: 53622 - protein, 269 aa, Streptococcus pneumoniae; identical to SEQ ID NO: 53228

SEQ ID NO: 53623 - protein, 533 aa, Streptococcus pneumoniae; identical to SEQ ID NO: 53235

SEQ ID NO: 53624 - protein, 269 aa, Streptococcus pneumoniae; identical to SEQ ID NO: 53228

SEQ ID NO: 53625 - protein, 533 aa, Streptococcus pneumoniae; identical to SEQ ID NO: 53235

SEQ ID NO: 53626 - protein, 269 aa, Streptococcus pneumoniae; identical to SEQ ID NO: 53246

SEQ ID NO: 53627 - protein, 1027 aa, Streptococcus pneumoniae; identical to SEQ ID NO: 53261

SEQ ID NO: 53628 - protein, 269 aa, Streptococcus pneumoniae; identical to SEQ ID NO: 53216

SEQ ID NO: 53629 - protein, 1027 aa, Streptococcus pneumoniae; identical to SEQ ID NO: 53217

SEQ ID NO: 53630 - protein, 269 aa, Streptococcus pneumoniae; identical to SEQ ID NO: 53246

SEQ ID NO: 53631 - protein, 1027 aa, Streptococcus pneumoniae; identical to SEQ ID NO: 53247

SEQ ID NO: 53632 - protein, 269 aa, Streptococcus pneumoniae; identical to SEQ ID NO: 53246

SEQ ID NO: 53633 - protein, 1027 aa, Streptococcus pneumoniae; identical to SEQ ID NO: 53247

SEQ ID NO: 53634 - protein, 269 aa, Streptococcus pneumoniae; identical to SEQ ID NO: 53228

SEQ ID NO: 53635 - protein, 533 aa, Streptococcus pneumoniae; identical to SEQ ID NO: 53235

SEQ ID NO: 53636 - protein, 269 aa, Streptococcus pneumoniae; identical to SEQ ID NO: 53216

SEQ ID NO: 53637 - protein, 1027 aa, Streptococcus pneumoniae; identical to SEQ ID NO: 53217

SEQ ID NO: 53638 - protein, 269 aa, Streptococcus pneumoniae; identical to SEQ ID NO: 53216

SEQ ID NO: 53639 - protein, 1027 aa, Streptococcus pneumoniae; identical to SEQ ID NO: 53217

SEQ ID NO: 53640 - protein, 269 aa, Streptococcus pneumoniae; identical to SEQ ID NO: 53228

SEQ ID NO: 53641 - protein, 533 aa, Streptococcus pneumoniae; identical to SEQ ID NO: 53235

SEQ ID NO: 53642 - protein, 269 aa, Streptococcus pneumoniae; identical to SEQ ID NO: 53228

SEQ ID NO: 53643 - protein, 533 aa, Streptococcus pneumoniae; identical to SEQ ID NO: 53235

SEQ ID NO: 53644 - protein, 269 aa, Streptococcus pneumoniae; identical to SEQ ID NO: 53216

SEQ ID NO: 53645 - protein, 1027 aa, Streptococcus pneumoniae; identical to SEQ ID NO: 53217

SEQ ID NO: 53646 - protein, 269 aa, Streptococcus pneumoniae; identical to SEQ ID NO: 53246

SEQ ID NO: 53647 - protein, 1027 aa, Streptococcus pneumoniae; identical to SEQ ID NO: 53247

SEQ ID NO: 53648 - protein, 269 aa, Streptococcus pneumoniae; identical to SEQ ID NO: 53216

SEQ ID NO: 53649 - protein, 1027 aa, Streptococcus pneumoniae; identical to SEQ ID NO: 53217

SEQ ID NO: 53650 - protein, 269 aa, Streptococcus pneumoniae; identical to SEQ ID NO: 53246

SEQ ID NO: 53651 - protein, 1027 aa, Streptococcus pneumoniae; identical to SEQ ID NO: 53247

SEQ ID NO: 53652 - protein, 269 aa, Streptococcus pneumoniae; identical to SEQ ID NO: 53216

SEQ ID NO: 53653 - protein, 1027 aa, Streptococcus pneumoniae; identical to SEQ ID NO: 53217

SEQ ID NO: 53654 - protein, 269 aa, Streptococcus pneumoniae; identical to SEQ ID NO: 53228

SEQ ID NO: 53655 - protein, 533 aa, Streptococcus pneumoniae; identical to SEQ ID NO: 53235

SEQ ID NO: 53656 - protein, 269 aa, Streptococcus pneumoniae; identical to SEQ ID NO: 53228

SEQ ID NO: 53657 - protein, 990 aa, Streptococcus pneumoniae; identical to SEQ ID NO: 53229

SEQ ID NO: 53658 - protein, 269 aa, Streptococcus pneumoniae; identical to SEQ ID NO: 53228

SEQ ID NO: 53659 - protein, 990 aa, Streptococcus pneumoniae; identical to SEQ ID NO: 53229

SEQ ID NO: 53660 - protein, 269 aa, Streptococcus pneumoniae; identical to SEQ ID NO: 53246

SEQ ID NO: 53661 - protein, 1027 aa, Streptococcus pneumoniae; identical to SEQ ID NO: 53283

SEQ ID NO: 53662 - protein, 269 aa, Streptococcus pneumoniae; identical to SEQ ID NO: 53228

SEQ ID NO: 53663 - protein, 533 aa, Streptococcus pneumoniae; identical to SEQ ID NO: 53235

SEQ ID NO: 53664 - protein, 266 aa, Streptococcus pneumoniae; identical to SEQ ID NO: 53222

SEQ ID NO: 53665 - protein, 815 aa, Streptococcus pneumoniae; identical to SEQ ID NO: 53251

SEQ ID NO: 53666 - protein, 266 aa, Streptococcus pneumoniae; identical to SEQ ID NO: 53222

SEQ ID NO: 53667 - protein, 815 aa, Streptococcus pneumoniae; identical to SEQ ID NO: 53251

SEQ ID NO: 53668 - protein, 269 aa, Streptococcus pneumoniae; identical to SEQ ID NO: 53216

SEQ ID NO: 53669 - protein, 1027 aa, Streptococcus pneumoniae; identical to SEQ ID NO: 53217

SEQ ID NO: 53670 - protein, 266 aa, Streptococcus pneumoniae; identical to SEQ ID NO: 53222

SEQ ID NO: 53671 - protein, 815 aa, Streptococcus pneumoniae; identical to SEQ ID NO: 53251

SEQ ID NO: 53672 - protein, 269 aa, Streptococcus pneumoniae; identical to SEQ ID NO: 53228

SEQ ID NO: 53673 - protein, 533 aa, Streptococcus pneumoniae; identical to SEQ ID NO: 53235

SEQ ID NO: 53674 - protein, 269 aa, Streptococcus pneumoniae; identical to SEQ ID NO: 53246

SEQ ID NO: 53675 - protein, 1027 aa, Streptococcus pneumoniae; identical to SEQ ID NO: 53261

SEQ ID NO: 53676 - protein, 266 aa, Streptococcus pneumoniae; identical to SEQ ID NO: 53222

SEQ ID NO: 53677 - protein, 835 aa, Streptococcus pneumoniae; identical to SEQ ID NO: 53245

SEQ ID NO: 53678 - protein, 269 aa, Streptococcus pneumoniae; identical to SEQ ID NO: 53228

SEQ ID NO: 53679 - protein, 533 aa, Streptococcus pneumoniae; identical to SEQ ID NO: 53235

SEQ ID NO: 53680 - protein, 269 aa, Streptococcus pneumoniae; identical to SEQ ID NO: 53246

SEQ ID NO: 53681 - protein, 1027 aa, Streptococcus pneumoniae; identical to SEQ ID NO: 53247

SEQ ID NO: 53682 - protein, 269 aa, Streptococcus pneumoniae; identical to SEQ ID NO: 53228

SEQ ID NO: 53683 - protein, 533 aa, Streptococcus pneumoniae; identical to SEQ ID NO: 53235

SEQ ID NO: 53684 - protein, 269 aa, Streptococcus pneumoniae; identical to SEQ ID NO: 53228

SEQ ID NO: 53685 - protein, 533 aa, Streptococcus pneumoniae; identical to SEQ ID NO: 53235

SEQ ID NO: 53686 - protein, 269 aa, Streptococcus pneumoniae; identical to SEQ ID NO: 53246

SEQ ID NO: 53687 - protein, 1027 aa, Streptococcus pneumoniae; identical to SEQ ID NO: 53261

SEQ ID NO: 53688 - protein, 269 aa, Streptococcus pneumoniae; identical to SEQ ID NO: 53216

SEQ ID NO: 53689 - protein, 1027 aa, Streptococcus pneumoniae; identical to SEQ ID NO: 53217

SEQ ID NO: 53690 - protein, 269 aa, Streptococcus pneumoniae; identical to SEQ ID NO: 53216

SEQ ID NO: 53691 - protein, 1027 aa, Streptococcus pneumoniae; identical to SEQ ID NO: 53217

SEQ ID NO: 53692 - protein, 269 aa, Streptococcus pneumoniae; identical to SEQ ID NO: 53246

SEQ ID NO: 53693 - protein, 1027 aa, Streptococcus pneumoniae; identical to SEQ ID NO: 53247

SEQ ID NO: 53694 - protein, 269 aa, Streptococcus pneumoniae; identical to SEQ ID NO: 53228

SEQ ID NO: 53695 - protein, 533 aa, Streptococcus pneumoniae; identical to SEQ ID NO: 53235

SEQ ID NO: 53696 - protein, 269 aa, Streptococcus pneumoniae; identical to SEQ ID NO: 53246

SEQ ID NO: 53697 - protein, 1027 aa, Streptococcus pneumoniae; identical to SEQ ID NO: 53261

SEQ ID NO: 53698 - protein, 269 aa, Streptococcus pneumoniae; identical to SEQ ID NO: 53228

SEQ ID NO: 53699 - protein, 533 aa, Streptococcus pneumoniae; identical to SEQ ID NO: 53235

SEQ ID NO: 53700 - protein, 269 aa, Streptococcus pneumoniae; identical to SEQ ID NO: 53228

SEQ ID NO: 53701 - protein, 990 aa, Streptococcus pneumoniae; identical to SEQ ID NO: 53229

SEQ ID NO: 53702 - protein, 269 aa, Streptococcus pneumoniae; identical to SEQ ID NO: 53216

SEQ ID NO: 53703 - protein, 1027 aa, Streptococcus pneumoniae; identical to SEQ ID NO: 53217

SEQ ID NO: 53704 - protein, 266 aa, Streptococcus pneumoniae; identical to SEQ ID NO: 53222

SEQ ID NO: 53705 - protein, 815 aa, Streptococcus pneumoniae; identical to SEQ ID NO: 53251

SEQ ID NO: 53706 - protein, 269 aa, Streptococcus pneumoniae; identical to SEQ ID NO: 53228

SEQ ID NO: 53707 - protein, 990 aa, Streptococcus pneumoniae; identical to SEQ ID NO: 53229

SEQ ID NO: 53708 - protein, 269 aa, Streptococcus pneumoniae; identical to SEQ ID NO: 53216

SEQ ID NO: 53709 - protein, 1027 aa, Streptococcus pneumoniae; identical to SEQ ID NO: 53217

SEQ ID NO: 53710 - protein, 269 aa, Streptococcus pneumoniae; identical to SEQ ID NO: 53216

SEQ ID NO: 53711 - protein, 1027 aa, Streptococcus pneumoniae; identical to SEQ ID NO: 53217

SEQ ID NO: 53712 - protein, 269 aa, Streptococcus pneumoniae; identical to SEQ ID NO: 53246

SEQ ID NO: 53713 - protein, 1027 aa, Streptococcus pneumoniae; identical to SEQ ID NO: 53261

SEQ ID NO: 53714 - protein, 269 aa, Streptococcus pneumoniae; identical to SEQ ID NO: 53246

SEQ ID NO: 53715 - protein, 1027 aa, Streptococcus pneumoniae; identical to SEQ ID NO: 53261

SEQ ID NO: 53716 - protein, 269 aa, Streptococcus pneumoniae; identical to SEQ ID NO: 53228

SEQ ID NO: 53717 - protein, 990 aa, Streptococcus pneumoniae; identical to SEQ ID NO: 53229

SEQ ID NO: 53718 - protein, 266 aa, Streptococcus pneumoniae; identical to SEQ ID NO: 53222

SEQ ID NO: 53719 - protein, 835 aa, Streptococcus pneumoniae; identical to SEQ ID NO: 53245

SEQ ID NO: 53720 - protein, 269 aa, Streptococcus pneumoniae; identical to SEQ ID NO: 53228

SEQ ID NO: 53721 - protein, 533 aa, Streptococcus pneumoniae; identical to SEQ ID NO: 53235

SEQ ID NO: 53722 - protein, 269 aa, Streptococcus pneumoniae; identical to SEQ ID NO: 53228

SEQ ID NO: 53723 - protein, 533 aa, Streptococcus pneumoniae
MIEFGKKSLYFSKLVRSKAKMIEFEIPLESHIPISEDAQKSFLGALAIAADTARKYFEDYINHKSFDSQLKNQLHNVAEYFDALLVSGLGNSAEYQDYIAILGTTAYYLGDYNGSSRVMVNYISDDMQLLEESITLVKVFINVITDKLFLNHTPIEGKYSSELNTLVESYRNYILSKTEFSIDIYRDLQDKVYRNGSDFSVIIVNCLLAVVCKKIDSSSTKLLPEFSGLDFSLWQDYIQSTGSIKELWPSQIELGKQAIFSGKSGIVQMPTSSGKTASINLTLRSAFYSNRIDNALIVAPFRALCREIYRDINAHFVDENNVIVSEVFDLPEIPQDFSIFNDGKKRVFILTPGKLLFLLRNHQSFIDEIGLCIFDEAHLFDDPSRGTNFESLLSTVKQIFPKGIQKILISAVIPNSEAINRWFNEDGVIVSNNSIKTTEKRVAFSDLNGSNEQLYFIDPITFEEEFFVPRTVSVSELEQLGKERKQKVFPELTNENDISIYYGIKLINNGGVGIFCGRKDTVNVILRRFIDLT

SEQ ID NO: 53724 - protein, 269 aa, Streptococcus pneumoniae; identical to SEQ ID NO: 53216

SEQ ID NO: 53725 - protein, 1027 aa, Streptococcus pneumoniae; identical to SEQ ID NO: 53217

SEQ ID NO: 53726 - protein, 269 aa, Streptococcus pneumoniae; identical to SEQ ID NO: 53228

SEQ ID NO: 53727 - protein, 533 aa, Streptococcus pneumoniae; identical to SEQ ID NO: 53235

SEQ ID NO: 53728 - protein, 269 aa, Streptococcus pneumoniae; identical to SEQ ID NO: 53216

SEQ ID NO: 53729 - protein, 1027 aa, Streptococcus pneumoniae; identical to SEQ ID NO: 53217

SEQ ID NO: 53730 - protein, 269 aa, Streptococcus pneumoniae; identical to SEQ ID NO: 53228

SEQ ID NO: 53731 - protein, 990 aa, Streptococcus pneumoniae; identical to SEQ ID NO: 53229

SEQ ID NO: 53732 - protein, 266 aa, Streptococcus pneumoniae; identical to SEQ ID NO: 53222

SEQ ID NO: 53733 - protein, 835 aa, Streptococcus pneumoniae; identical to SEQ ID NO: 53245

SEQ ID NO: 53734 - protein, 269 aa, Streptococcus pneumoniae; identical to SEQ ID NO: 53216

SEQ ID NO: 53735 - protein, 1027 aa, Streptococcus pneumoniae; identical to SEQ ID NO: 53217

SEQ ID NO: 53736 - protein, 269 aa, Streptococcus pneumoniae; identical to SEQ ID NO: 53246

SEQ ID NO: 53737 - protein, 1027 aa, Streptococcus pneumoniae; identical to SEQ ID NO: 53247

SEQ ID NO: 53738 - protein, 269 aa, Streptococcus pneumoniae; identical to SEQ ID NO: 53216

SEQ ID NO: 53739 - protein, 1027 aa, Streptococcus pneumoniae; identical to SEQ ID NO: 53217

SEQ ID NO: 53740 - protein, 269 aa, Streptococcus pneumoniae; identical to SEQ ID NO: 53246

SEQ ID NO: 53741 - protein, 1027 aa, Streptococcus pneumoniae; identical to SEQ ID NO: 53261

SEQ ID NO: 53742 - protein, 269 aa, Streptococcus pneumoniae; identical to SEQ ID NO: 53228

SEQ ID NO: 53743 - protein, 990 aa, Streptococcus pneumoniae; identical to SEQ ID NO: 53229

SEQ ID NO: 53744 - protein, 269 aa, Streptococcus pneumoniae; identical to SEQ ID NO: 53246

SEQ ID NO: 53745 - protein, 1027 aa, Streptococcus pneumoniae; identical to SEQ ID NO: 53247

SEQ ID NO: 53746 - protein, 269 aa, Streptococcus pneumoniae; identical to SEQ ID NO: 53532

SEQ ID NO: 53747 - protein, 1027 aa, Streptococcus pneumoniae; identical to SEQ ID NO: 53217

SEQ ID NO: 53748 - protein, 269 aa, Streptococcus pneumoniae; identical to SEQ ID NO: 53216

SEQ ID NO: 53749 - protein, 1027 aa, Streptococcus pneumoniae; identical to SEQ ID NO: 53217

SEQ ID NO: 53750 - protein, 269 aa, Streptococcus pneumoniae; identical to SEQ ID NO: 53246

SEQ ID NO: 53751 - protein, 1027 aa, Streptococcus pneumoniae; identical to SEQ ID NO: 53247

SEQ ID NO: 53752 - protein, 269 aa, Streptococcus pneumoniae; identical to SEQ ID NO: 53228

SEQ ID NO: 53753 - protein, 533 aa, Streptococcus pneumoniae; identical to SEQ ID NO: 53235

SEQ ID NO: 53754 - protein, 269 aa, Streptococcus pneumoniae; identical to SEQ ID NO: 53246

SEQ ID NO: 53755 - protein, 1027 aa, Streptococcus pneumoniae; identical to SEQ ID NO: 53247

SEQ ID NO: 53756 - protein, 269 aa, Streptococcus pneumoniae; identical to SEQ ID NO: 53228

SEQ ID NO: 53757 - protein, 967 aa, Streptococcus pneumoniae
MIEFGKKSLYFSKLVRSKAKMIEFEIPLESHIPISEDAQKSFLGALAIAADTARKYFEDYINHKSFDSQLKNQLHNVAEYFDALLVSGLGNSAEYQDYIAILGTTAYYLGDYNGSSRVMVNYISDDMQLLEESITLVKVFINVITDKLFLNHTPIEGKYSSELNTLVESYRNYILSKTEFSIDIYRDLQDKVYRNGSDFSVIIVNCLLAVVCKKIDSSSTKLLPEFSGLDFSLWQDYIQSTGSIKELWPSQIELGKQAIFSGKSGIVQMPTSSGKTASINLTLRSAFYSNRIDNALIVAPFRALCREIYRDINAHFVDENNVIVSEVFDLPEIPQDFSIFNDGKKRVFILTPGKLLFLLRNHQSFIDEIGLCIFDEAHLFDDPSRGTNFELLLSTVKQIFPKGIQKILISAVIPNSEAINRWFNEDGVIVSNNSIKTTEKRVAFSDLNGSNEQLYFIDPITFEEEFFVPRTVSVSELEQLGKERKQKVFPELTNENDISIYYGINLINNGGVGIFCGRKDTVNVILRRFIDLNNRNYDLTDFLKNSDRSEVEKIGNLIGQNLGYDSVEYTCSQLGVFSHHSGIPMGIRIAIEYAFSKSKINNVVCTSTLAQGINLPIKYLIISSVYQAGDAIKVRDFQNLIGRAGRAGKYTEGTIILTEPNIYKSPKNKWKKQNYKALLNPINTEGCQSNILSIIQFKSVVPTDYRFAPIKFDFWNLIKERFDSSVDYRTKINNILSKLKRKNSLYFKDFNSKIDQIDNTLIAIENYIASMYATELETDSLAENTFGYFLGNNEEEKEKIKELFILIKSKIITSSVETEIIAKNSIGLYQSELLKEWVQENKTSIISCEKEEELLGVLTKKIIDFSNNKEMRKLSIENLNYISQLWIKGISYFQILESCTEKSISIEKRGKSKPIDMSDIISICDNGLGYETSMVLNAINNILEKLVGEELDVLTMLIKRLKYGLPL

SEQ ID NO: 53758 - protein, 269 aa, Streptococcus pneumoniae; identical to SEQ ID NO: 53246

SEQ ID NO: 53759 - protein, 1027 aa, Streptococcus pneumoniae; identical to SEQ ID NO: 53261

SEQ ID NO: 53760 - protein, 269 aa, Streptococcus pneumoniae; identical to SEQ ID NO: 53246

SEQ ID NO: 53761 - protein, 1027 aa, Streptococcus pneumoniae; identical to SEQ ID NO: 53261

SEQ ID NO: 53762 - protein, 269 aa, Streptococcus pneumoniae; identical to SEQ ID NO: 53228

SEQ ID NO: 53763 - protein, 533 aa, Streptococcus pneumoniae; identical to SEQ ID NO: 53235

SEQ ID NO: 53764 - protein, 269 aa, Streptococcus pneumoniae; identical to SEQ ID NO: 53228

SEQ ID NO: 53765 - protein, 366 aa, Streptococcus pneumoniae; identical to SEQ ID NO: 53591

SEQ ID NO: 53766 - protein, 269 aa, Streptococcus pneumoniae; identical to SEQ ID NO: 53228

SEQ ID NO: 53767 - protein, 533 aa, Streptococcus pneumoniae; identical to SEQ ID NO: 53235

SEQ ID NO: 53768 - protein, 266 aa, Streptococcus pneumoniae; identical to SEQ ID NO: 53222

SEQ ID NO: 53769 - protein, 815 aa, Streptococcus pneumoniae; identical to SEQ ID NO: 53251

SEQ ID NO: 53770 - protein, 269 aa, Streptococcus pneumoniae; identical to SEQ ID NO: 53246

SEQ ID NO: 53771 - protein, 1027 aa, Streptococcus pneumoniae; identical to SEQ ID NO: 53283

SEQ ID NO: 53772 - protein, 269 aa, Streptococcus pneumoniae; identical to SEQ ID NO: 53228

SEQ ID NO: 53773 - protein, 533 aa, Streptococcus pneumoniae; identical to SEQ ID NO: 53235

SEQ ID NO: 53774 - protein, 269 aa, Streptococcus pneumoniae; identical to SEQ ID NO: 53246

SEQ ID NO: 53775 - protein, 1027 aa, Streptococcus pneumoniae; identical to SEQ ID NO: 53261

SEQ ID NO: 53776 - protein, 269 aa, Streptococcus pneumoniae; identical to SEQ ID NO: 53246

SEQ ID NO: 53777 - protein, 1027 aa, Streptococcus pneumoniae; identical to SEQ ID NO: 53247

SEQ ID NO: 53778 - protein, 269 aa, Streptococcus pneumoniae; identical to SEQ ID NO: 53246

SEQ ID NO: 53779 - protein, 1027 aa, Streptococcus pneumoniae; identical to SEQ ID NO: 53261

SEQ ID NO: 53780 - protein, 269 aa, Streptococcus pneumoniae; identical to SEQ ID NO: 53246

SEQ ID NO: 53781 - protein, 1027 aa, Streptococcus pneumoniae; identical to SEQ ID NO: 53247

SEQ ID NO: 53782 - protein, 269 aa, Streptococcus pneumoniae; identical to SEQ ID NO: 53246

SEQ ID NO: 53783 - protein, 1027 aa, Streptococcus pneumoniae; identical to SEQ ID NO: 53247

SEQ ID NO: 53784 - protein, 269 aa, Streptococcus pneumoniae; identical to SEQ ID NO: 53246

SEQ ID NO: 53785 - protein, 1027 aa, Streptococcus pneumoniae; identical to SEQ ID NO: 53247

SEQ ID NO: 53786 - protein, 269 aa, Streptococcus pneumoniae; identical to SEQ ID NO: 53228

SEQ ID NO: 53787 - protein, 533 aa, Streptococcus pneumoniae; identical to SEQ ID NO: 53235

SEQ ID NO: 53788 - protein, 269 aa, Streptococcus pneumoniae; identical to SEQ ID NO: 53246

SEQ ID NO: 53789 - protein, 1027 aa, Streptococcus pneumoniae; identical to SEQ ID NO: 53261

SEQ ID NO: 53790 - protein, 269 aa, Streptococcus pneumoniae; identical to SEQ ID NO: 53246

SEQ ID NO: 53791 - protein, 513 aa, Streptococcus pneumoniae
MIEFGKKSLYFSKLVRSKAKMIEFEIPLESHIPISEDAQKSFLVALAIAADTARKYFEDYINHKSFDSQLKNQLHNVAEYFDALLVSGLGNSAEYQDYIAILGTTAYYLGDYNGSSRVMVNYISDDMQLLEESITLVKVFIDVITDKLFLNHTPIEGKYSSELNTLVESYRNYILSKTEFSIDIYRGLQDKVYRNGSDFSVIIVNCLLAVVCKKIDSSSTKLLPEFSGLDFSLWQDYIQSTGSIKELWPSQIELGKQAIFSGKSGSVQMPTSSGKTASINLTLRSAFYSNRIDNALIVAPFRALCREIYRDINAHFVDENNVIVSEVFDLPEIPQDFSIFNDGKKRVFILTPEKLLFLLRNHQSFIDEIGLCIFDEAHLFDDPSRGTNFELLLSTVKQIFPKGIQKILISAVIPNSEAINRWFNEDGVIVSNNSIKTTEKRVAFSDLNGSNEQLYFIDPITFEEEFFVPRTVSVSELEQLGKERKQKVLIIVTNCRQQAYKGFIRIILFQERG

SEQ ID NO: 53792 - protein, 269 aa, Streptococcus pneumoniae
MEKMHSYIKYLIHEDPIITDEGKQVEILHLDIQDDPEIFEDWANQFRKNYCSDDELAEMIGFMNISPKEYLKNFKLPSDSGIGLSTMSGDFGEILVSDYLQNIEEYVVPRTRYDSRVNKDTSTQGSDVLGYKQDSSNVSNDEVVVIEVKSSASDSSSSQAKNKLQEAINHSDKDFERFSTSIVASYLRLKKSNSDQENVVERFLNITDKPFNVIYGAVAVYSNQSYDIDVIKTVVSKKHRDFQKLRLLVIHSDELMKFIRELYSKASEV

SEQ ID NO: 53793 - protein, 990 aa, Streptococcus pneumoniae; identical to SEQ ID NO: 53229

SEQ ID NO: 53794 - protein, 269 aa, Streptococcus pneumoniae; identical to SEQ ID NO: 53246

SEQ ID NO: 53795 - protein, 1027 aa, Streptococcus pneumoniae; identical to SEQ ID NO: 53247

SEQ ID NO: 53796 - protein, 266 aa, Streptococcus pneumoniae; identical to SEQ ID NO: 53222

SEQ ID NO: 53797 - protein, 815 aa, Streptococcus pneumoniae; identical to SEQ ID NO: 53251

SEQ ID NO: 53798 - protein, 269 aa, Streptococcus pneumoniae; identical to SEQ ID NO: 53228

SEQ ID NO: 53799 - protein, 533 aa, Streptococcus pneumoniae; identical to SEQ ID NO: 53235

SEQ ID NO: 53800 - protein, 269 aa, Streptococcus pneumoniae; identical to SEQ ID NO: 53228

SEQ ID NO: 53801 - protein, 533 aa, Streptococcus pneumoniae; identical to SEQ ID NO: 53235

SEQ ID NO: 53802 - protein, 269 aa, Streptococcus pneumoniae; identical to SEQ ID NO: 53228

SEQ ID NO: 53803 - protein, 990 aa, Streptococcus pneumoniae; identical to SEQ ID NO: 53229

SEQ ID NO: 53804 - protein, 269 aa, Streptococcus pneumoniae; identical to SEQ ID NO: 53216

SEQ ID NO: 53805 - protein, 1027 aa, Streptococcus pneumoniae; identical to SEQ ID NO: 53217

SEQ ID NO: 53806 - protein, 269 aa, Streptococcus pneumoniae; identical to SEQ ID NO: 53216

SEQ ID NO: 53807 - protein, 1027 aa, Streptococcus pneumoniae; identical to SEQ ID NO: 53217

SEQ ID NO: 53808 - protein, 269 aa, Streptococcus pneumoniae; identical to SEQ ID NO: 53216

SEQ ID NO: 53809 - protein, 1027 aa, Streptococcus pneumoniae; identical to SEQ ID NO: 53217

SEQ ID NO: 53810 - protein, 269 aa, Streptococcus pneumoniae; identical to SEQ ID NO: 53216

SEQ ID NO: 53811 - protein, 1027 aa, Streptococcus pneumoniae; identical to SEQ ID NO: 53217

SEQ ID NO: 53812 - protein, 269 aa, Streptococcus pneumoniae; identical to SEQ ID NO: 53216

SEQ ID NO: 53813 - protein, 1027 aa, Streptococcus pneumoniae; identical to SEQ ID NO: 53217

SEQ ID NO: 53814 - protein, 266 aa, Streptococcus pneumoniae; identical to SEQ ID NO: 53222

SEQ ID NO: 53815 - protein, 835 aa, Streptococcus pneumoniae; identical to SEQ ID NO: 53245

SEQ ID NO: 53816 - protein, 269 aa, Streptococcus pneumoniae; identical to SEQ ID NO: 53228

SEQ ID NO: 53817 - protein, 533 aa, Streptococcus pneumoniae; identical to SEQ ID NO: 53235

SEQ ID NO: 53818 - protein, 269 aa, Streptococcus pneumoniae; identical to SEQ ID NO: 53216

SEQ ID NO: 53819 - protein, 1027 aa, Streptococcus pneumoniae; identical to SEQ ID NO: 53217

SEQ ID NO: 53820 - protein, 269 aa, Streptococcus pneumoniae; identical to SEQ ID NO: 53216

SEQ ID NO: 53821 - protein, 1027 aa, Streptococcus pneumoniae; identical to SEQ ID NO: 53217

SEQ ID NO: 53822 - protein, 269 aa, Streptococcus pneumoniae; identical to SEQ ID NO: 53228

SEQ ID NO: 53823 - protein, 990 aa, Streptococcus pneumoniae; identical to SEQ ID NO: 53229

SEQ ID NO: 53824 - protein, 269 aa, Streptococcus pneumoniae; identical to SEQ ID NO: 53228

SEQ ID NO: 53825 - protein, 533 aa, Streptococcus pneumoniae; identical to SEQ ID NO: 53235

SEQ ID NO: 53826 - protein, 269 aa, Streptococcus pneumoniae; identical to SEQ ID NO: 53228

SEQ ID NO: 53827 - protein, 533 aa, Streptococcus pneumoniae; identical to SEQ ID NO: 53235

SEQ ID NO: 53828 - protein, 269 aa, Streptococcus pneumoniae; identical to SEQ ID NO: 53228

SEQ ID NO: 53829 - protein, 990 aa, Streptococcus pneumoniae; identical to SEQ ID NO: 53229

SEQ ID NO: 53830 - protein, 269 aa, Streptococcus pneumoniae; identical to SEQ ID NO: 53398

SEQ ID NO: 53831 - protein, 990 aa, Streptococcus pneumoniae; identical to SEQ ID NO: 53399

SEQ ID NO: 53832 - protein, 269 aa, Streptococcus pneumoniae; identical to SEQ ID NO: 53228

SEQ ID NO: 53833 - protein, 533 aa, Streptococcus pneumoniae; identical to SEQ ID NO: 53235

SEQ ID NO: 53834 - protein, 269 aa, Streptococcus pneumoniae; identical to SEQ ID NO: 53228

SEQ ID NO: 53835 - protein, 533 aa, Streptococcus pneumoniae; identical to SEQ ID NO: 53235

SEQ ID NO: 53836 - protein, 269 aa, Streptococcus pneumoniae; identical to SEQ ID NO: 53228

SEQ ID NO: 53837 - protein, 533 aa, Streptococcus pneumoniae; identical to SEQ ID NO: 53235

SEQ ID NO: 53838 - protein, 269 aa, Streptococcus pneumoniae; identical to SEQ ID NO: 53228

SEQ ID NO: 53839 - protein, 533 aa, Streptococcus pneumoniae; identical to SEQ ID NO: 53235

SEQ ID NO: 53840 - protein, 269 aa, Streptococcus pneumoniae; identical to SEQ ID NO: 53228

SEQ ID NO: 53841 - protein, 990 aa, Streptococcus pneumoniae; identical to SEQ ID NO: 53229

SEQ ID NO: 53842 - protein, 269 aa, Streptococcus pneumoniae; identical to SEQ ID NO: 53228

SEQ ID NO: 53843 - protein, 533 aa, Streptococcus pneumoniae; identical to SEQ ID NO: 53235

SEQ ID NO: 53844 - protein, 269 aa, Streptococcus pneumoniae; identical to SEQ ID NO: 53246

SEQ ID NO: 53845 - protein, 1027 aa, Streptococcus pneumoniae; identical to SEQ ID NO: 53247

SEQ ID NO: 53846 - protein, 269 aa, Streptococcus pneumoniae; identical to SEQ ID NO: 53228

SEQ ID NO: 53847 - protein, 274 aa, Streptococcus pneumoniae
MIEFGKKSLYFSKLVRSKAKMIEFEIPLESHIPISEDAQKSFLGALAIAADTARKYFEDYINHKSFDSQLKNQLHNVAEYFDALLVSGLGNSAEYQDYIAILGTTAYYLGDYNGSSRVMVNYISDDMQLLEESITLVKVFINVITDKLFLNHTPIEGKYSSELNTLVESYRNYILSKTEFSIDIYRDLQDKVYRNGSDFSVIIVNCLLAVVCKKIDSSSTKLLPEFSGLDFSLWQDYIQSTGSIKELWPSQIELGKQAIFSGKSGIVQMPILFE

SEQ ID NO: 53848 - protein, 269 aa, Streptococcus pneumoniae; identical to SEQ ID NO: 53246

SEQ ID NO: 53849 - protein, 1027 aa, Streptococcus pneumoniae; identical to SEQ ID NO: 53261

SEQ ID NO: 53850 - protein, 269 aa, Streptococcus pneumoniae; identical to SEQ ID NO: 53398

SEQ ID NO: 53851 - protein, 990 aa, Streptococcus pneumoniae
MIEFGKKSLYFSKLVRSKAKMIEFEIPLESHIPISEDAQKSFLGALAIAADTARKYFEDYINHKSFDSQLKNQLHNVAEYFDALLVSGLGNSAEYQDYIAILGTTAYYLGDYNGSSRVMVNYISDDMQLLEESITLVKVFINVITDKLFLNHTPIEGKYSSELNTLVESYRNYILSKTEFSIDIYRDLQDKVYRNGSDFSVIIVNCLLAVVCKKIDSSSTKLLPEFSGLDFSLWQDYIQSTGSIKELWPSQIELGKQAIFSGKSGIVQMPTSSGKTASINLTLRSAFYSNRIDNALIVAPFRALCREIYRDINAHFVDENNVIVSEVFDLPEIPQDFSIFNDGKKRVFILTPGKLLFLLRNHQSFIDEIGLCIFDEAHLFDDPSRGTNFELLLSTVKQIFPKGIQKILISAVIPNSEAINRWFNEDGVIVSNNSIKTTEKRVAFSDLNGSNEQLYFIDPITFEEEFFVPRTVSVSELEQLGKERKQKVFPELTNENDISIYYGIKLINNGGVGIFCGRKDTVNVILRRFIDLNNRNYDLTDFLKNSDRSEVEKIGNLIGQNLGYDSVEYTCSQLGVFSHHSGIPMGIRIAIEYAFSKSKINNVVCTSTLAQGINLPLKYLIISSVYQAGDAIKVRDFQNLIGRAGRAGKYTEGTIILTEPNIYKSPKNKWKKQNYKALLNPINTEGCQSNILSIIQFKSVVPTDYRFAPIKFDFWNLIKERFDSSVDYRTKINNILSKLKRKNSLYFKDFNSKIDQIDNTLIAIENYIASMYATELETDSLAENTFGYFLGNNEEEKEKIKELFILIKSKIITSSVETEIIAKNSIGLYQSELLKEWVQENKTSIISCEKEEELLGVLTKKIIDFSNNKEMRKLSIENLNYISQLWIKGISYFQILESCTEKSISIEKRGKSKPIDMSDIISICDNGLGYETSMVLNAINNILEKLVGEELDVLTMLIKRLKYGLPLEKEINIYELGFSDRIVVQVIIHR

SEQ ID NO: 53852 - protein, 269 aa, Streptococcus pneumoniae; identical to SEQ ID NO: 53246

SEQ ID NO: 53853 - protein, 1027 aa, Streptococcus pneumoniae; identical to SEQ ID NO: 53247

SEQ ID NO: 53854 - protein, 269 aa, Streptococcus pneumoniae; identical to SEQ ID NO: 53228

SEQ ID NO: 53855 - protein, 533 aa, Streptococcus pneumoniae; identical to SEQ ID NO: 53235

SEQ ID NO: 53856 - protein, 269 aa, Streptococcus pneumoniae; identical to SEQ ID NO: 53228

SEQ ID NO: 53857 - protein, 533 aa, Streptococcus pneumoniae; identical to SEQ ID NO: 53235

SEQ ID NO: 53858 - protein, 269 aa, Streptococcus pneumoniae; identical to SEQ ID NO: 53228

SEQ ID NO: 53859 - protein, 533 aa, Streptococcus pneumoniae; identical to SEQ ID NO: 53235

SEQ ID NO: 53860 - protein, 269 aa, Streptococcus pneumoniae; identical to SEQ ID NO: 53246

SEQ ID NO: 53861 - protein, 1027 aa, Streptococcus pneumoniae; identical to SEQ ID NO: 53247

SEQ ID NO: 53862 - protein, 269 aa, Streptococcus pneumoniae; identical to SEQ ID NO: 53246

SEQ ID NO: 53863 - protein, 1027 aa, Streptococcus pneumoniae; identical to SEQ ID NO: 53283

SEQ ID NO: 53864 - protein, 269 aa, Streptococcus pneumoniae; identical to SEQ ID NO: 53246

SEQ ID NO: 53865 - protein, 1027 aa, Streptococcus pneumoniae; identical to SEQ ID NO: 53247

SEQ ID NO: 53866 - protein, 269 aa, Streptococcus pneumoniae; identical to SEQ ID NO: 53246

SEQ ID NO: 53867 - protein, 1027 aa, Streptococcus pneumoniae; identical to SEQ ID NO: 53261

SEQ ID NO: 53868 - protein, 269 aa, Streptococcus pneumoniae; identical to SEQ ID NO: 53398

SEQ ID NO: 53869 - protein, 990 aa, Streptococcus pneumoniae; identical to SEQ ID NO: 53851

SEQ ID NO: 53870 - protein, 269 aa, Streptococcus pneumoniae; identical to SEQ ID NO: 53246

SEQ ID NO: 53871 - protein, 1027 aa, Streptococcus pneumoniae; identical to SEQ ID NO: 53247

SEQ ID NO: 53872 - protein, 269 aa, Streptococcus pneumoniae; identical to SEQ ID NO: 53246

SEQ ID NO: 53873 - protein, 1027 aa, Streptococcus pneumoniae; identical to SEQ ID NO: 53247

SEQ ID NO: 53874 - protein, 142 aa, Streptococcus pneumoniae
  MOD_RES (3)..(3): Any amino acid
MKXYKQDSSNVSNDEVVVIEVKSSASDSSSSQAKNKLQEAINHSDKDFERFSTSIVASYLRLKKSNSDQENVVERFLNITDKPFNVIYGAVAVYSNQSYDIDVIKTVVSKKHRDFQKLRLLVIHSDELMKFIRELYSKASEV

SEQ ID NO: 53875 - protein, 366 aa, Streptococcus pneumoniae; identical to SEQ ID NO: 53591

SEQ ID NO: 53876 - protein, 269 aa, Streptococcus pneumoniae; identical to SEQ ID NO: 53246

SEQ ID NO: 53877 - protein, 1027 aa, Streptococcus pneumoniae; identical to SEQ ID NO: 53261

SEQ ID NO: 53878 - protein, 269 aa, Streptococcus pneumoniae; identical to SEQ ID NO: 53246

SEQ ID NO: 53879 - protein, 1027 aa, Streptococcus pneumoniae; identical to SEQ ID NO: 53247

SEQ ID NO: 53880 - protein, 269 aa, Streptococcus pneumoniae; identical to SEQ ID NO: 53246

SEQ ID NO: 53881 - protein, 1027 aa, Streptococcus pneumoniae; identical to SEQ ID NO: 53247

SEQ ID NO: 53882 - protein, 269 aa, Streptococcus pneumoniae; identical to SEQ ID NO: 53246

SEQ ID NO: 53883 - protein, 1027 aa, Streptococcus pneumoniae; identical to SEQ ID NO: 53261

SEQ ID NO: 53884 - protein, 266 aa, Streptococcus pneumoniae; identical to SEQ ID NO: 53222

SEQ ID NO: 53885 - protein, 815 aa, Streptococcus pneumoniae; identical to SEQ ID NO: 53251

SEQ ID NO: 53886 - protein, 269 aa, Streptococcus pneumoniae; identical to SEQ ID NO: 53246

SEQ ID NO: 53887 - protein, 1027 aa, Streptococcus pneumoniae; identical to SEQ ID NO: 53247

SEQ ID NO: 53888 - protein, 266 aa, Streptococcus pneumoniae; identical to SEQ ID NO: 53222

SEQ ID NO: 53889 - protein, 268 aa, Streptococcus pneumoniae; identical to SEQ ID NO: 53531

SEQ ID NO: 53890 - protein, 269 aa, Streptococcus pneumoniae; identical to SEQ ID NO: 53246

SEQ ID NO: 53891 - protein, 1027 aa, Streptococcus pneumoniae; identical to SEQ ID NO: 53247

SEQ ID NO: 53892 - protein, 269 aa, Streptococcus pneumoniae; identical to SEQ ID NO: 53246

SEQ ID NO: 53893 - protein, 1027 aa, Streptococcus pneumoniae; identical to SEQ ID NO: 53247

SEQ ID NO: 53894 - protein, 269 aa, Streptococcus pneumoniae; identical to SEQ ID NO: 53228

SEQ ID NO: 53895 - protein, 533 aa, Streptococcus pneumoniae; identical to SEQ ID NO: 53235

SEQ ID NO: 53896 - protein, 269 aa, Streptococcus pneumoniae; identical to SEQ ID NO: 53228

SEQ ID NO: 53897 - protein, 533 aa, Streptococcus pneumoniae; identical to SEQ ID NO: 53235

SEQ ID NO: 53898 - protein, 269 aa, Streptococcus pneumoniae; identical to SEQ ID NO: 53246

SEQ ID NO: 53899 - protein, 1027 aa, Streptococcus pneumoniae; identical to SEQ ID NO: 53261

SEQ ID NO: 53900 - protein, 269 aa, Streptococcus pneumoniae; identical to SEQ ID NO: 53246

SEQ ID NO: 53901 - protein, 1027 aa, Streptococcus pneumoniae; identical to SEQ ID NO: 53247

SEQ ID NO: 53902 - protein, 269 aa, Streptococcus pneumoniae; identical to SEQ ID NO: 53228

SEQ ID NO: 53903 - protein, 533 aa, Streptococcus pneumoniae; identical to SEQ ID NO: 53235

SEQ ID NO: 53904 - protein, 269 aa, Streptococcus pneumoniae; identical to SEQ ID NO: 53216

SEQ ID NO: 53905 - protein, 1027 aa, Streptococcus pneumoniae; identical to SEQ ID NO: 53217

SEQ ID NO: 53906 - protein, 269 aa, Streptococcus pneumoniae; identical to SEQ ID NO: 53216

SEQ ID NO: 53907 - protein, 1027 aa, Streptococcus pneumoniae; identical to SEQ ID NO: 53217

SEQ ID NO: 53908 - protein, 269 aa, Streptococcus pneumoniae; identical to SEQ ID NO: 53216

SEQ ID NO: 53909 - protein, 1007 aa, Streptococcus pneumoniae; identical to SEQ ID NO: 53223

SEQ ID NO: 53910 - protein, 269 aa, Streptococcus pneumoniae; identical to SEQ ID NO: 53216

SEQ ID NO: 53911 - protein, 1007 aa, Streptococcus pneumoniae; identical to SEQ ID NO: 53223

SEQ ID NO: 53912 - protein, 269 aa, Streptococcus pneumoniae; identical to SEQ ID NO: 53216

SEQ ID NO: 53913 - protein, 1027 aa, Streptococcus pneumoniae; identical to SEQ ID NO: 53217

SEQ ID NO: 53914 - protein, 269 aa, Streptococcus pneumoniae; identical to SEQ ID NO: 53216

SEQ ID NO: 53915 - protein, 1007 aa, Streptococcus pneumoniae; identical to SEQ ID NO: 53223

SEQ ID NO: 53916 - protein, 269 aa, Streptococcus pneumoniae; identical to SEQ ID NO: 53216

SEQ ID NO: 53917 - protein, 1007 aa, Streptococcus pneumoniae; identical to SEQ ID NO: 53223

SEQ ID NO: 53918 - protein, 269 aa, Streptococcus pneumoniae; identical to SEQ ID NO: 53216

SEQ ID NO: 53919 - protein, 1007 aa, Streptococcus pneumoniae; identical to SEQ ID NO: 53223

SEQ ID NO: 53920 - protein, 269 aa, Streptococcus pneumoniae; identical to SEQ ID NO: 53216

SEQ ID NO: 53921 - protein, 1007 aa, Streptococcus pneumoniae; identical to SEQ ID NO: 53223

SEQ ID NO: 53922 - protein, 269 aa, Streptococcus pneumoniae; identical to SEQ ID NO: 53216

SEQ ID NO: 53923 - protein, 1027 aa, Streptococcus pneumoniae; identical to SEQ ID NO: 53217

SEQ ID NO: 53924 - protein, 269 aa, Streptococcus pneumoniae; identical to SEQ ID NO: 53216

SEQ ID NO: 53925 - protein, 1007 aa, Streptococcus pneumoniae; identical to SEQ ID NO: 53223

SEQ ID NO: 53926 - protein, 269 aa, Streptococcus pneumoniae; identical to SEQ ID NO: 53216

SEQ ID NO: 53927 - protein, 1007 aa, Streptococcus pneumoniae; identical to SEQ ID NO: 53223

SEQ ID NO: 53928 - protein, 269 aa, Streptococcus pneumoniae; identical to SEQ ID NO: 53216

SEQ ID NO: 53929 - protein, 1007 aa, Streptococcus pneumoniae; identical to SEQ ID NO: 53223

SEQ ID NO: 53930 - protein, 266 aa, Streptococcus pneumoniae; identical to SEQ ID NO: 53222

SEQ ID NO: 53931 - protein, 815 aa, Streptococcus pneumoniae; identical to SEQ ID NO: 53251

SEQ ID NO: 53932 - protein, 269 aa, Streptococcus pneumoniae; identical to SEQ ID NO: 53216

SEQ ID NO: 53933 - protein, 1007 aa, Streptococcus pneumoniae; identical to SEQ ID NO: 53223

SEQ ID NO: 53934 - protein, 266 aa, Streptococcus pneumoniae; identical to SEQ ID NO: 53222

SEQ ID NO: 53935 - protein, 815 aa, Streptococcus pneumoniae; identical to SEQ ID NO: 53251

SEQ ID NO: 53936 - protein, 269 aa, Streptococcus pneumoniae; identical to SEQ ID NO: 53216

SEQ ID NO: 53937 - protein, 1007 aa, Streptococcus pneumoniae; identical to SEQ ID NO: 53223

SEQ ID NO: 53938 - protein, 269 aa, Streptococcus pneumoniae; identical to SEQ ID NO: 53216

SEQ ID NO: 53939 - protein, 1007 aa, Streptococcus pneumoniae; identical to SEQ ID NO: 53223

SEQ ID NO: 53940 - protein, 269 aa, Streptococcus pneumoniae; identical to SEQ ID NO: 53216

SEQ ID NO: 53941 - protein, 1007 aa, Streptococcus pneumoniae; identical to SEQ ID NO: 53223

SEQ ID NO: 53942 - protein, 269 aa, Streptococcus pneumoniae; identical to SEQ ID NO: 53216

SEQ ID NO: 53943 - protein, 1027 aa, Streptococcus pneumoniae; identical to SEQ ID NO: 53217

SEQ ID NO: 53944 - protein, 269 aa, Streptococcus pneumoniae; identical to SEQ ID NO: 53216

SEQ ID NO: 53945 - protein, 1027 aa, Streptococcus pneumoniae; identical to SEQ ID NO: 53217

SEQ ID NO: 53946 - protein, 266 aa, Streptococcus pneumoniae; identical to SEQ ID NO: 53222

SEQ ID NO: 53947 - protein, 815 aa, Streptococcus pneumoniae; identical to SEQ ID NO: 53251

SEQ ID NO: 53948 - protein, 269 aa, Streptococcus pneumoniae; identical to SEQ ID NO: 53216

SEQ ID NO: 53949 - protein, 1007 aa, Streptococcus pneumoniae; identical to SEQ ID NO: 53223

SEQ ID NO: 53950 - protein, 269 aa, Streptococcus pneumoniae; identical to SEQ ID NO: 53216

SEQ ID NO: 53951 - protein, 1007 aa, Streptococcus pneumoniae; identical to SEQ ID NO: 53223

SEQ ID NO: 53952 - protein, 269 aa, Streptococcus pneumoniae; identical to SEQ ID NO: 53216

SEQ ID NO: 53953 - protein, 1027 aa, Streptococcus pneumoniae; identical to SEQ ID NO: 53217

SEQ ID NO: 53954 - protein, 269 aa, Streptococcus pneumoniae; identical to SEQ ID NO: 53216

SEQ ID NO: 53955 - protein, 1027 aa, Streptococcus pneumoniae; identical to SEQ ID NO: 53217

SEQ ID NO: 53956 - protein, 269 aa, Streptococcus pneumoniae; identical to SEQ ID NO: 53216

SEQ ID NO: 53957 - protein, 1027 aa, Streptococcus pneumoniae; identical to SEQ ID NO: 53217

SEQ ID NO: 53958 - protein, 269 aa, Streptococcus pneumoniae; identical to SEQ ID NO: 53216

SEQ ID NO: 53959 - protein, 1007 aa, Streptococcus pneumoniae; identical to SEQ ID NO: 53223

SEQ ID NO: 53960 - protein, 269 aa, Streptococcus pneumoniae; identical to SEQ ID NO: 53216

SEQ ID NO: 53961 - protein, 1027 aa, Streptococcus pneumoniae; identical to SEQ ID NO: 53217

SEQ ID NO: 53962 - protein, 269 aa, Streptococcus pneumoniae; identical to SEQ ID NO: 53216

SEQ ID NO: 53963 - protein, 1007 aa, Streptococcus pneumoniae; identical to SEQ ID NO: 53223

SEQ ID NO: 53964 - protein, 269 aa, Streptococcus pneumoniae; identical to SEQ ID NO: 53216

SEQ ID NO: 53965 - protein, 1007 aa, Streptococcus pneumoniae; identical to SEQ ID NO: 53223

SEQ ID NO: 53966 - protein, 269 aa, Streptococcus pneumoniae; identical to SEQ ID NO: 53216

SEQ ID NO: 53967 - protein, 1027 aa, Streptococcus pneumoniae; identical to SEQ ID NO: 53217

SEQ ID NO: 53968 - protein, 266 aa, Streptococcus pneumoniae; identical to SEQ ID NO: 53222

SEQ ID NO: 53969 - protein, 815 aa, Streptococcus pneumoniae; identical to SEQ ID NO: 53251

SEQ ID NO: 53970 - protein, 269 aa, Streptococcus pneumoniae; identical to SEQ ID NO: 53216

SEQ ID NO: 53971 - protein, 1027 aa, Streptococcus pneumoniae; identical to SEQ ID NO: 53217

SEQ ID NO: 53972 - protein, 269 aa, Streptococcus pneumoniae; identical to SEQ ID NO: 53216

SEQ ID NO: 53973 - protein, 1007 aa, Streptococcus pneumoniae; identical to SEQ ID NO: 53223

SEQ ID NO: 53974 - protein, 269 aa, Streptococcus pneumoniae; identical to SEQ ID NO: 53216

SEQ ID NO: 53975 - protein, 1027 aa, Streptococcus pneumoniae; identical to SEQ ID NO: 53217

SEQ ID NO: 53976 - protein, 269 aa, Streptococcus pneumoniae; identical to SEQ ID NO: 53216

SEQ ID NO: 53977 - protein, 1007 aa, Streptococcus pneumoniae; identical to SEQ ID NO: 53223

SEQ ID NO: 53978 - protein, 269 aa, Streptococcus pneumoniae; identical to SEQ ID NO: 53216

SEQ ID NO: 53979 - protein, 1007 aa, Streptococcus pneumoniae
MIEFDIPLESHLPISEDAQKSFLGALAIVADTARKYFEVYINRKSFNLQLKNQLHNAAEYFDALLVSGLGNSAEYQDYIAILGTTAYYLCDYNGSSRVMINYISDDIQLLEDCMTLIKVFIDVVTDELFLNHTPIEGKYSSELNTLVESYRNYILSKTEFSIDIYRDLQDKVYRNGSDFSVIIVNCLLAVVCKKINSSSTKLLPEFSGLDFSLWQDYIQSTGSIKELWPSQIELGKQGIFSGKSGIVQMPTSSGKTASINLTLRSAFYSNRIDNALIVAPFRALCREIYRDINAHFVDENNVIVSEVFDLPEIPQDFSIFNDGKKRVFILTPEKLLFLLRNHQSFIDEIGLCIFDEAHLFDDPSRGTNFELLLSTVKQIFPKGIQKILISAVIPNSEAINRWFNEDGVIVSNNSIKTTEKRVAFSDLNGSNEQLYFIDPITFEEEFFVPRTVSVSELEQLGKERKQKVFPELTNANDISIYYGIKLINNGGVGIFCGRKDTVNVILRRFIDLNNRNYDLTDFLKNSDRSEVEKIGNLIGQNLGYDSVEYTCSQLGVFSHHSGIPMGIRIAIEYAFSKSKINNVVCTSTLAQGINLPIKYLIISSVYQAGDAIKVRDFQNLIGRAGRAGKYTEGTIILTEPNIYKSPKNKWKKQNYKALLNPINTEGCQSNILSIIQFKSVVPTDYRFAPIKFDFWNLIKERFDSSVDYRTKINNILSKLKRKNSLYFKDFNSKIDQIDNTLIAIENYIASMYATELETDSLAENTFGYFLGNEEEKEKIKELFILIKSKIITSSVETEIIAKNSIGLYQSELLKEWVQENKTSILSCEKEEELLGVLTKKIIDFSNNKEMRKLSIENLNYISQLWIKGISYFQILESCTEKSISIEKRGKSKPIDMSDIISICDNGLGYETSMVLNAINNILEKLVGEELDVLTMLIKRLKYGLPLEKEINIYELGFSDRIVVQVIGQEINSVSKNQIRNEIKQKSARLEDKLSDFPSYYTQIINEM

SEQ ID NO: 53980 - protein, 269 aa, Streptococcus pneumoniae; identical to SEQ ID NO: 53216

SEQ ID NO: 53981 - protein, 1007 aa, Streptococcus pneumoniae; identical to SEQ ID NO: 53223

SEQ ID NO: 53982 - protein, 269 aa, Streptococcus pneumoniae; identical to SEQ ID NO: 53216

SEQ ID NO: 53983 - protein, 1007 aa, Streptococcus pneumoniae; identical to SEQ ID NO: 53223

SEQ ID NO: 53984 - protein, 269 aa, Streptococcus pneumoniae; identical to SEQ ID NO: 53216

SEQ ID NO: 53985 - protein, 1007 aa, Streptococcus pneumoniae; identical to SEQ ID NO: 53223

SEQ ID NO: 53986 - protein, 269 aa, Streptococcus pneumoniae; identical to SEQ ID NO: 53216

SEQ ID NO: 53987 - protein, 1027 aa, Streptococcus pneumoniae; identical to SEQ ID NO: 53217

SEQ ID NO: 53988 - protein, 269 aa, Streptococcus pneumoniae; identical to SEQ ID NO: 53216

SEQ ID NO: 53989 - protein, 1027 aa, Streptococcus pneumoniae; identical to SEQ ID NO: 53217

SEQ ID NO: 53990 - protein, 269 aa, Streptococcus pneumoniae; identical to SEQ ID NO: 53216

SEQ ID NO: 53991 - protein, 1027 aa, Streptococcus pneumoniae; identical to SEQ ID NO: 53217

SEQ ID NO: 53992 - protein, 269 aa, Streptococcus pneumoniae; identical to SEQ ID NO: 53216

SEQ ID NO: 53993 - protein, 1007 aa, Streptococcus pneumoniae; identical to SEQ ID NO: 53223

SEQ ID NO: 53994 - protein, 269 aa, Streptococcus pneumoniae; identical to SEQ ID NO: 53216

SEQ ID NO: 53995 - protein, 1007 aa, Streptococcus pneumoniae; identical to SEQ ID NO: 53223

SEQ ID NO: 53996 - protein, 269 aa, Streptococcus pneumoniae; identical to SEQ ID NO: 53216

SEQ ID NO: 53997 - protein, 1007 aa, Streptococcus pneumoniae; identical to SEQ ID NO: 53223

SEQ ID NO: 53998 - protein, 269 aa, Streptococcus pneumoniae; identical to SEQ ID NO: 53216

SEQ ID NO: 53999 - protein, 1007 aa, Streptococcus pneumoniae; identical to SEQ ID NO: 53223

SEQ ID NO: 54000 - protein, 269 aa, Streptococcus pneumoniae; identical to SEQ ID NO: 53216

SEQ ID NO: 54001 - protein, 1007 aa, Streptococcus pneumoniae; identical to SEQ ID NO: 53223

SEQ ID NO: 54002 - protein, 269 aa, Streptococcus pneumoniae; identical to SEQ ID NO: 53216

SEQ ID NO: 54003 - protein, 1007 aa, Streptococcus pneumoniae; identical to SEQ ID NO: 53223

SEQ ID NO: 54004 - protein, 266 aa, Streptococcus pneumoniae; identical to SEQ ID NO: 53222

SEQ ID NO: 54005 - protein, 815 aa, Streptococcus pneumoniae; identical to SEQ ID NO: 53251

SEQ ID NO: 54006 - protein, 269 aa, Streptococcus pneumoniae; identical to SEQ ID NO: 53216

SEQ ID NO: 54007 - protein, 1007 aa, Streptococcus pneumoniae; identical to SEQ ID NO: 53223

SEQ ID NO: 54008 - protein, 269 aa, Streptococcus pneumoniae; identical to SEQ ID NO: 53216

SEQ ID NO: 54009 - protein, 1007 aa, Streptococcus pneumoniae; identical to SEQ ID NO: 53223

SEQ ID NO: 54010 - protein, 269 aa, Streptococcus pneumoniae; identical to SEQ ID NO: 53216

SEQ ID NO: 54011 - protein, 1027 aa, Streptococcus pneumoniae; identical to SEQ ID NO: 53217

SEQ ID NO: 54012 - protein, 269 aa, Streptococcus pneumoniae; identical to SEQ ID NO: 53216

SEQ ID NO: 54013 - protein, 1007 aa, Streptococcus pneumoniae; identical to SEQ ID NO: 53223

SEQ ID NO: 54014 - protein, 266 aa, Streptococcus pneumoniae; identical to SEQ ID NO: 53222

SEQ ID NO: 54015 - protein, 815 aa, Streptococcus pneumoniae; identical to SEQ ID NO: 53251

SEQ ID NO: 54016 - protein, 269 aa, Streptococcus pneumoniae; identical to SEQ ID NO: 53216

SEQ ID NO: 54017 - protein, 1007 aa, Streptococcus pneumoniae; identical to SEQ ID NO: 53979

SEQ ID NO: 54018 - protein, 269 aa, Streptococcus pneumoniae; identical to SEQ ID NO: 53216

SEQ ID NO: 54019 - protein, 1007 aa, Streptococcus pneumoniae; identical to SEQ ID NO: 53223

SEQ ID NO: 54020 - protein, 269 aa, Streptococcus pneumoniae; identical to SEQ ID NO: 53216

SEQ ID NO: 54021 - protein, 1007 aa, Streptococcus pneumoniae; identical to SEQ ID NO: 53223

SEQ ID NO: 54022 - protein, 269 aa, Streptococcus pneumoniae; identical to SEQ ID NO: 53216

SEQ ID NO: 54023 - protein, 1027 aa, Streptococcus pneumoniae; identical to SEQ ID NO: 53217

SEQ ID NO: 54024 - protein, 269 aa, Streptococcus pneumoniae; identical to SEQ ID NO: 53216

SEQ ID NO: 54025 - protein, 1007 aa, Streptococcus pneumoniae; identical to SEQ ID NO: 53223

SEQ ID NO: 54026 - protein, 269 aa, Streptococcus pneumoniae; identical to SEQ ID NO: 53216

SEQ ID NO: 54027 - protein, 1007 aa, Streptococcus pneumoniae; identical to SEQ ID NO: 53223

SEQ ID NO: 54028 - protein, 269 aa, Streptococcus pneumoniae; identical to SEQ ID NO: 53216

SEQ ID NO: 54029 - protein, 1027 aa, Streptococcus pneumoniae; identical to SEQ ID NO: 53217

SEQ ID NO: 54030 - protein, 269 aa, Streptococcus pneumoniae; identical to SEQ ID NO: 53216

SEQ ID NO: 54031 - protein, 1007 aa, Streptococcus pneumoniae; identical to SEQ ID NO: 53223

SEQ ID NO: 54032 - protein, 269 aa, Streptococcus pneumoniae; identical to SEQ ID NO: 53216

SEQ ID NO: 54033 - protein, 1027 aa, Streptococcus pneumoniae; identical to SEQ ID NO: 53217

SEQ ID NO: 54034 - protein, 269 aa, Streptococcus pneumoniae; identical to SEQ ID NO: 53216

SEQ ID NO: 54035 - protein, 1027 aa, Streptococcus pneumoniae; identical to SEQ ID NO: 53217

SEQ ID NO: 54036 - protein, 269 aa, Streptococcus pneumoniae; identical to SEQ ID NO: 53216

SEQ ID NO: 54037 - protein, 1007 aa, Streptococcus pneumoniae; identical to SEQ ID NO: 53223

SEQ ID NO: 54038 - protein, 266 aa, Streptococcus pneumoniae; identical to SEQ ID NO: 53222

SEQ ID NO: 54039 - protein, 815 aa, Streptococcus pneumoniae; identical to SEQ ID NO: 53251

SEQ ID NO: 54040 - protein, 269 aa, Streptococcus pneumoniae; identical to SEQ ID NO: 53216

SEQ ID NO: 54041 - protein, 1007 aa, Streptococcus pneumoniae; identical to SEQ ID NO: 53223

SEQ ID NO: 54042 - protein, 266 aa, Streptococcus pneumoniae; identical to SEQ ID NO: 53222

SEQ ID NO: 54043 - protein, 815 aa, Streptococcus pneumoniae; identical to SEQ ID NO: 53251

SEQ ID NO: 54044 - protein, 269 aa, Streptococcus pneumoniae; identical to SEQ ID NO: 53216

SEQ ID NO: 54045 - protein, 1027 aa, Streptococcus pneumoniae; identical to SEQ ID NO: 53217

SEQ ID NO: 54046 - protein, 269 aa, Streptococcus pneumoniae; identical to SEQ ID NO: 53216

SEQ ID NO: 54047 - protein, 1027 aa, Streptococcus pneumoniae; identical to SEQ ID NO: 53217

SEQ ID NO: 54048 - protein, 269 aa, Streptococcus pneumoniae; identical to SEQ ID NO: 53216

SEQ ID NO: 54049 - protein, 1027 aa, Streptococcus pneumoniae; identical to SEQ ID NO: 53217

SEQ ID NO: 54050 - protein, 269 aa, Streptococcus pneumoniae; identical to SEQ ID NO: 53216

SEQ ID NO: 54051 - protein, 1007 aa, Streptococcus pneumoniae; identical to SEQ ID NO: 53223

SEQ ID NO: 54052 - protein, 269 aa, Streptococcus pneumoniae; identical to SEQ ID NO: 53216

SEQ ID NO: 54053 - protein, 1027 aa, Streptococcus pneumoniae; identical to SEQ ID NO: 53217

SEQ ID NO: 54054 - protein, 266 aa, Streptococcus pneumoniae; identical to SEQ ID NO: 53222

SEQ ID NO: 54055 - protein, 815 aa, Streptococcus pneumoniae; identical to SEQ ID NO: 53251

SEQ ID NO: 54056 - protein, 269 aa, Streptococcus pneumoniae; identical to SEQ ID NO: 53216

SEQ ID NO: 54057 - protein, 1027 aa, Streptococcus pneumoniae; identical to SEQ ID NO: 53217

SEQ ID NO: 54058 - protein, 266 aa, Streptococcus pneumoniae; identical to SEQ ID NO: 53222

SEQ ID NO: 54059 - protein, 835 aa, Streptococcus pneumoniae; identical to SEQ ID NO: 53245

SEQ ID NO: 54060 - protein, 269 aa, Streptococcus pneumoniae; identical to SEQ ID NO: 53216

SEQ ID NO: 54061 - protein, 1007 aa, Streptococcus pneumoniae; identical to SEQ ID NO: 53223

SEQ ID NO: 54062 - protein, 269 aa, Streptococcus pneumoniae; identical to SEQ ID NO: 53216

SEQ ID NO: 54063 - protein, 1027 aa, Streptococcus pneumoniae; identical to SEQ ID NO: 53217

SEQ ID NO: 54064 - protein, 269 aa, Streptococcus pneumoniae; identical to SEQ ID NO: 53216

SEQ ID NO: 54065 - protein, 1007 aa, Streptococcus pneumoniae; identical to SEQ ID NO: 53223

SEQ ID NO: 54066 - protein, 269 aa, Streptococcus pneumoniae; identical to SEQ ID NO: 53216

SEQ ID NO: 54067 - protein, 1007 aa, Streptococcus pneumoniae; identical to SEQ ID NO: 53223

SEQ ID NO: 54068 - protein, 269 aa, Streptococcus pneumoniae; identical to SEQ ID NO: 53216

SEQ ID NO: 54069 - protein, 1007 aa, Streptococcus pneumoniae; identical to SEQ ID NO: 53223

SEQ ID NO: 54070 - protein, 269 aa, Streptococcus pneumoniae; identical to SEQ ID NO: 53216

SEQ ID NO: 54071 - protein, 1007 aa, Streptococcus pneumoniae; identical to SEQ ID NO: 53223

SEQ ID NO: 54072 - protein, 269 aa, Streptococcus pneumoniae; identical to SEQ ID NO: 53216

SEQ ID NO: 54073 - protein, 1027 aa, Streptococcus pneumoniae; identical to SEQ ID NO: 53217

SEQ ID NO: 54074 - protein, 269 aa, Streptococcus pneumoniae; identical to SEQ ID NO: 53216

SEQ ID NO: 54075 - protein, 1007 aa, Streptococcus pneumoniae; identical to SEQ ID NO: 53223

SEQ ID NO: 54076 - protein, 269 aa, Streptococcus pneumoniae; identical to SEQ ID NO: 53216

SEQ ID NO: 54077 - protein, 1007 aa, Streptococcus pneumoniae; identical to SEQ ID NO: 53223

SEQ ID NO: 54078 - protein, 269 aa, Streptococcus pneumoniae; identical to SEQ ID NO: 53216

SEQ ID NO: 54079 - protein, 1007 aa, Streptococcus pneumoniae
MIEFDIPLESHLPISEDAQKSFLGALAIVADTARKYFEVYINRKSFNLQLKNQLHNAAEYFDALLVSGLGNSAEYQDYIAILGTTAYYLCDYNGSSRVMINYISDDIQLLEDCMTLIKVFIDVVTDELFLNHTPIEGKYYSELNTLVESYRNYILSKTEFSIDIYRDLQDKVYRNGSDFSVIIVNCLLAVVCKKINSSSTKLLPEFSGLDFSLWQDYIQSTGSIKELWPSQIELGKQGIFSGKSGIVQMPTSSGKTASINLTLRSAFYSNRIDNALIVAPFRALCREIYRDINAHFVDENNVIVSEVFDLPEIPQDFSIFNDGKKRVFILTPEKLLFLLRNHQSFIDEIGLCIFDEAHLFDDPSRGTNFELLLSTVKQIFPKGIQKILISAVIPNSEAINRWFNEDGVIVSNNSIKTTEKRVAFSDLNGSNEQLYFIDPITFEEEFFVPRTVSVSELEQLGKERKQKVFPELTNANDISIYYGTKLINNGGVGIFCGRKDTVNVILRRFIDLNNRNYDLTDFLKNSDRSEVEKIGNLIGQNLGYDSVEYTCSQLGVFSHHSGIPMGIRIAIEYAFSKSKINNVVCTSTLAQGINLPIKYLIISSVYQAGDAIKVRDFQNLIGRAGRAGKYTEGTIILTEPNIYKSPKNKWKKQNYKALLNPINTEGCQSNILSIIQFKSVVPTDYRFAPIKFDFWNLIKERFDSSVDYRTKINNILSKLKRKNSLYFKDFNSKIDQIDNTLIAIENYIASMYATELETDSLAENTFGYFLGNEEEKEKIKELFILIKSKIITSSVETEIIAKNSIGLYQSELLKEWVQENKTSILSCEKEEELLGVLTKKIIDFSNNKEMRKLSIENLNYISQLWIKGISYFQILESCTEKSISIEKRGKSKPIDMSDIISICDNGLGYETSMVLNAINNILEKLVGEELDVLTMLIKRLKYGLPLEKEINIYELGFSDRIVVQVIGQEINSVSKNQIRNEIKQKSARLEDKLSDFPSYYTQIINEM

SEQ ID NO: 54080 - protein, 269 aa, Streptococcus pneumoniae; identical to SEQ ID NO: 53216

SEQ ID NO: 54081 - protein, 1027 aa, Streptococcus pneumoniae; identical to SEQ ID NO: 53217

SEQ ID NO: 54082 - protein, 269 aa, Streptococcus pneumoniae; identical to SEQ ID NO: 53216

SEQ ID NO: 54083 - protein, 1027 aa, Streptococcus pneumoniae; identical to SEQ ID NO: 53217

SEQ ID NO: 54084 - protein, 266 aa, Streptococcus pneumoniae; identical to SEQ ID NO: 53222

SEQ ID NO: 54085 - protein, 815 aa, Streptococcus pneumoniae; identical to SEQ ID NO: 53251

SEQ ID NO: 54086 - protein, 266 aa, Streptococcus pneumoniae; identical to SEQ ID NO: 53222

SEQ ID NO: 54087 - protein, 815 aa, Streptococcus pneumoniae; identical to SEQ ID NO: 53251

SEQ ID NO: 54088 - protein, 269 aa, Streptococcus pneumoniae; identical to SEQ ID NO: 53216

SEQ ID NO: 54089 - protein, 1007 aa, Streptococcus pneumoniae; identical to SEQ ID NO: 54079

SEQ ID NO: 54090 - protein, 269 aa, Streptococcus pneumoniae; identical to SEQ ID NO: 53216

SEQ ID NO: 54091 - protein, 1027 aa, Streptococcus pneumoniae; identical to SEQ ID NO: 53217

SEQ ID NO: 54092 - protein, 269 aa, Streptococcus pneumoniae; identical to SEQ ID NO: 53216

SEQ ID NO: 54093 - protein, 1007 aa, Streptococcus pneumoniae; identical to SEQ ID NO: 53223

SEQ ID NO: 54094 - protein, 269 aa, Streptococcus pneumoniae; identical to SEQ ID NO: 53216

SEQ ID NO: 54095 - protein, 1007 aa, Streptococcus pneumoniae; identical to SEQ ID NO: 53223

SEQ ID NO: 54096 - protein, 269 aa, Streptococcus pneumoniae; identical to SEQ ID NO: 53216

SEQ ID NO: 54097 - protein, 1027 aa, Streptococcus pneumoniae; identical to SEQ ID NO: 53217

SEQ ID NO: 54098 - protein, 269 aa, Streptococcus pneumoniae; identical to SEQ ID NO: 53216

SEQ ID NO: 54099 - protein, 1027 aa, Streptococcus pneumoniae; identical to SEQ ID NO: 53217

SEQ ID NO: 54100 - protein, 266 aa, Streptococcus pneumoniae; identical to SEQ ID NO: 53222

SEQ ID NO: 54101 - protein, 815 aa, Streptococcus pneumoniae; identical to SEQ ID NO: 53251

SEQ ID NO: 54102 - protein, 269 aa, Streptococcus pneumoniae; identical to SEQ ID NO: 53216

SEQ ID NO: 54103 - protein, 1007 aa, Streptococcus pneumoniae; identical to SEQ ID NO: 53223

SEQ ID NO: 54104 - protein, 269 aa, Streptococcus pneumoniae; identical to SEQ ID NO: 53216

SEQ ID NO: 54105 - protein, 1027 aa, Streptococcus pneumoniae; identical to SEQ ID NO: 53217

SEQ ID NO: 54106 - protein, 266 aa, Streptococcus pneumoniae; identical to SEQ ID NO: 53222

SEQ ID NO: 54107 - protein, 815 aa, Streptococcus pneumoniae; identical to SEQ ID NO: 53251

SEQ ID NO: 54108 - protein, 269 aa, Streptococcus pneumoniae; identical to SEQ ID NO: 53246

SEQ ID NO: 54109 - protein, 1027 aa, Streptococcus pneumoniae
MIEFGKKSLYFSKLVRSKAKMIEFEIPLESHIPISEDAQKSFLGALAIAADTARKYFEDYINHKSFDSQLKNQLHNVAEYFDALLVSGLGNSAEYQDYIAILGTTAYYLGDYNGSSRVMVNYISDDMQLLEESITLVKVFIDVITDKLFLNHTPIEGKYSSELNTLVESYRNYILSKTEFSIDIYRGLQDKVYRNGSDFSVIIVNCLLAVVCKKIDSSSTKLLPEFSGLDFSLWQDYIQSTGSIKELWPSQIELGKQAIFSGKSGSVQMPTSSGKTASINLTLRSAFYSNRIDNALIVAPFRALCREIYRDINAHFVDENNVIVSEVFDLPEIPQDFSIFNDGKKRVFILTPEKLLFLLRNHQSFIDEIGLCIFDEAHLFDDPSRGTNFELLLSTVKQIFPKGIQKILISAVIPNSEAINRWFNEDGVIVSNNSIKTTEKRVAFSDLNGSNEQLYFIDPITFEEEFFVPRTVSVSELEQLGKERKQKVFPELTNANDISIYYGTKLINNGGVGIFCGRKDTVNVILRRFIDLNNRNYDLTDFLKNSDRSEVEKIGNLIGQNLGYDSVEYTCSQLGVFSHHSGIPMGIRIAIEYAFSKSKINNVVCTSTLAQGINLPIKYLIISSVYQAGDAIKVRDFQNLIGRAGRAGKYTEGTIILTEPNIYKLPKNKWKKQNYKALLNPINTEGCQSNILSIIQFKSVVPTDYRFAPIKFDFWNLIKERFDSSVDYRTKINNILSKLKRKNSLYFKDFNSKIDQIDNTLIAIENYIASMYATELETDSLAENTFGYFLGNEEEKEKIKELFILIKSKIITSSVETEIIAKNSIGLYQSELLKEWVQENKTSIISCEKEEELLGVLTKKIIDFSNNKEMRKLSIENLNYISQLWIKGISYFQILESCTEKSISIEKRGKSKPIDMSDIISICDNGLGYETSMVLNAINNILEKLVGEELYVLTMLIKRLKYGLPLEKEINIYELGFSDRIVVQVIGQEINSVSKNQIRNEIKQKSARLEDKLSDFPSYYTQIINEM

SEQ ID NO: 54110 - protein, 269 aa, Streptococcus pneumoniae; identical to SEQ ID NO: 53216

SEQ ID NO: 54111 - protein, 1027 aa, Streptococcus pneumoniae; identical to SEQ ID NO: 53217

SEQ ID NO: 54112 - protein, 269 aa, Streptococcus pneumoniae; identical to SEQ ID NO: 53216

SEQ ID NO: 54113 - protein, 1007 aa, Streptococcus pneumoniae; identical to SEQ ID NO: 53223

SEQ ID NO: 54114 - protein, 269 aa, Streptococcus pneumoniae; identical to SEQ ID NO: 53216

SEQ ID NO: 54115 - protein, 1007 aa, Streptococcus pneumoniae; identical to SEQ ID NO: 53223

SEQ ID NO: 54116 - protein, 269 aa, Streptococcus pneumoniae; identical to SEQ ID NO: 53216

SEQ ID NO: 54117 - protein, 1007 aa, Streptococcus pneumoniae; identical to SEQ ID NO: 53223

SEQ ID NO: 54118 - protein, 269 aa, Streptococcus pneumoniae; identical to SEQ ID NO: 53216

SEQ ID NO: 54119 - protein, 1007 aa, Streptococcus pneumoniae; identical to SEQ ID NO: 54079

SEQ ID NO: 54120 - protein, 269 aa, Streptococcus pneumoniae; identical to SEQ ID NO: 53246

SEQ ID NO: 54121 - protein, 1027 aa, Streptococcus pneumoniae; identical to SEQ ID NO: 54109

SEQ ID NO: 54122 - protein, 207 aa, Streptococcus pneumoniae; identical to SEQ ID NO: 53418

SEQ ID NO: 54123 - protein, 815 aa, Streptococcus pneumoniae; identical to SEQ ID NO: 53251

SEQ ID NO: 54124 - protein, 269 aa, Streptococcus pneumoniae; identical to SEQ ID NO: 53216

SEQ ID NO: 54125 - protein, 1007 aa, Streptococcus pneumoniae; identical to SEQ ID NO: 53223

SEQ ID NO: 54126 - protein, 269 aa, Streptococcus pneumoniae; identical to SEQ ID NO: 53216

SEQ ID NO: 54127 - protein, 1007 aa, Streptococcus pneumoniae; identical to SEQ ID NO: 53223

SEQ ID NO: 54128 - protein, 207 aa, Streptococcus pneumoniae; identical to SEQ ID NO: 53418

SEQ ID NO: 54129 - protein, 815 aa, Streptococcus pneumoniae; identical to SEQ ID NO: 53251

SEQ ID NO: 54130 - protein, 269 aa, Streptococcus pneumoniae; identical to SEQ ID NO: 53216

SEQ ID NO: 54131 - protein, 1007 aa, Streptococcus pneumoniae; identical to SEQ ID NO: 53223

SEQ ID NO: 54132 - protein, 269 aa, Streptococcus pneumoniae; identical to SEQ ID NO: 53216

SEQ ID NO: 54133 - protein, 1007 aa, Streptococcus pneumoniae; identical to SEQ ID NO: 53223

SEQ ID NO: 54134 - protein, 269 aa, Streptococcus pneumoniae; identical to SEQ ID NO: 53246

SEQ ID NO: 54135 - protein, 1027 aa, Streptococcus pneumoniae
MIEFGKKSLYFSKLVRSKAKMIEFEIPLESHIPISEDAQKSFLGALAIAADTARKYFEDYINHKSFDSQLKNQLHNVAEYFDALLVSGLGNSAEYQDYIAILGTTAYYLGDYNGSSRVMVNYISDDMQLLEESITLVKVFIDVITDKLFLNHTPIEGKYSSELNTLVESYRNYILSKTEFSIDIYRGLQDKVYRNGSDFSVIIVNCLLAVVCKKIDSSSTKLLPEFSGLDFSLWQDYIQSTGSIKELWPSQIELGKQAIFSGKSGSVQMPTSSGKTASINLTLRSAFYSNRIDNALIVAPFRALCREIYRDINAHFVDENNVIVSEVFDLPEIPQDFSIFNDGKKRVFILTPEKLLFLLRNHQSFIDEIGLCIFDEAHLFDDPSRGTNFELLLSTVKQIFPKGIQKILISAVIPNSEAINRWFNEDGVIVSNNSIKTTEKRVAFSDLNGSNEQLYFIDPITFEEEFFVPRTVSVSELEQLGKKRKQKVFPELTNANDISIYYGTKLINNGGVGIFCGRKDTVNVILRRFIDLNNRNYDLTDFLKNSDRSEVEKIGNLIGQNLGYDSVEYTCSQLGVFSHHSGIPMGIRIAIEYAFSKSKINNVVCTSTLAQGINLPIKYLIISSVYQAGDAIKVRDFQNLIGRAGRAGKYTEGTIILTEPNIYKSPKNKWKKQNYKALLNPINTEGCQSNILSIIQFKSVVPTDYRFAPIKFDFWNLIKERFDSSVDYRTKINNILSKLKRKNSLYFKDFNSKIDQIDNTLIAIENYIASMYATELETDSLAENTFGYFLGNEEEKEKIKELFILIKSKIITSSVETEIIAKNSIGLYQSELLKEWVQENKTSIISCEKEEELLGVLTKKIIDFSNNKEMRKLSIENLNYISQLWIKGISYFQILESCTEKSISIEKRGKSKPIDMSDIISICDNGLGYETSMVLNAINNILEKLVGEELYVLTMLIKRLKYGLPLEKEINIYELGFSDRIVVQVIGQEINSVSKNQIRNEIKQKSARLEDKLSDFPSYYTQIINEM

SEQ ID NO: 54136 - protein, 269 aa, Streptococcus pneumoniae; identical to SEQ ID NO: 53216

SEQ ID NO: 54137 - protein, 1007 aa, Streptococcus pneumoniae; identical to SEQ ID NO: 53223

SEQ ID NO: 54138 - protein, 269 aa, Streptococcus pneumoniae; identical to SEQ ID NO: 53216

SEQ ID NO: 54139 - protein, 1027 aa, Streptococcus pneumoniae; identical to SEQ ID NO: 53217

SEQ ID NO: 54140 - protein, 266 aa, Streptococcus pneumoniae; identical to SEQ ID NO: 53222

SEQ ID NO: 54141 - protein, 815 aa, Streptococcus pneumoniae; identical to SEQ ID NO: 53251

SEQ ID NO: 54142 - protein, 269 aa, Streptococcus pneumoniae; identical to SEQ ID NO: 53216

SEQ ID NO: 54143 - protein, 1027 aa, Streptococcus pneumoniae; identical to SEQ ID NO: 53217

SEQ ID NO: 54144 - protein, 269 aa, Streptococcus pneumoniae; identical to SEQ ID NO: 53246

SEQ ID NO: 54145 - protein, 1027 aa, Streptococcus pneumoniae; identical to SEQ ID NO: 54135

SEQ ID NO: 54146 - protein, 269 aa, Streptococcus pneumoniae; identical to SEQ ID NO: 53216

SEQ ID NO: 54147 - protein, 1027 aa, Streptococcus pneumoniae; identical to SEQ ID NO: 53217

SEQ ID NO: 54148 - protein, 269 aa, Streptococcus pneumoniae; identical to SEQ ID NO: 53216

SEQ ID NO: 54149 - protein, 1027 aa, Streptococcus pneumoniae; identical to SEQ ID NO: 53217

SEQ ID NO: 54150 - protein, 269 aa, Streptococcus pneumoniae; identical to SEQ ID NO: 53246

SEQ ID NO: 54151 - protein, 1027 aa, Streptococcus pneumoniae; identical to SEQ ID NO: 54135

SEQ ID NO: 54152 - protein, 269 aa, Streptococcus pneumoniae; identical to SEQ ID NO: 53216

SEQ ID NO: 54153 - protein, 1007 aa, Streptococcus pneumoniae; identical to SEQ ID NO: 53223

SEQ ID NO: 54154 - protein, 269 aa, Streptococcus pneumoniae; identical to SEQ ID NO: 53216

SEQ ID NO: 54155 - protein, 1007 aa, Streptococcus pneumoniae; identical to SEQ ID NO: 53223

SEQ ID NO: 54156 - protein, 266 aa, Streptococcus pneumoniae; identical to SEQ ID NO: 53222

SEQ ID NO: 54157 - protein, 815 aa, Streptococcus pneumoniae; identical to SEQ ID NO: 53251

SEQ ID NO: 54158 - protein, 269 aa, Streptococcus pneumoniae; identical to SEQ ID NO: 53216

SEQ ID NO: 54159 - protein, 1027 aa, Streptococcus pneumoniae; identical to SEQ ID NO: 53217

SEQ ID NO: 54160 - protein, 269 aa, Streptococcus pneumoniae; identical to SEQ ID NO: 53216

SEQ ID NO: 54161 - protein, 1007 aa, Streptococcus pneumoniae; identical to SEQ ID NO: 53223

SEQ ID NO: 54162 - protein, 269 aa, Streptococcus pneumoniae; identical to SEQ ID NO: 53216

SEQ ID NO: 54163 - protein, 1007 aa, Streptococcus pneumoniae; identical to SEQ ID NO: 53223

SEQ ID NO: 54164 - protein, 207 aa, Streptococcus pneumoniae; identical to SEQ ID NO: 53418

SEQ ID NO: 54165 - protein, 815 aa, Streptococcus pneumoniae; identical to SEQ ID NO: 53251

SEQ ID NO: 54166 - protein, 266 aa, Streptococcus pneumoniae; identical to SEQ ID NO: 53222

SEQ ID NO: 54167 - protein, 815 aa, Streptococcus pneumoniae; identical to SEQ ID NO: 53251

SEQ ID NO: 54168 - protein, 269 aa, Streptococcus pneumoniae; identical to SEQ ID NO: 53216

SEQ ID NO: 54169 - protein, 1027 aa, Streptococcus pneumoniae; identical to SEQ ID NO: 53217

SEQ ID NO: 54170 - protein, 269 aa, Streptococcus pneumoniae; identical to SEQ ID NO: 53216

SEQ ID NO: 54171 - protein, 1007 aa, Streptococcus pneumoniae; identical to SEQ ID NO: 53223

SEQ ID NO: 54172 - protein, 269 aa, Streptococcus pneumoniae; identical to SEQ ID NO: 53216

SEQ ID NO: 54173 - protein, 1007 aa, Streptococcus pneumoniae; identical to SEQ ID NO: 53223

SEQ ID NO: 54174 - protein, 269 aa, Streptococcus pneumoniae; identical to SEQ ID NO: 53216

SEQ ID NO: 54175 - protein, 1027 aa, Streptococcus pneumoniae; identical to SEQ ID NO: 53217

SEQ ID NO: 54176 - protein, 269 aa, Streptococcus pneumoniae; identical to SEQ ID NO: 53216

SEQ ID NO: 54177 - protein, 1027 aa, Streptococcus pneumoniae; identical to SEQ ID NO: 53217

SEQ ID NO: 54178 - protein, 269 aa, Streptococcus pneumoniae; identical to SEQ ID NO: 53216

SEQ ID NO: 54179 - protein, 1027 aa, Streptococcus pneumoniae; identical to SEQ ID NO: 53217

SEQ ID NO: 54180 - protein, 266 aa, Streptococcus pneumoniae; identical to SEQ ID NO: 53222

SEQ ID NO: 54181 - protein, 815 aa, Streptococcus pneumoniae; identical to SEQ ID NO: 53251

SEQ ID NO: 54182 - protein, 269 aa, Streptococcus pneumoniae; identical to SEQ ID NO: 53216

SEQ ID NO: 54183 - protein, 1007 aa, Streptococcus pneumoniae; identical to SEQ ID NO: 53223

SEQ ID NO: 54184 - protein, 269 aa, Streptococcus pneumoniae; identical to SEQ ID NO: 53216

SEQ ID NO: 54185 - protein, 1027 aa, Streptococcus pneumoniae; identical to SEQ ID NO: 53217

SEQ ID NO: 54186 - protein, 266 aa, Streptococcus pneumoniae; identical to SEQ ID NO: 53222

SEQ ID NO: 54187 - protein, 815 aa, Streptococcus pneumoniae; identical to SEQ ID NO: 53251

SEQ ID NO: 54188 - protein, 269 aa, Streptococcus pneumoniae; identical to SEQ ID NO: 53216

SEQ ID NO: 54189 - protein, 1007 aa, Streptococcus pneumoniae; identical to SEQ ID NO: 53223

SEQ ID NO: 54190 - protein, 269 aa, Streptococcus pneumoniae; identical to SEQ ID NO: 53216

SEQ ID NO: 54191 - protein, 1007 aa, Streptococcus pneumoniae; identical to SEQ ID NO: 53223

SEQ ID NO: 54192 - protein, 269 aa, Streptococcus pneumoniae; identical to SEQ ID NO: 53216

SEQ ID NO: 54193 - protein, 1027 aa, Streptococcus pneumoniae; identical to SEQ ID NO: 53217

SEQ ID NO: 54194 - protein, 269 aa, Streptococcus pneumoniae; identical to SEQ ID NO: 53216

SEQ ID NO: 54195 - protein, 1027 aa, Streptococcus pneumoniae; identical to SEQ ID NO: 53217

SEQ ID NO: 54196 - protein, 269 aa, Streptococcus pneumoniae; identical to SEQ ID NO: 53216

SEQ ID NO: 54197 - protein, 1007 aa, Streptococcus pneumoniae; identical to SEQ ID NO: 53223

SEQ ID NO: 54198 - protein, 269 aa, Streptococcus pneumoniae; identical to SEQ ID NO: 53216

SEQ ID NO: 54199 - protein, 1007 aa, Streptococcus pneumoniae; identical to SEQ ID NO: 53223

SEQ ID NO: 54200 - protein, 269 aa, Streptococcus pneumoniae; identical to SEQ ID NO: 53216

SEQ ID NO: 54201 - protein, 1007 aa, Streptococcus pneumoniae; identical to SEQ ID NO: 53223

SEQ ID NO: 54202 - protein, 266 aa, Streptococcus pneumoniae; identical to SEQ ID NO: 53222

SEQ ID NO: 54203 - protein, 835 aa, Streptococcus pneumoniae; identical to SEQ ID NO: 53245

SEQ ID NO: 54204 - protein, 269 aa, Streptococcus pneumoniae; identical to SEQ ID NO: 53216

SEQ ID NO: 54205 - protein, 1007 aa, Streptococcus pneumoniae
MIEFDIPLESHLPISEDAQKSFLGALAIVADTARKYFEVYINRKSFNLQLKNQLHNAAEYFDALLVSGLGNSAEYQDYIAILGTTAYYLCDYNGSSRVMINYISDDIQLLEDCMTLIKVFIDVVTDELFLNHTPIEGKYSSELNTLVESYRNYILSKTEFSIDIYRDLQDKVYRNGSDFSVIIVNCLLAVVCKKINSSSTKLLPEFSGLDFSLWQDYIQSTGSIKELWPSQIELGKQGIFSGKSGIVQMPTSSGKTASINLTLRSAFYSNRIDNALIVAPFRALCREIYRDINAHFVDENNVIVSEVFDLPEIPQDFSIFNDGKKRVFILTPEKLLFLLRNHQSFIDEIGLCIFDEAHLFDDPSRGTNFELLLSTVKQIFPKEIQKILISAVIPNSEAINRWFNEDGVIVSNNSIKTTEKRVAFSDLNGSNEQLYFIDPITFEEEFFVPRTVSVSELELLGKERKQKVFPELSNANDISIYYGTKLINNGGVGIFCGRKDTVNVVLRRFIDLNNRNYDLTDFLKNSDKYEVEKIGNLLGQNLGYDSVEYACSQLGVFSHHSGIPMGIRIAIEYAFSKSKINNVVCTSTLAQGVNLPIKYLIISSVYQAGDAIKVRDFQNLIGRAGRAGKYTEGTIILTEPNIYKSPKNKWKKQNYKALLNPINTEGCQSNILSIIQFKSVVPTDYRFAPIKFDFWNLIKERFDSSVDYRTKINNILSKLKRKNSLYFKDFNSKIDQIDNTLIAIENYIASMYATELETDSLAENTFGYFLGNEEEKEKIKELFILIKSKIITSSVETEIIAKNSIGLYQSELLKEWVQENKTSILSCEKEEELLGVLTKKIIDFSNNKEMRKLSIENLNYISQLWIKGISYFQILESCTEKSISIEKRGKSKPIDMSDIISICDNGLGYETSMVLNAINNILEKLVGEELDVLTMLIKRLKYGLPLEKEINIYELGFSDRIVVQVIGQEINSVSKNQIRNEIKQKSARLEDKLSDFPSYYTQIINEM

SEQ ID NO: 54206 - protein, 266 aa, Streptococcus pneumoniae; identical to SEQ ID NO: 53222

SEQ ID NO: 54207 - protein, 815 aa, Streptococcus pneumoniae; identical to SEQ ID NO: 53251

SEQ ID NO: 54208 - protein, 269 aa, Streptococcus pneumoniae; identical to SEQ ID NO: 53216

SEQ ID NO: 54209 - protein, 1007 aa, Streptococcus pneumoniae; identical to SEQ ID NO: 53223

SEQ ID NO: 54210 - protein, 269 aa, Streptococcus pneumoniae; identical to SEQ ID NO: 53216

SEQ ID NO: 54211 - protein, 1007 aa, Streptococcus pneumoniae; identical to SEQ ID NO: 53223

SEQ ID NO: 54212 - protein, 266 aa, Streptococcus pneumoniae; identical to SEQ ID NO: 53222

SEQ ID NO: 54213 - protein, 815 aa, Streptococcus pneumoniae; identical to SEQ ID NO: 53251

SEQ ID NO: 54214 - protein, 266 aa, Streptococcus pneumoniae; identical to SEQ ID NO: 53222

SEQ ID NO: 54215 - protein, 815 aa, Streptococcus pneumoniae; identical to SEQ ID NO: 53251

SEQ ID NO: 54216 - protein, 269 aa, Streptococcus pneumoniae; identical to SEQ ID NO: 53216

SEQ ID NO: 54217 - protein, 1007 aa, Streptococcus pneumoniae; identical to SEQ ID NO: 53223

SEQ ID NO: 54218 - protein, 266 aa, Streptococcus pneumoniae; identical to SEQ ID NO: 53222

SEQ ID NO: 54219 - protein, 815 aa, Streptococcus pneumoniae; identical to SEQ ID NO: 53251

SEQ ID NO: 54220 - protein, 269 aa, Streptococcus pneumoniae; identical to SEQ ID NO: 53216

SEQ ID NO: 54221 - protein, 1007 aa, Streptococcus pneumoniae; identical to SEQ ID NO: 53223

SEQ ID NO: 54222 - protein, 269 aa, Streptococcus pneumoniae; identical to SEQ ID NO: 53216

SEQ ID NO: 54223 - protein, 1007 aa, Streptococcus pneumoniae; identical to SEQ ID NO: 53223

SEQ ID NO: 54224 - protein, 269 aa, Streptococcus pneumoniae; identical to SEQ ID NO: 53216

SEQ ID NO: 54225 - protein, 1027 aa, Streptococcus pneumoniae; identical to SEQ ID NO: 53217

SEQ ID NO: 54226 - protein, 269 aa, Streptococcus pneumoniae; identical to SEQ ID NO: 53216

SEQ ID NO: 54227 - protein, 1007 aa, Streptococcus pneumoniae; identical to SEQ ID NO: 53223

SEQ ID NO: 54228 - protein, 266 aa, Streptococcus pneumoniae; identical to SEQ ID NO: 53222

SEQ ID NO: 54229 - protein, 815 aa, Streptococcus pneumoniae; identical to SEQ ID NO: 53251

SEQ ID NO: 54230 - protein, 266 aa, Streptococcus pneumoniae; identical to SEQ ID NO: 53222

SEQ ID NO: 54231 - protein, 815 aa, Streptococcus pneumoniae; identical to SEQ ID NO: 53251

SEQ ID NO: 54232 - protein, 269 aa, Streptococcus pneumoniae; identical to SEQ ID NO: 53216

SEQ ID NO: 54233 - protein, 1027 aa, Streptococcus pneumoniae; identical to SEQ ID NO: 53217

SEQ ID NO: 54234 - protein, 269 aa, Streptococcus pneumoniae; identical to SEQ ID NO: 53216

SEQ ID NO: 54235 - protein, 1007 aa, Streptococcus pneumoniae; identical to SEQ ID NO: 53223

SEQ ID NO: 54236 - protein, 266 aa, Streptococcus pneumoniae; identical to SEQ ID NO: 53222

SEQ ID NO: 54237 - protein, 567 aa, Streptococcus pneumoniae
MPTSSGKTASINLTLRSAFYSNRIDNALIVAPFRALCREIYRDINAHFVDENNVIVSEVFDLPEIPQDFSIFNDGKKRVFILTPEKLLFLLRNHQSFIDEIGLCIFDEAHLFDDPSRGTNFELLLSTVKQIFPKEIQKILISAVIPNSEAINRWFNEDGVIVSNNSIKTTEKRVAFSDLNGSNEQLYFIDPITFEEEFFVPRTVSVSELELLGKERKQKVFPELSNANDISIYYGTKLINNGGVGIFCGRKDTVNVVLRRFIDLNNRNYDLTDFLKNSDKYEVEKIGNLLGQNLGYDSVEYACSQLGVFSHHSGIPMGIRIAIEYAFSKSKINNVVCTSTLAQGVNLPIKYLIISSVYQAGDAIKVRDFQNLIGRAGRAGKYTEGTIILTEPNIYKSPKNKRKKQNYEALLNPINTEGCQSNILSIIQFKSVVPTDYRFNPIKFDYWSLIKERFDSTVDYRTKINNILSELKEQNSPYFKDFHSKIDQIDKTLIAIENYIASMYATELETDSLAEKTFGYFLGNEEEQEKIKELFVLVKSKIVTSLVETEIIAKSSIGLYQSELLKE

SEQ ID NO: 54238 - protein, 274 aa, Streptococcus dysgalactiae subsp. equisimilis RE378; identical to SEQ ID NO: 53180

SEQ ID NO: 54239 - protein, 1034 aa, Streptococcus dysgalactiae subsp. equisimilis RE378
MLMLIESASKYYLKKVRAKAKMYEYGVPENLHIEVEEQANDLILLSIGVVGDISNEIWKMKQAPIILSKEKEEELYFVSRFFDAYFQSEMSIDLNPYYILMGAVTYYFCNMNGSSKVMMSIMHNLNNFKFSASGLENVIIWLLDGNYKFDVSDIDEKYRSYIMQLINYHNRFFDSENLEKVQFEEFRNYVYHFGNDREILFTDIILAILKKKIYNSCINLMPLYSEIDKNEWIATFKSNVLMKEMWASQILLGEKGIFKGKSGVIQMPTSSGKTTSVSLAIQSAFLSKRTSIVIVVAPFRALCKEILFDMEKFFAFDENITITEFSDIPEPSEIELVTSESIVKKVFVMTPEKLAYILKHNTEIIESINMIVFDEAHLFDDEARGTDYELLLTTINSYLKPDAQKILVSAVISNAEQLNTWINKDGIVIRNNTIKTSEKTVAFNTFTSTNINNAYSNLYFVEPNKNLEEEFYVPRVVQTKKLKKIDGERKLRYFPDFKNNKQDVGIYYAIKLIANGNIAIFCSKKGTVNNILKRFIDLKERGISLEDFSTLSDETECLKIAYLIKEHLGENNLYIAALNGIVGHHSGVPNGVRIAEEYALKKSLIRCVVCTSTLAQGVNLPIKYLIVSSIYQSKQIIKVRDFHNLIGRTARAGKETEGTIILTEDIYKNSKEAYKLNNYKRLLNADNSEECYSNLLKLVREVDLGNNRVIPFDFLKKYIESRYSNKAEYAETKKDILVYKEQEKEYGEHIFYKMNEIEHILVSLENFILGFADIEDESFEIIKSTYGYYLANEDEKEELKNIYNLIRSNIESLEVADRLLYRKSMLGILTMKELYRFVDENLYEIANADFDTLINLVANKLKESKNCKLIPKLIDDSHIYELLKMWINGKSYIQIWDYSKSVNLLIKWGKKSRKISLEDIITLCDSDFGFASLTIIQAIVEILNTKDCSENIQEALNDIIYRIRYGLPNKESVCVYELGFADRIISQKIVNEIRGYDCSTKKKTKSAIKNNREKLRELLANYPSYFMDRLEKLR

SEQ ID NO: 54240 - protein, 188 aa, Streptococcus dysgalactiae subsp. equisimilis AC-2713
MSGEFGEILVYDYINFTLKHYVTRTRYLEKVNPDMPVSGSDVIGYQVKNIDKPSKTDHLIVAEVKTRSSKSGNKKSLCEKTVKDAIKHSVKDRVRLGESLNAEKRRLFNRLRIEEAKIVERFQNKTDNPFIIDFFAVAVLDSDLYSDQVVLDVVNSQHENVKSTSILIIHSKELLLFLRDLYRRACSC

SEQ ID NO: 54241 - protein, 1032 aa, Streptococcus dysgalactiae subsp. equisimilis AC-2713
MLIESASKYYLKKVRAKAKMYEYGVPENLHIEVEEQANDLILLSIGVVGDISNEIWKMKQAPIILSKEKEEELYFVSRFFDAYFQSEMSIDLNPYYILMGAVTYYFCNMNGSSKVMMSIMHNLNNFKFSASGLENVIIWLLDGNYKFDVSDIDEKYRSYIMQLINYHNRFFDSENLEKVQFEEFRNYVYHFGNDREILFTDIILAILKKKIYNSCINLMPLYSEIDKNEWIATFKSNVLMKEMWASQILLGEKGIFKGKSGVIQMPTSSGKTTSVSLAIQSAFLSKRTSIVIVVAPFRALCKEILFDMEKFFAFDENITITEFSDIPEPSEIELVTSESIVKKVFVMTPEKLAYILKHNTEIIESINMIVFDEAHLFDDEARGTDYELLLTTINSYLKPDAQKILVSAVISNAEQLNTWINKDGIVIRNNTIKTSEKTVAFNTFTSTNINNAYSNLYFVEPNKNLEEEFYVPRVVQTKKLKKIDGERKLRYFPDFKNNKQDVGIYYAIKLIANGNIAIFCSKKGTVNNILKRFIDLKERGISLEDFSTLSDETECLKIAYLITEHLGENNLYIAALNGIVGHHSGVPNGVRIAEEYALKKSLIRCVVCTSTLAQGVNLPIKYLIVSSIYQSKQIIKVRDFHNLIGRTARAGKETEGTIILTEDIYKNSKEAYKLNNYKRLLNADNSEECYSNLLKLVREVDLGNNRVIPFDFLKKYIESRYSNKAEYAETKKDILVYKEQEKEYGEHIFYKMNEIEHILVSLENFILGFADIEDESFEIIKSTYGYYLANEDEKEELKNIYNLIRSNIESLEVADRLLYRKSMLGILTMKELYRFVDENLYEIANADFDTLINLVANKLKESKNCKLIPKLIDDSHIYELLKMWINGKSYIQIWDYSKSVNLLIKWGKKSRKISLEDIITLCDSDFGFASLTIIQAIVEILNTKDCSENIQEALNDIIYRIRYGLPNKESVCVYELGFADRIISQKIVNEIRGYDCSTKKKTKSAIKNNREKLRELLANYPSYFMDRLEKLR

SEQ ID NO: 54242 - protein, 269 aa, Streptococcus equinus ATCC 700338
MEKMHSYIKYLTQEDPIITDEGKQIEILHLDIQDDPEIFEDWAKQFRRNYCSDDELAEMIGFMNISPKEYLENFKLPSDSGIGLSTMSGDFGEILVSDYLQYIEEYVVPRTRYDSKVNKDTSTQGSDVLGYKQDSSNVSNDEVVVVEVKSSASDSSSSKAKNKLQEAINHSDKDFERFSTSIVASYLRLKKSNSDQANVVERFLNITDKPFNVIYGAVAVYSNQSYDIDVIKTVVSKKHRDFQKLRLLVIHSDELMKFIRELYSKASEV

SEQ ID NO: 54243 - protein, 1027 aa, Streptococcus equinus ATCC 700338
MIEFGRKSLYFSKLVRSKAKMIEFDIPLESHIPISEDAQKSFLGALAIVADTARKYFEDYINHKSFDSQLKNQLHNVAEYFDALLVSGLGNSAEYQDYIAILGTTAYYLGDYNGSSRVMVNYISDDMQLLEESITLVRVFIDVITDKLFLNHTPIEGKYSSELNTLVESYRNYILSKTEFSIDIYRDLQDKVYRNGSDFSVIIVNCLLAVVCKKIDSSSTKLLPEFSGLDFSLWQDYIQSTGSIKELWPSQIELGKQAIFSGKSGIVQMPTSSGKTASINLTLRSAFYSNRIDNALIVAPFRALCREIYRDINAHFVDENNVIVSEVFDLPEIPQDFSIFNDGKKRVFILTPEKLLFLLRNHQSFIDEIGLCIFDEAHLFDDPSRGTNFELLLSTVKQIFPKEIQKILISAVIPNSEAINRWFNEDGVIVSNNSIKTTEKRVAFSDLNGSNEQLYFIDPITFEEEFFVPRTVSVSELEQLGKERKQKVFPELTNANDISIYYGTKLINNGGVGIFCGRKDTVNVVLRRFIDLNNRNYDLTDFLKNSDRSEVEKIGNLIGQNLGYDSVEYTCSQLGVFSHHSGIPMGIRIAIEYAFSKSKINNVVCTSTLAQGVNLPIKYLIISSVYQAGDAIKVRDFQNLIGRAGRAGKYTEGTIILTEPNIYKSPKNKWKKQNYEALLNPINTEGCQSNILSIIQFKSVVPTDYRFDPIKFDYWSLIKERFDSSVDYRTKINNILSELKGQNSPYFKDFNSKIDQIDNTLIAIENYIASMYATELETDSLAENTFGYFLGNEEEQEKIKELFILIKSKIITSLVETEIIAKNSIGLYQSELLKEWVQENKTSILSCEKEEDLLGVLTKIIIDFSNNKEMRKLSIENLNYISQLWIKGISYFQILESCTEKSISIEKRGKLKPIDMSDIISICDNGLGYETSMVLNAINNILEELVGEELDVLTMLIKRLKYGLPLEKEINIYELGFSDRIVVQVIGQEINAVSKNQIRNEIKRKSARLEDKLSDFPSYYTQIINEM

SEQ ID NO: 54244 - protein, 265 aa, Streptococcus vestibularis ATCC 49124
METMYSYMKYLIQEEPIITDEGKQIEVFHLDIQDEPEIFEDWAKQFRRNYCSDEKLQHMTYVMGIESSKYLNENKLPCVPSTKSGDFGEILVSDYLQYFENYLVPRTRFNSRENKDRPTLGSDALGYRYDPKAPGNAEVIVIEVKSSASNKTDFKAKNRLQEAINDSNKDFERFSTSIVASYEKLFNSNQDEANILSRFLNITDNPYQVTYGAVAIHSNVSFNLDTIKQVITKNHVACDKLKLLVIHSEKLMDFINALYLKASDV

SEQ ID NO: 54245 - protein, 527 aa, Streptococcus vestibularis ATCC 49124
MIEFGQRSLYYSKLVRSKAKMFEFAVPKESHIQISEEAQKSFLVALAIVADTARKYFEDYINHKQFSLQLKNQLQHAAEYFDALLASGLGNSAEYQDYIAILGTTAYYLGDYNGSSRVMINYISDDIQLLEDSMTLIKVFIDVIMDEPFLNHTPIEGKYSRELNTLVESYRNYILSKTEFSPDVFSDLQDIVYRTGSDFSVIIVNCLLAVVCKKINSSSTKLLPEFSDLDFSSWQDYIQTEGSIKELWPSQIELGRKGIFSGKSGIVQMPTSSGKTASINLILRSAFYSNRVYNALIVAPFRALCREIYRDINTHFVDENNVVVSEVFDLPEIPQDFSIFNDGKKRVFILTPEKLLFLLRNHQSFIDEIGLCIFDEAHLFDDPSRGTNFELLLSTVKQIFPKEIQKILISAVIPNSEDINRWFNEDGVIVSNNSIKTTEKRVAFSDLNGSNEQLYFVNPITFEEEFFVPRTISVSRLEQLGKERKQKVFPELTNKNDISIYYGIKLINNGGVGIFLRKKRHSQCCFT

SEQ ID NO: 54246 - protein, 269 aa, Enterococcus faecalis EnGen0311
MDIPKFIDYFIHEEIVITDKGKDISVIKIEINDDLTVFEQWARHLREHYCSLEELDELREGTGLSRAEFLRDMKFPNPNFGLGSATMSGDFSEILIADYIEYILNYIVPRVRYRQKFNRNTSTQGSDLIGYKVESIETNSINDEMLIVEVKARNSESNPEATLQNAVDHSAKDLVRIAESLNASYRMLKNYNEDEGMRLVRRFQNPTDRPHKRTFAAAAVSSDKAFSRELLKEIDTSEHPSPDVQLIAVHSPKFLEFIKQMYVRAANVN

SEQ ID NO: 54247 - protein, 1045 aa, Enterococcus faecalis EnGen0311
MLIENNSKYYLKKVQAKSKMFEYNVPLEEHIQVEYMAQELIVLAIATIGDASNFIWDNRYTEFSSKLNNELFENLNFTSIYFDSLLTSEIGEASYNDYFGLLGAISFYLSDALGSTKVMINKIDWAMDLEINEIDTFLLYLLADRLDELKGYEFSSQYGNLFYYLIYDLSQFYLDGTPIDFEKLNDLKQEIYLSQNPREILFGDSLLAVFIKKYKNSALNLLPNYSDTTIQDWEDLLLNNHTIKELWPSQILLGEKNIFKGKSGVIQMPTSSGKTTSIGLIIRSAFITHRTKLAVVVAPFKALCKEITLNLIEFFSNDEVIINELSDIAEKDDIAFFDNDIATNTLIILTPEKLLFLIRNNSEILEELNLIIFDEAHLFDDSSRGTNYELLVSTIRYYLNESSQKILISAVIANSEVINEWLNGTDGEVISNNNIISSQRSIAIGDWMGQTGQLYFLNQDNHDIDDFYVPRIVDIREINRLDRERAKRYFPDVDFRKRKLNKPYDMQIYYALKMVHTGATAIFSGTKKTADKTIERLLELEERGLDISAFSNEVSQNENTKIASLINMNLGSDTEYYISALKGIFIHHGNIPLGIRLSVEYAMSQNLINFVVCTSTLAQGVNLPIKYLIISSLYQGKSQMKVRDFHNLLGRVGRAGKHIEGTVILSEPFIHSNKSNWKWNRYKNMLDIDNSEDSESNLLKLVRPIIIDKFPPINLWNVLPQKYTNQEQFNDVINKIKTVISNSNFPNKISDFNFELKIILDILKDVENYVMYFVKYFKDSNPNFTNMVTQQTLGYHLASDSEKEKLVELFEVIKTYSLSFTEAELSLYSISSLGFDNSKVLSQWISEKIENITQARSEFELIDIIFPQLILFSENNIINRIDDTSIFTQICELWTQGQSYSDILNYCQSNQFQISKRNQLVPLILQDIIEICDNILAYSTILPLNGVATFMENSENDSTLHLIKSLQKKIRYGLPSNLSINIFELGFSDRVIAQILARIIENSSSFTITSISKRITKELLRQNKREIEEALKVFPQYFLDILRKI

SEQ ID NO: 54248 - protein, 269 aa, Enterococcus faecalis EnGen0370
MDIPKFIDYFIHEEIVITDKGKDISVIKIEINDDLTVFEQWARHLREHYCSLEELDELREGTGLSRAEFLRDMKFPNPNFGLGSATMSGDFSEILIADYIEYILNYIVPRVRYRQKFNRNTSTQGSDLIGYKVESIETNSINDEMLIVEVKARNSESNPEATLQNAVDHSAKDLVRIAESLNASYRMLKNYNEEEGMRLVRRFQNPTDRPHKRTFAAAAVSSDKAFSRELLKEIDTSEHPSPDVQLIAVHSPKFLEFIKQMYVRAANVN

SEQ ID NO: 54249 - protein, 1045 aa, Enterococcus faecalis EnGen0370
MLIENNSKYYLKKVQAKSKMFEYNVPLEEHIQVEYMAQELIVLAIATIGDASNFIWDNRYTEFSSKLNNELFENLNFTSIYFDSLLTSEIGEASYNDYFGLLGAISFYLSDALGSTKVMINKIDWAMDLEINEIDTFLLYLLADRLDELKGYEFSSQYGNLFYYLIYDLSQFYLDGTPIDFEKLNDLKQEIYLSQNPREILFGDSLLAVFIKKYKNSALNLLPNYSDTTIQDWEDLLLNNHTIKELWPSQILLGEKNIFKGKSGVIQMPTSSGKTTSIGLIIRSAFITHRTKLAVVVAPFKALCKEITLNLIEFFSNDEVIINELSDIAEKDDIAFFDNDIATNTLIILTPEKLLFLIRNNSEILEELNLIIFDEAHLFDDSSRGTNYELLVSTIRYYLNESSQKILISAVIANSEVINEWLNGTDGEVISNNNIISSQRSIAIGDWMGQTGQLYFLNQDNHDIDDFYVPRIVDIREINRLDRERAKRYFPDVDFRKRKLNKPYDMQIYYALKMVHNGATAIFSGTKKTADKTIERLLELEERGLDISAFSNEVSQNENTKIASLINMNLGSDTEYYISALKGIFIHHGNIPLGIRLSVEYAMSQNLINFVVCTSTLAQGVNLPIKYLIISSLYQGKSQMKVRDFHNLLGRVGRAGKHIEGTVILSEPFIHSNKSNWKWNRYKNMLDIDNSEDSESNLLKLVRPIIIDKFPPINLWNVLPQKYTNQEQFNDVINKIKTVISNSNFPNKISDFNFELKIILDILKDVENYVMYFVKYFKDSNPNFTNMVTQQTLGYHLASDSEKEKLVELFEVIKTYSLSFTEAELSLYSISSLGFDNSKVLSQWISEKIENITQARSEFELIDIIFPQLILFSENNIINRIDDTSIFTQICELWTQGQSYSDILNYCQSNQFQISKRNQLVPLILQDIIEICDNILAYSTILPLNGVATFMENSENDSTLHLIKSLQKKIRYGLPSNLSINIFELGFSDRVIAQILARIIENSSSFTITSISKRITKELLRQNKREIEEALKVFPQYFLDILRKI

SEQ ID NO: 54250 - protein, 269 aa, Enterococcus faecalis EnGen0359; identical to SEQ ID NO: 54248

SEQ ID NO: 54251 - protein, 1045 aa, Enterococcus faecalis EnGen0359; identical to SEQ ID NO: 54249

SEQ ID NO: 54252 - protein, 269 aa, Enterococcus faecalis EnGen0244; identical to SEQ ID NO: 54248

SEQ ID NO: 54253 - protein, 1045 aa, Enterococcus faecalis EnGen0244; identical to SEQ ID NO: 54249

SEQ ID NO: 54254 - protein, 269 aa, Enterococcus faecalis EnGen0245; identical to SEQ ID NO: 54248

SEQ ID NO: 54255 - protein, 1045 aa, Enterococcus faecalis EnGen0245; identical to SEQ ID NO: 54249

SEQ ID NO: 54256 - protein, 269 aa, Enterococcus faecalis EnGen0247; identical to SEQ ID NO: 54246

SEQ ID NO: 54257 - protein, 1045 aa, Enterococcus faecalis EnGen0247; identical to SEQ ID NO: 54247

SEQ ID NO: 54258 - protein, 269 aa, Enterococcus faecalis EnGen0251; identical to SEQ ID NO: 54246

SEQ ID NO: 54259 - protein, 1045 aa, Enterococcus faecalis EnGen0251; identical to SEQ ID NO: 54247

SEQ ID NO: 54260 - protein, 269 aa, Enterococcus faecalis EnGen0303; identical to SEQ ID NO: 54248

SEQ ID NO: 54261 - protein, 1045 aa, Enterococcus faecalis EnGen0303
MLIENNSKYYLKKVQAKSKMFEYNVPLEEHIQVEYMAQELIVLAIATIGDASNFIWDNRYTEFSSKLNNELFENLNFTSIYFDSLLTSEIGEASYNDYFGLLGAISFYLSDALGSTKVMINKIDWAMDLEINEIDTFLLYLLADRLDELKGYEFSSQYGNLFYYLIYDLSQFYLDGTPIDFEKLNDLKQEIYLSQNPREILFGDSLLAVFIKKYKNSALNLLPNYSDTTIQDWEDLLLNNHTIKELWPSQILLGEKNIFKGKSGVIQMPTSSGKTTSIGLIIRSAFITHRTKLAVVVAPFKALCKEITLNLIEFFSNDEVIINELSDIAEKDDIAFFDNDIATNTLIILTPEKLLFLIRNNSEILEELNLIIFDEAHLFDDSSRGTNYELLVSTIRYYLNESSQKILISAVIANSEVINEWLNGTDGEVISNNNIISSQRSIAIGDWMGQTGQLYFLNQDNPDIDDFYVPRIVDIREINRLDRERAKRYFPDVDFRKRKLNKPYDMQIYYALKMVHNGATAIFSGTKKTADKTIERLLELEERGLDISAFSNEVSQNENTKIASLINMNLGSDTEYYISALKGIFIHHGNIPLGIRLSVEYAMSQNLINFVVCTSTLAQGVNLPIKYLIISSLYQGKSQMKVRDFHNLLGRVGRAGKHIEGTVILSEPFIHSNKSNWKWNRYKNMLDIDNSEDSESNLLKLVRPIIIDKFPPINLWNVLPQKYTNQEQFNDVINKIKTVISNSNFPNKISDFNFELKIILDILKDVENYVMYFVKYFKDSNPNFTNMVTQQTLGYHLASDSEKEKLVELFEVIKTYSLSFTEAELSLYSISSLGFDNSKVLSQWISEKIENITQARSEFELIDIIFPQLILFSENNIINRIDDTSIFTQICELWTQGQNYSDILNYCQSNQFQISKRNQLVPLILQDIIEICDNILAYSTILPLNGVATFMENSENDSTLHLIKSLQKKIRYGLPSNLSINIFELGFSDRVIAQILARIIENSSSFTITSISKRITKELLRQNKREIEEALKVFPQYFLDILRKI

SEQ ID NO: 54262 - protein, 269 aa, Enterococcus faecalis EnGen0298; identical to SEQ ID NO: 54248

SEQ ID NO: 54263 - protein, 1045 aa, Enterococcus faecalis EnGen0298; identical to SEQ ID NO: 54249

SEQ ID NO: 54264 - protein, 269 aa, Enterococcus faecalis EnGen0311; identical to SEQ ID NO: 54246

SEQ ID NO: 54265 - protein, 1045 aa, Enterococcus faecalis EnGen0311; identical to SEQ ID NO: 54247

SEQ ID NO: 54266 - protein, 269 aa, Enterococcus faecalis EnGen0293; identical to SEQ ID NO: 54246

SEQ ID NO: 54267 - protein, 1045 aa, Enterococcus faecalis EnGen0293; identical to SEQ ID NO: 54247

SEQ ID NO: 54268 - protein, 272 aa, Enterococcus columbae DSM 7374 = ATCC 51263
MFFDNSKYFVFEKELYSSQGDKINIYKLANELLDDDSLNTWASSLRNNYCEEHLLDSLINGTGLSKEEYLKKMVFPNPSVSQGAATMSGEFGEILIFDYINFVLNYYVTRTRYLDKINPNMPVPGSDVMGYKIQDISKPSKSDQLIVAEVKTRSSINGKNLCEKTVSTAIDHSVKDRIRIGESLNAEKRRLLNRSKFIEAKVVERFQNKTDNPFVINFFAVAVLDSDVYSNQDVLSAIDSHHEIIGTTNILVIHSKELKHFLRDLYRRACIC

SEQ ID NO: 54269 - protein, 1031 aa, Enterococcus columbae DSM 7374 = ATCC 51263
MLIENTSKYFLKKIRAKAKMYEYGVPKDIHIKVEEQANDLILLCIGIVGDIADEICKMKELPINLSSENKDKLYFASKFFDSYFQSKMDLNMNPYHILMASVTYYFCNMNGSSKVMMTTMPKQSDFNFYASGLEKLIMWLLNDDIRFDINDIDAKYIDYARIIVDYHNSFFECKNPEEPNFEELRNFVYQIGNYREILFVDIILAIVKKKVYNSCINLMPLYSDINKEHWFETFKNNKMIKEMWPSQILLGEENIYSGKSGVIQMPTSSGKTTSVALTIQSAFLSGRTSIAIIVAPFRALCKEIMFDMEKFFEFDDSITITEFSDIPELNEMELATLESINKKVFVMTPEKLAYILKHNQKITESIGMIIFDEAHLFDDEKRGTDYELLLASINNYIKPNAQKLLISAVISNANQLNDWINNEGVVIRNNAIKASEKTVAFNKFTSFNSDTVYSNLYFVDLDKYLEEEFYVPRVVQILKLNKKGAERKNRYFPDFKNKQDVGIYYSIKLVTNGSVAIFCSKKDTVNKILLRFIDLKERGISFDNFNRVSNELECLKIANLIREHLGGNELYTAALNGIIGHHAGIPNGIRIAEEYALKKALVRCVVCTSTLAQGVNLPIKYLIVSSIYQSNHIIKVRDFHNLIGRTARAGKETEGTIILTEDVYKNEKKGYQFNNYKHLLNADNSEECSSNLLKLVRNIDLDNKRYISSDYIKKYITLRYSSYADFNNLRNKIFEFKEKEKKYGVAVFEKMNDIEHILVSLENFILDFLDAEDDSLEIIQSTYGYFLANEDEKKELKNIYDLIKSNINQLEVSDKLIYKKSMIGIMRMQKLSKFIDDNLYEIVNADFDILIKLISGRLKEIEDCKIIPKLFEKEYVYELLKMWLDGTSYLKIWEYATKVKLKVRRGKNSRGISLEDIVLLCDSDFGYSSLTIIQAIIEILNTKDCGENIQRELNEIIQRIRYGVPNKATAYIYELGFADRIISQKLFEVIKDFNCDNKKQVKNALKKNKEEIKKILNNYPSYYMNRLELIR

SEQ ID NO: 54270 - protein, 272 aa, Enterococcus columbae DSM 7374 = ATCC 51263; identical to SEQ ID NO: 54268

SEQ ID NO: 54271 - protein, 1031 aa, Enterococcus columbae DSM 7374 = ATCC 51263; identical to SEQ ID NO: 54269

SEQ ID NO: 54272 - protein, 264 aa, Lactococcus lactis subsp. cremoris
MYEKENDLKENQNPLLVSLDVFEEKTDSNVPHTVLLENGNNDVLIDHIVPLIKNHHIDPKTLLRHQELIKTFRISNLPLTSIRSPYPKSLTTQKGNFAEIFLAEYLTSTSSVELPLYRLRYNPNPDQSMKGDDVLLFDLDAEPVRIIVGESKFRGSPDKSAVIEMVEGLIRSNREGLPISLMFVSEMLIKEDKPEMAKKVQNCALLFATNKLIIEYVGLLMGNQNAKNPINKHTPNVLRNLLMISLGIKNPETIIKTSFERLED

SEQ ID NO: 54273 - protein, 1106 aa, Lactococcus lactis subsp. cremoris
MSLPTEYIRELLATISNDKIDNIITQTDARRILQEVKEEDRNYPNFDISLTDKATHIAYLLISCGCSLLEQEDIRSVEGLLILEKAGKILYDNFKFNLEETDTKNNNLLISGMTLYAAKQFSRSFIVLDNVNLEFPIGKMIILFLKKDFVSLSQMSSNIFFSYETEELDIQGFNTWLISHEIARCFLIICDFMYTGNNDNFMLINDILEKLEKISLESNLTLNWLIIRLLKIIFSTYQDVTFWSTLPPFLPLSSLTSNYIRLLCSLKAPITELWPSQTASLPLALGNNTGGVINLRTSGGKTRVAELAILKMVNENPTSKVLYLAPFRSLAFEIEQSLSKILEPLDITVSQLYGGSTANVSDFEIIGFSQVIIATPEKAKALIRSGTELENEIKLIIIDEGHLFGAEKRYIKNEIFFNHLQKISDLKGIRILLLSAVLPNAPELAQWLTKDSNLVAKSDWKPSLERLGLLIWDGNQVSLEWKSEGLPFNPSFIKKAPLGYGRRRNPFPNNKGEAVAATAIRLSKIGTVMIYSARANAIKGLAENVLRGLGQNPKDFPWDFDQWKIFENICKEELSDDDIVLEAATKGIICHSNRLPTQVRIAIEKLMRSKEPLIIIASSTLGQGVNIGISTVIVSSPYYSDKPINNRDFWNICGRAGRAFSDVEGKILYAIDTSNVRKEWQRKKDYHLAENYFNNQQMEKVQSGLLFLLNYFNSLSNHLGIDFSSLLEMLANDFIKSDIPNDTLNMINHYFDLIDDELLAMHENLGNDFNLDWIDDTFRNSLAIIQADRENEDLYISLLKSRTSALLTRIPDRTIRKKAIASGVPLSVARSLINDREYFRDLASNLIDSIQDDEINIELINIIVQNIELWSIQNASSVFENIPNQSVLNVIRRPWLSGMSLNKIRKIDADIDSIAKDYYGFNLPWIINGIAQIFDNETEQEINKLYSNLAILIELGLPDMTAVNIYLAGIRSRNVALELSNKEIFNSKNVSQIKKILTNFHNENIEITDEANLWVNTFSKNSDLLGKRAISFPTFKIKNGSYNGRLYIREANHKIFLTSVDGYYSNEVHSTSDLPFIKLVNRPYLYFESINNIWHLKSLNPQVQIK

SEQ ID NO: 54274 - protein, 264 aa, Lactococcus lactis subsp. lactis; identical to SEQ ID NO: 54272

SEQ ID NO: 54275 - protein, 1106 aa, Lactococcus lactis subsp. lactis
MSLPTEYIRELLATISNDKIDNIITQTDARRILQEVKEEDRNYPNFDISLTDKATHIAYLLISCGCSLLEQEDIRSVEGLLILEKAGKILYDNFKFNLEETDTKNNNLLISGMTLYAAKQFSRSFIVLDNVNLEFPIGKMIILFLKKDFVSLSQMSSNIFFSYETEELDIQGFNTWLISHEIARCFLIICDFMYTGNNDNFMLINDILEKLEKISLESNLTLNWLIIRLLKIIFSTYQDVTFWSTLPPFLPLSSLTSNYIRLLCSLKAPITELWPSQTASLPIALGNNTGGVINLRTSGGKTRVAELAILKMVNENPTSKVLYLAPFRSLAFEIEQSLSKILEPLDITVSQLYGGSTANVSDFEIIGFSQVIIATPEKAKALIRSGTELENEIRLIIIDEGHLFGAEKRYIKNEIFFNHLQKISDLKGIRILLLSAVLPNAPELAQWLTKDSNLVAKSDWKPSLERLGLLIWDGNQVSLEWKSEGLPFNPSFIKKAPLGYGRRRNPFPNNKGEAVAATAIRLSKIGTVMIYSARANAIKGLAENVLRGLGQNPKDFPWDFDQWKIFENICKEELSDDDIVLEAATKGIICHSNRLPTQVRIAIEKLMRSKEPLIIIASSTLGQGVNIGISTVIVSSPYYSDKPINNRDFWNICGRAGRAFSDVEGKILYAIDTSNVRKEWQRKKDYHLAENYFNNQQMEKVQSGLLFLLNYFNSLSNHLGIDFSSLLEMVANDFIKSDIPNDTLNMINHYFDLIDDELLAMHENLGNDFNLDWIDDTFRNSLAIIQADRENEDLYISLLKSRTSALLTRIPDRTIRKKAIASGVPLSVARSLINDREYFRDLASNLIDSIQDDEINIELINIIVQNIELWSIQNASSVFENIPNQSVLNVIRRPWLSGMSLNKIRKIDADIDSIAKDYYGFNLPWIINGIAQIFDNETEQEINKLYSNLAILIELGLPDMTAVNIYLAGIRSRNVALELSNKEIFNSKNVSQIKKILTNFHNENIEITDEANLWVNTFSKNSDLLGKRAISFPTFKIKNGSYNGRLYIREANHKIFLTSVDGYYSNEVHSTSDLPFIKLVNRPYLYFESINNIWHLKSLNPQVQIK

SEQ ID NO: 54276 - protein, 139 aa, Bacillus cereus 95/8201
MKGDDVLLVNPDKVLLGESKFRSTPNKRAVEEASELMKDKLTLPMSLGFIADRLFEQGKDELGEVIFDLQFKMSSIEIDIKNIGFLLSTKKVRSIVENNLSSPNSDFIFISLGMDDPAAFLKSVFDYAESNLLEGSYET

SEQ ID NO: 54277 - protein, 1082 aa, Bacillus cereus 95/8201
MENFPHYTVNLDEKCTHIAFSYLNCGWRFFLEKISDEATKCMEKASEILEYLYAYSDCEKLYKEYYRLVCSLAYYISAQYSKSFIILGKYNSDSYIGKITKLFLTRNFIELERQLEIKYLKNDEETSSENKDNIIYEKILSNAFLHIINFIRTGKMESLESSKDMVRDLITLADINNEPHMWWYFRLLYLVFEEYEDGSLWKVVPPLLDNDDISAKYIYANLYKKKPITEFFKSQRECLDGELLKNDGFVIGMPTSSGKTKVAEVTILKTLTKSPGALCIYIAPYRSLANEVEFSLSSMFEIMGYQVSQLYGGSQTSPLDRQLTKQANVIIVTPEKAKSMLRSNKDLKDRIQLVIIDEGHLVGFQPRYITGELLIEELKIVLKKNNGQLVLLSAVLPNISDFSLWIGEDDKAKRMSVWRPSSQRFGELSLARNTVNINWEGETPSYNKNFITPKLVKPERITKTGRKYAAKYFPADKKEGVAATATKMLDVGSVLIYVGRSNMVLSQARIVSKLFEEKGIEHEWRNKNDWLFVELACIEEYREDSEILSLLKQGIVPHSSKLPTEVRQSIEKLMANDNPKIIIATSTLGQGVNIGVSTVIVSNVRLDESNTVKVNDFWNIAGRAGRAFTDTEGKILYAIDRNKSQWSIYNQIQMKEMYFKYRNIEKATSGLYLLLRYLFILSEEFEIEYSLFLELLAENRESIDEQKAVEFFSEADQFLELLDDTLISMDIMNEANVLENSSSWIDDVFRSSLAFIQAKQDQSFSEEKMIEILKARNSGVIKLAGEETKWHSIASSSVPLRASLVIEHRIDELLKYVRKYIDSDKSFEELLSLVMELDIFIDSLPISKIEGIEIGANFSEIREGWFSGTSIHILEKRHENVRSICNEYYSFHFPWIVNAIAQKIKLIDCQEESKVLEQISLFAEIGLNNNKSVKIYLAGIKSRNCATELSEKIGMDNDLVTPVKELLLEFFNLCVVKKEDCSEICFNWLKLLNDEKEAKEYVKVKRRSFQFNIPFDLHDNLLYIKKVQSEIWLCSFDYKIKIPVLKEKALFNECSDIPDIFLRKEKGDVWILDSHNPYIIFY

SEQ ID NO: 54278 - protein, 271 aa, Bacillus cereus AH676
MTIQDDMVGKHPIENDFWKWLQHEDTEPSDLKRHRYLEVDSSNRDEAIKSVAAWLIKYHLSEGKKRVIRKKQEILEKHDFAEYAQSLHVFPKSDKTQKGNLGEIFLSEYLSQTSGVQILVYKLHYNPNIDQSMKGDDVLLVNPDKVLLGESKFRSTPNKRAVEEASELMKDKLTLPMSLGFIADRLFEQGKDELGEVIFDLQFKMSSIEIDIKNIGFLLSTKKVRSIVENNLSSPNSDFIFISLGMDDPAAFLKSVFDYAESNLLEGSYET

SEQ ID NO: 54279 - protein, 1082 aa, Bacillus cereus AH676
MENFPHYTVNLDEKCTHIAFSYLNCGWRFFLEKISDEATKCMEKASEILEYLYAYNDCEKLYKEYYRLVCSLAYYISAQYSKSFIILGKYNSDSYIGKITKLFLTRNFIELERQLEIKYLKNDEETSSENKDNIIYEKILSNAFLHIINFIRTGKMESLESSKDMVRDLITLADINNEPHMWWYFRLLYLVFEEYEDGSLWKVVPPLLDNDDISAKYIYANLYKKKPITEFFKSQRECLDGELLKNDGFVIGMPTSSGKTKVAEVTILKTLTKSPDALCIYIAPYRSLANEVEFSLSSMFEIMGYQVSQLYGGSQTSPLDRQLTKQANVIIVTPEKAKSMLRSNKDLKDRIQLVIIDEGHLVGFQPRYITGELLIEELKIVLKKNNGQLVLLSAVLPNISDFSLWIGEDDKAKRMSVWRPSSQRFGELSLVRNTVNINWEGETPSYNKNFITPKLVKPERITKTGRKYAAKYFPADKKEGVAATATKMLDVGSVLIYVGRSNMVLSQARIVSKLFEEKGIEHEWRNKNDWLFVELACIEEYGEDSEILSLLKQGIVPHSSKLPTEVRQSIEKLMANDNPKIIIATSTLGQGVNIGVSTVIVSNVYLDESNTVKVNDFWNIAGRAGRAFTDTEGKILYAIDRNKSQWSIYNQIQMKEMYFQYGNIEKATSGLYLLLRYLFILSERFEIEYSLFLELLAENRESIDEQKVMEFFSEADQFLELLDDTLISMDIMNEANVLENSSSWIDDVFRSSLAFIQAKQDQSFSEEKIIEILKARNSGVIKLAGEGTKWHSIASSSVPLRASLVIEHRIDELLKYIRKYIDSDRGFEDLLSLVMELDIFIDSLPISKIEGIEIGANFSKIREGWFSGTSIHILEKEHENARSICNEYYSFHFPWIVNAIAQKIKLINCQEESKVLEQISLFAEIGLNNNKSVKIYLAGIKSRNCATELSEKIGMDNDLVTPVKELLLEFFHLCVVDKEDCSEICFNWLKLLNDEKEAKEYVKVKRRSFQFNIPFDLHDNLLYIKKVQNEIWLCSFDYKIKIPVLKEKELFDECSDIPDIFLRKEKGDVWILDSHNPYIIFC

SEQ ID NO: 54280 - protein, 273 aa, Bacillus cereus VD022
MILTTQSHIRWFENTGQTIQTSEGENIEVLEFKHEHDEEILSSWAKHFREHYCLDSEIDFFKEGYNYTRAEFLNIIKFPDISRTPGPSIRAGDFGEILVADYLEFILNYWVPRTRYGTKVIGNESSKGCDTLAFKIISDGEYTPEDTLAIFETKTQFSGTRAKPRLQNAVDDSKKDVARKGESLNAIKQQLYLKNELEESKRINRFQNPTDHPYKEISGAVAMFSSSLLDFSTITNTSINEHPNKDNLTLLVIHGENMMTLVHELYRRAADEA

SEQ ID NO: 54281 - protein, 1050 aa, Bacillus cereus VD022
MKPERQSKKLLSATRSKAKMNEYNVEEVDHIKLTKDPATLFTLAIGLLGDLSAYINSENPDEHYLKELRDNLKFSAHFFDAYLHTNLMADLDEYVLLLGSASYYLCDLPGSSLVLVKRIEMNKLNLECSDLDTLLARLLIGNFTPCYVEESGTYAMNIIDISINLSIFYETGGNEQHIYKLISDLRGEAYKFGSPRELLFADVIGAVIRKRIENSSRKCLPKYSGISVGNWESILQNKNFIQEFWPAQHLLGETGVFKGESAVIQLPTSAGKTKATEVIIRSAFLSNRTSLAVIVAPFRALCHEISMSLSKSFQSDSINIDEVSDVLQMDFELKSILRDDFILVVTPEKLIYMLRQCPELATEIGLLIYDEGHQFDSNTRGINYELLLTALKGMVPEGVQKVLISAVINNAEVVGSWLNGPENKVVSGVNLSPTYRTVALTSWMDRLGKLQFLNEENPDELDFYVPRIIEQQKLQLKGRETTERFFPIKNDSSTVSLFLGLKLTSNGSVAIFCGKKDNVSSLCDKVVEAYERGLTLITPFELSEKNELRKLYSLYCLHLGSQASVTKGAELGILTHHGNIPSGIRHAVEHSIKEGLAKFVICTSTLAQGVNLPIRYLIVTSIYQGSEKIKVRDFQNLIGRVGRSGMHTEGSVIFADPNIYDKRNSYNNKWRWRQVKNLLDPNNSEPVESSLLKIFDPLCSDNKKNTHNINYIKLFEIYFEDSDKAYVGLEKIAKAFANEGFSIDGLNQQVESKINVLSSIESYLMANWEYATNEAGENWVSSLAKETLAYSLADDHIKEQIVILFQMLANNISNNIPEDSKKKSYGKLLYGVETAIKIEEWTKIHLDELVKCESYEELLNVLWPLLASNIKNKTFNKCEEPEILREVAIAWIHGRAYFILLDILKDKDIRMKTKKQRREYKIDHIVEICDNALSYEGMLLIGAVAELIESLITDQNIYLVENLKKLQKRMKYGVPNSLNILFYELGFADRIISRDLSGVLRDQSPPTNKRKLKSLIQSYEKDFRKQLIKYPSYYTSVLENILLSSDNRIV

SEQ ID NO: 54282 - protein, 273 aa, Bacillus cereus TIAC219; identical to SEQ ID NO: 54280

SEQ ID NO: 54283 - protein, 1050 aa, Bacillus cereus TIAC219; identical to SEQ ID NO: 54281

SEQ ID NO: 54284 - protein, 280 aa, Bacillus cereus MC118
MSESISIQCRLIGEHPNKSLFSEWLSYEDLPSSENKIHRKLGEIEGMRQYAIEQVADWIIKHHIPDTTINRLKRKREMIIKKYGLDEYLNQQQMLPVADKTMRGNGAEIIFAEYLQASTPLQILLYKLRYNPNVSQSIKGDDVLLFNKENLHERVLLGESKFRKIPNKAVIEEITDEFGKKLKLPLSILFVANRLSELGEEEMADELEELNIDVKRGKVPVTNIGFLLSNHNTASNVERHLFSENPDFIFLSLGLEQPDEFISQCFALANEKLKRGIQDE

SEQ ID NO: 54285 - protein, 1110 aa, Bacillus cereus MC118
MNNEKATSLLERLENDSLIQNLIAQSDSRYILFNVQEPVGNFPNYTSGLDEKLTSSAMSYLSIGCTLAENGSKGQSIFPLEKGAAILENIYSPIANRNEYSSYFILTSSLAFYAANQYSKSFIIMKNTQFDTVIAELISNFLRRQYGELDKLLSEIFLSNDYGGTSIAESDEEVANNKIYVLILSKSLSSLLEFIYSGSDEWLSKAKDYLSDLLELLAIDAEPSLWWVVRLFILIVDGFQENSLWKAIPPNISDADGVVSNYIETLAFQKSPVVELFYSQKIALPKVLDRKGAVVSIPTSAGKTRIAELSMLDCLVKDCDSKILYLAPFRSLAFEVEESISKIFDPLGFEVSHLYGGTQFSKLDEMVINESSIIIATAEKAKAILRSNSEIKTKIKLIIIDEGHLIGPEERYVLSEMLIEELRLYTEKNDGKMILLSAVLPNSAEIANWISGNEEMEVKSNWRPSTQRFGLLEYSGNNVNITWKGELESFNRNFISPFTVRRPRSEYIFPRNKKQAIAATALKLSYSGSVLIFVCKKNMVLSQAKEVFEAMGENKEEHIWSNQNDWSVFKLACDEAYGEESVVYQYAKYGVLCHHSGLPTEVRLSIEKLMRKGNPKIIVATSTLGQGVNIGVSTVIMANVWYDKENKISVNDFWNIVGRAGRSFVDREGKILFVVDSSQSVWKASRDRRLALEYFENSNQDEAISGLLYIVDYVYRIAKASNVNFDTLLQMIAENDYSSIEQKYTEGLITLFDLIDDTLLSLNLELESYKDENASAWIDDYFRYSLAYIQARHFEQFDGEDVISFLKARNKGVLKLAGESSTWKGLVSSSIPLRSGLFIKNELSLILEIVNRYQSSNKSSEDFFSFLKETEIIVSRFPSQQFVFTEISDDIRELWIKGQSISSLDEGTLKTCNHYFGFILPWGISAIARMLSTLDLENEAKEYENLTVLVQMGLPNIFAAKIYLAGIQSRLAATELSNVLDPSIQELSIKRLRGEITKSFDELVDITENTLKWVSLLKSLETNNSGYFVELSNFTFEGDVTIKSNILNAKQYQEGTFLCSPDYDEKVKVEVNDKFPFDKYANDFGVYFSFNNSEWSLKARNPYIKFNPFT

SEQ ID NO: 54286 - protein, 271 aa, Bacillus cereus VD140; identical to SEQ ID NO: 54278

SEQ ID NO: 54287 - protein, 1120 aa, Bacillus cereus VD140
MKLETAYNYFEKLEKDERLQNYISQANSRYILYIANEPLENFPHYTVNLDEKCTHIAFSYLNCGWRFFLEKISDEATKCMEKASEILEYLYAYNDCEKLYKEYYRLVCSLAYYISAQYSKSFIILGKYNSDSYIGKITKLFLTRNFIELERQLEIKYLKNDEETSSENKDNIIYEKILSNAFLHIINFIRTGKMESLESSKDMVRDLITLADINNEPHMWWYFRLLYLVFEEYEDGSLWKVVPPLLDNDDISAKYIYANLYKKKPITEFFKSQRECLDGELLKNDGFVIGMPTSSGKTKVAEVTILKTLTKSPDALCIYIAPYRSLANEVEFSLSSMFEIMGYQVSQLYGGSQTSPLDRQLTKQANVIIVTPEKAKSMLRSNKDLKDRIQLVIIDEGHLVGFQPRYITGELLIEELKIVLKKNNGQLVLLSAVLPNISDFSLWIGEDDKAKRMSVWRPSSQRFGELSLVRNTVNINWEGETPSYNKNFITPKLVKPERITKTGRKYAAKYFPADKKEGVAATATKMLDVGSVLIYVGRSNMVLSQARIVSKLFEEKGIEHEWRNKNDWLFVELACIEEYGEDSEILSLLKQGIVPHSSKLPTEVRQSIEKLMANDNPKIIIATSTLGQGVNIGVSTVIVSNVYLDESNTVKVNDFWNIAGRAGRAFTDTEGKILYAIDRNKSQWSIYNQIQMKEMYFQYGNIEKATSGLYLLLRYLFILSERFEIEYSLFLELLAENRESIDEQKVMEFFSEADQFLELLDDTLISMDIMNEANVLENSSSWIDDVFRSSLAFIQAKQDQSFSEEKIIEILKARNSGVIKLAGEGTKWHSIASSSVPLRASLVIEHRIDELLKYIRKYIDSDRGFEDLLSLVMELDIFIDSLPISKIEGIEIGANFSKIREGWFSGTSIHILEKEHENARSICNEYYSFHFPWIVNAIAQKIKLINCQEESKVLEQISLFAEIGLNNNKSVKIYLAGIKSRNCATELSEKIGMDNDLVTPVKELLLEFFHLCVVDKEDCSEICFNWLKLLNDEKEAKEYVKVKRRSFQFNIPFDLHDNLLYIKKVQNEIWLCSFDYKIKIPVLKEKELFDECSDIPDIFLRKEKGDVWILDSHNPYIIFC

SEQ ID NO: 54288 - protein, 271 aa, Bacillus cereus
MTIQDDMVGKHPIENDFWKWLQHEDTESSDLKRHRYLEVDSSNRDEAIKSVAAWLIKYHLSEGKKRVIRKKQEILEKHDFAEYAQSLHVFPKSDKTQKGNLGEIFLSEYLSQTSGVQILVYKLHYNPNIDQSMKGDDVLLVNPDKVLLGESKFRSTPNKRAVEEASELMKDKLTLPMSLGFIADRLFEQGKDELGEVIFDLQFKMSSIEIDIKNIGFLLSTKKVRSIVENNLSSPNSDFIFISLGMDDPAAFLKSVFDYAESNLLEGSYET

SEQ ID NO: 54289 - protein, 1082 aa, Bacillus cereus
MENFPHYTVNLDEKCTHIAFSYLNCGWRFFLEKISDEATKCMEKASEILEYLYAYSDCEKLYKEYYRLVCSLAYYISAQYSKSFIILGKYNSDSYIGKITKLFLTRNFIELERQLEIKYLKNDEETSSENKDNIIYEKILSNAFLHIINFIRTGKMESLESSKDMVRDLITLADINNEPHMWWYFRLLYLVFEEYEDGSLWKVLPPLLDNDDISAKYIYANLYKKKPITEFFKSQRECLDGELLKNDGFVIGMPTSSGKTKVAEVTILKTLTKSPGALCIYIAPYRSLANEVEFSLSSMFEIMGYQVSQLYGGSQTSPLDRQLTKQANVIIVTPEKAKSMLRSNKDLKDRIQLVIIDEGHLVGFQPRYITGELLIEELKIVLKKNNGQLVLLSAVLPNISDFSLWIGEDDKAKRMSVWRPSSQRFGELSLARNTVNINWEGETPSYNKNFITPKLVKPERITKTGRKYAAKYFPADKKEGVAATATKMLDVGSVLIYVGRSNMVLSQARIVSKLFEEKGIEHEWRNKNDWLFVELACIEEYGEDSEILSLLKQGIVPHSSKLPTEVRQSIEKLMANDNPKIIIATSTLGQGVNIGVSTVIVSNVRLDESNTVKVNDFWNIAGRAGRAFTDTEGKILYAIDRNKSQWSIYNQIQMKEMYFKYRNIEKATSGLYLLLRYLFILSEEFEIEYSLFLELLAENRESIDEQKAVEFFSEADQFLELLDDTLISMDIMNEANVLENSSSWIDDVFRSSLAFIQAKQDQSFSEEKMIEILKARNSGVIKLAGEETKWHSIASSSVPLRASLVIEHRIDELLKYVRKYIDSDKSFEELLSLVMELDIFIDSLPISKIEGIEIGANFSEIREGWFSGTSIHILEKRHENVRSICNEYYSFHFPWIVNAIAQKIKLIDCQEESKVLEQISLFAEIGLNNNKSVKIYLAGIKSRNCATELSEKIGMDNDLVTPVKELLLEFFNLCVVKKEDCLEICFNWLKLLNDEKEAKEYVKVKRRSFQFNIPFDLHDNLLYIKKVQSEIWLCSFDYKIKIPVLKEKALFNECSDIPDIFLRKEKGDVWILDSHNPYIIFY

SEQ ID NO: 54290 - protein, 271 aa, Bacillus cereus; identical to SEQ ID NO: 54288

SEQ ID NO: 54291 - protein, 1082 aa, Bacillus cereus; identical to SEQ ID NO: 54277

SEQ ID NO: 54292 - protein, 271 aa, Bacillus cereus; identical to SEQ ID NO: 54288

SEQ ID NO: 54293 - protein, 1082 aa, Bacillus cereus; identical to SEQ ID NO: 54277

SEQ ID NO: 54294 - protein, 271 aa, Bacillus cereus; identical to SEQ ID NO: 54288

SEQ ID NO: 54295 - protein, 1120 aa, Bacillus cereus
MKLETAYNYFEKLEKDERLQNYISQANSRYILYIANEPLENFPHYTVNLDEKCTHIAFSYLNCGWRFFLEKISDEATKCMEKASEILEYLYAYSDCEKLYKEYYRLVCSLAYYISAQYSKSFIILGKYNSDSYIGKITKLFLTRNFIELERQLEIKYLKNDEETSSENKDNIIYEKILSNAFLHIINFIRTGKMESLESSKDMVRDLITLADINNEPHMWWYFRLLYLVFEEYEDGSLWKVVPPLLDNDDISAKYIYANLYKKKPITEFFKSQRECLDGELLKNDGFVIGMPTSSGKTKVAEVTILKTLTKSPGALCIYIAPYRSLANEVEFSLSSMFEIMGYQVSQLYGGSQTSPLDRQLTKQANVIIVTPEKAKSMLRSNKDLKDRIQLVIIDEGHLVGFQPRYITGELLIEELKIVLKKNNGQLVLLSAVLPNISDFSLWIGEDDKAKRMSVWRPSSQRFGELSLARNTVNINWEGETPSYNKNFITPKLVKPERITKTGRKYAAKYFPADKKEGVAATATKMLDVGSVLIYVGRSNMVLSQARIVSKLFEEKGIEHEWRNKNDWLFVELACIEEYGEDSEILSLLKQGIVPHSSKLPTEVRQSIEKLMANDNPKIIIATSTLGQGVNIGVSTVIVSNVRLDESNTVKVNDFWNIAGRAGRAFTDTEGKILYAIDRNKSQWSIYNQIQMKEMYFKYRNIEKATSGLYLLLRYLFILSEEFEIEYSLFLELLAENRESIDEQKAVEFFSEADQFLELLDDTLISMDIMNEANVLENSSSWIDDVFRSSLAFIQAKQDQSFSEEKMIEILKARNSGVIKLAGEETKWHSIASSSVPLRASLVIEHRIDELLKYVRKYIDSDKSFEELLSLVMELDIFIDSLPISKIEGIEIGANFSEIREGWFSGTSIHILEKRHENVRSICNEYYSFHFPWIVNAIAQKIKLIDCQEESKVLEQISLFAEIGLNNNKSVKIYLAGIKSRNCATELSEKIGMDNDLVTPVKELLLEFFNLCVVKKEDCSEICFNWLKLLNDEKEAKEYVKVKRRSFQFNIPFDLHDNLLYIKKVQSEIWLCSFDYKIKIPVLKEKALFNECSDIPDIFLRKEKGDVWILDSHNPYIIFY

SEQ ID NO: 54296 - protein, 273 aa, Bacillus cereus
MILTTQSHIRWFENTGQTIQTSEGKNIEVLEFKHEHDEEILSSWAKHFREHYCLDSEIDFFREGYNYTRAEYLNIIKFPDISRTPGPSIRAGDFGEILVADYLEFILNYWVPRTRYGTKVIGNESSKGCDTLAFKIISDGEYTPEDTLAIFETKTQFSGTRANPRLQNAVDDSKKDVARKGESLNAIKQQLYLKNELEESKRINRFQNPTDHPYKEISGAVAMFSSSLLDSSTITNTSINEHPNKDNLTLLVIHGENMMTLVHELYRRAADEA

SEQ ID NO: 54297 - protein, 1050 aa, Bacillus cereus
MKPERQSKKLLSATRSKAKMNEYNVEEVDHIKLTKDPATLFTLAIGLLGDLSAYINSENPDEHYLKELRDNLKFSAHFFDAYLHTNLMADLDEYVLLLGSASYYLCDLPGSSLVLVKRIEMNKLNLECSDLDTLLARLLIGNFTPCYVEESGTYAMNIIDISINLSIFYETGGNEQHIYKLISDLRGEAYKFGSPRELLFADVIGAVIRKRIENSSRKCLPKYSGISVENWEAILQNKNFIQEFWPAQHLLGETGVFKGESAVIQLPTSAGKTKATEVIIRSAFLSNRTSLAVIVAPFRALCHEISMSLSKSFQSDSINIDEVSDVLQMDFELKSILRDDFILVVTPEKLIYMLRQCPELATEIGLLIYDEGHQFDSNTRGINYELLLTALKGMVPEGVQKVLISAVINNAEVVGSWLNGPENKVVSGVNLSPTYRTVALTSWMDRLGKLQFLNEENPDELDFYVPRIIEQQKLQLKGRETTERFFPIKNDSSTVSLFLGLKLTSNGSVAIFCGKKDNVSSLCDKVVEAYERGLTLITPFELSEKNELRKLYNLYCLHLGSQASVTKGAEIGILTHHGNIPSGIRHAVEHSIKEGLAKFVICTSTLAQGVNLPIRYLIVTSIYQGSEKIKVRDFQNLIGRVGRSGMHTEGSVIFADPNIYDKRNSYNNKWRWRQVKNLLDPNNSEPVESSLLKIFDPLCSDDKKNTHNINYIKLFEIYFEDSDKVYMGLEKIAKAFANEGFSIDGLNQQVESKINVLSSIESYLMANWEYATNEAGENWVSSLAKETLAYSLADDHIKEQIVILFQMLANNISNNIPEDSKKKSYGKLLYGVETAKKIEEWTKMHLDELVNCESYEELLNVLWPLLASNIKNKTFNKCEKPEILREVAIAWIDGRAYFILLDILKDKDIRMKTKKQRREYRIDHIVEICDNALSYEGMLLIGAVAELVESLITDQNIYLVENLKKLQKRMKYGVPNSLNILFYELGFADRIISRDLSEVLRDQSPPTNKRKLKSLIQSYEKDFRKQLIKYPSYYTSVLENILLSSDNRIV

SEQ ID NO: 54298 - protein, 271 aa, Bacillus cereus; identical to SEQ ID NO: 54278

SEQ ID NO: 54299 - protein, 1120 aa, Bacillus cereus; identical to SEQ ID NO: 54287

SEQ ID NO: 54300 - protein, 271 aa, Bacillus cereus; identical to SEQ ID NO: 54288

SEQ ID NO: 54301 - protein, 1120 aa, Bacillus cereus; identical to SEQ ID NO: 54295

SEQ ID NO: 54302 - protein, 271 aa, Bacillus cereus; identical to SEQ ID NO: 54288

SEQ ID NO: 54303 - protein, 1082 aa, Bacillus cereus; identical to SEQ ID NO: 54277

SEQ ID NO: 54304 - protein, 271 aa, Bacillus cereus; identical to SEQ ID NO: 54288

SEQ ID NO: 54305 - protein, 1082 aa, Bacillus cereus
MENFPHYTVNLDEKCTHIAFSYLNCGWRFFLEKISDEATKCMEKASEILEYLYAYSDCEKLYKEYYRLVCSLAYYISAQYSKSFIILGKYNSDSYIGKITKLFLTRNFIELERQLEIKYLKNDEETSSENKDNIIYEKILSNAFLHIINFIRTGKMESLESSKDMVRDLITLADINNEPHMWWYFRLLYLVFEEYEDGSLWKVVPPLLDNDDISAKYIYANLYKKKPITEFFKSQRECLDGELLKNDGFVIGMPTSSGKTKVAEVTILKTLTKSPGALCIYIAPYRSLANEVEFSLSSMFEIMGYQVSQLYGGSQTSPLDRQLTKQANVIIVTPEKAKSMLRSNKDLKDRIQLVIIDEGHLVGFQPRYITGELLIEELKIVLKKNNGQLVLLSAVLPNISDFSLWIGEDDKAKRMSVWRPSSQRFGELSLARNTVNINWEGETPSYNKNFITPKLVKPERITKTGRKYAAKYFPADKKEGVAATATKMLDVGSVLIYVGRSNMVLSQARIVSKLFEEKGIEHEWRNKNDWLFVELACIEEYGEDSEILSLLKQGIVPHSSKLPTEVRQSIEKLMANDNPKIIIATSTLGQGVNIGVSTVIVSNVRLDESNTVKVNDFWNIAGRAGRAFTDTEGKILYAIDRNKSQWSIYNQIQMKEMYFKYRNIEKATSGLYLLLRYLFILSEEFEIEYSLFLELLAENRESIDEQKAVEFFSEADQFLELLDDTLISMDIMNEANVLENSSSWIDDVFRSSLAFIQAKQDQSFSEEKMIEILKARNSGVIKLAGEETKWHSIASSSVPLRASLVIEHRIDELLKYVRKYIDSDKSFEELLSLVMELDIFIDSLPISKIEGIEIGANFSEIREGWFSGTSIHILEKRHENVRSICNEYYSFHFPWIVNAIAQKIKLIDCQEESKVLEQISLFAEIGLNNNKSVKIYLAGIKSRNCATELSEKIGMDNDLVTPVKELLLEFFNLCVVKKEDCSEICFNWLKLLNDEKEAKEYVKVKRRSFQFNIPFDLHDNLLYIKKVQSEIWLCSFDYKIKIPVLKEKALFNECSDIPDIFLRKEKGDVWILDSHNPYIIFY

SEQ ID NO: 54306 - protein, 271 aa, Bacillus cereus; identical to SEQ ID NO: 54288

SEQ ID NO: 54307 - protein, 1082 aa, Bacillus cereus; identical to SEQ ID NO: 54305

SEQ ID NO: 54308 - protein, 273 aa, Bacillus thuringiensis serovar morrisoni
MILTTQSHIRWFENTGQTIQTSEGENIEVLEFKHEHDEEILSSWAKHFREHYCLDSEIDFFKEGYNYTRAEFLNIIKFPDISRTPGPSIRAGDFGEILVADYLEFILNYWVPRTRYGTKVIGNESSKGCDTLAFKIISDGEYTPEDTLAIFETKTQFSGTRAKPRLQNAVDDSKKDVARKGESLNAIKQQLYLKNELEESKRINRFQNPTDHPYKEISGAVAMFSSSLMDFSTITNTSINEHPNKDNLTLLVIHGENMMTLVHELYRRAADEA

SEQ ID NO: 54309 - protein, 1050 aa, Bacillus thuringiensis serovar morrisoni
MKPERQSKKLLSATRSKAKMNEYNVEEVDHIKLTKDPATLFTLAIGLLGDLSAYINSENPDEHYLKELRDNLKFSAHFFDAYLHTNLMADLDEYVLLLGSASYYLCDLPGSSLVLVKRIEMNKLNLECSDLDTLLARLLIGNFTPCYVEESGTYAMNIIDISINLSIFYETGGNEQHIYKLISDLRGEAYKFGSPRELLFADVIGAVIRKRIENSSRKCLPKYSGISVGNWESILQNKNFIQEFWPAQHLLGETGVFKGESAVIQLPTSAGKTKATEVIIRSAFLSNRTSLAVIVAPFRALCHEISMSLSKSFQSDSINIDEVSDVLQMDFELKSILRDDFILVVTPEKLIYMLRQCPELATEIGLLIYDEGHQFDSNTRGINYELLLTALKGMVPEGGQKVLISAVINNAEVVGSWLNGPENKVVSGVNLSPTYRTVALTSWMDRLGKLQFLNEENPDELDFYVPRIIEQQKLQLKGRETTERFFPIKNDSSTVSLFLGLKLTSNGSVAIFCGKKDNVSSLCDKVVEAYERGLTLITPFELSEKNELRKLYSLYCLHLGSQASVTKGAELGILTHHGNIPSGIRHAVEHSIKEGLAKFVICTSTLAQGVNLPIRYLIVTSIYQGSEKIKVRDFQNLIGRVGRSGMHTEGSVIFADPNIYDKRNSYNNKWRWRQVKDLLDPNNSEPVESSLLKIFDPLCSDDKKNTHNINYIKLFEIYFEDSDKAYVGLEKIAKAFANEGFSIDGLNQQVESKINVLSSIESYLMANWEYATNEAGENWVSSLAKETLAYSLADDHIKEQIVILFQMLANNISNNIPEDSKKKSYGKLLYGVETAIKIEEWTKMHLDELVKCESYEELLNVLWPLLASNIKNKTFNKCEEPEILREVAIAWIHGRAYFILLDILKDKDIRMKTKKQRREYKIDHIVEICDNALSYEGMLLIGAVAELVESLITDQNIYLVENLKKLQKRMKYGVPNSLNILFYELGFADRIISRDLSGVLRDQSPPTNKRKLKSLIQSYEKDFRKQLIKYPSYYTSVLENILLSSDNRIV

SEQ ID NO: 54310 - protein, 324 aa, Bacillus smithii 7_3_47FAA
MINISQFLCHFSSETKDQFIILELNEEKELFEKLPDYYRKCYITDSDLEERIKNFGPAEKILEKLIPDPGKTMSGEFAEILSYQLLIDMYRDFNLFGPKKWLWKVDRNEPMKKTDVVLFGVKNAEESSPDDLVVSAEIKSKATEGDFHPLQDAIDGAKDDYVKRMAITLSWLEEQYIRLNDSSALNSIKRFVNAIEPSYGPYKKHYKAITVIDSDMVLRELGREIDFSVKVLKKDWKRIKKDCEELGASYDNDTKRLSFKNVKRKDILRSNSRNKDYILYLYDLYNFKLGDYSDVTIVSIENLKNFYEKVYKNIVTSYKVIANE

SEQ ID NO: 54311 - protein, 990 aa, Bacillus smithii 7_3_47FAA
MSNILVDWIRDSNSWRNAMELDVLERQEKEYLFLKQSDDFYISLFNKVYKALSSGSYLTEENQQELLFIAKGLEMYSVQSTRENFFGVNYAENILYASSIYYLTDYFTTSSILARMFQTEDYESEIDQFIHAFLINNRDIRNPYMDILNDFLESGDKQILIYIIKLIDERLKTSDPYKYVQLLLAKKLIEKFSENNIWNSLTRANPAINWKDFILHKLESSWALFPSQEAALKKGILIKDNSFSIQMPTSSGKTSLCEMVIYNEIVYKRRKVLLLAPYRALASELKYSFTKKFRNLGITVKTIYGGYTPSREEKAELDNVDLLICTPEKFMAIENHIPNLHEEFSTVICDEGHLLDDVHRGLNYELLLAKFKNSSTKEKKYIYLSAIIPNIETINSWLGGDENTLIKSNYRPTDLKYGFLIEKGDNKNKYFDLEIYSKKSEFEKYSINKFLSVKEDYKYTKSSTGKINTYNYKTYKTRAISVALRSLKNGVVAVFTPQKGENGVKGLAEELINQIKLLNFPKPLDFSKTEEVENLIIYFERVFGKDYILTKSVKNGFVIHHGDLPQFVREVIENSIRQKIIPLIVCTNTLAEGVNLPIKTLVLHTIKRFNFSLKIMEPIWKRDIKNIIGRAGRAGQEMEGLVITVNPSEHSYIQEVISNEKIEPVRGYLYQIINEITNELKEDRLLITNELINEQSEEFKRLIDSIDKSIIDSLYEESISDDISKILENLINKTYSYFQSDDNNKLTLEHIFKLRGEVLNPYLKRNEIGILKQSDSTVRIYENIKRVINLGDDFWQNTTLPFTDETIDYLLDIIFSLNHLEFDFERFHEENDINLTKKLLKKVILNWIEGKWYGEISDKTKVEVEDVLKIILFIESNIVPILSKIIAIAKIEMQKQGINISKDLEDIGLFIQHGINSRIYLILIELGFFERMAILSVGNWINDNFSTLNLNEKDVIEMILRENKIEIIEFLKETVPRISLNAFSSNLRNI

SEQ ID NO: 54312 - protein, 282 aa, Lactobacillus brevis
MKNIPVYMDCFYETTHMRSIDNHDIELVKIKVPFDNDDVVKEWASSFRKKFISNVDLNDMIVATQAASPYKFLTDYIYPDKVSGNIVRIGDFGEILVADYLMFIRNYWIPSLLTRYSQKQNKDKSTMGTDIFAIKLADKSISNNPKDELCICEVKTGFSDKAKKRLTDAVLDVNKDNVEIADRRASVSLAATMLTLKRRSDISPSYIDQIRRFQNPLDNPFKESYLAAAVIDETQIRRKSLEAVPTVDSPHKENLKLITFHGEDLKKLMDALYGEFGVSDLE

SEQ ID NO: 54313 - protein, 1005 aa, Lactobacillus brevis
MILSKNEDVLRRIWARKKELELSTHRELYKQEDNWSKLLYYTFAALSNYLMNIENNHFSRDLQFSAKYFELLPTINDDSNLLAGDNELMLFGSAAYFFADYPGAANVALKPIDVGSLSFYEKVLYAVILNDGTFPEKTFGKVPTMMNNILLGDFSEDSLRRTLSEKLMRNSIDKLTDSAYKDGIDENILAAECVSAVVLLKIKHSTLRIMSEVSGGTDDYWKQVIQDKKVERTLWASQRALGEHGVFSGRSAVVQMPTGAGKTASISLILRSALSKEKLRIAIIVAPFKSIRDEIYQKQVQNFQGESIQVNRLSTDLKMDFGFIFHHEKPRVLIVTPEKLLFMIRHSNDLLFQTDLIVFDEAHQLDNSERGITFELLLVTIRQIVPEKVQKIFISAVVGNPETISEWFNAGNNVEITGVPEKRYSNAYGWAVWNKKTNSGDLFFKINVGNDDRWTPYSNVVNPVKVKRILEPNFSRKSPVKAYKWVTILYAIHFMSNGMVAVFSPRKDTISGIAAEFTKYAKLNDSFSSILNVNEDTKAIASLFSHNFGNNSKLVKAFQSGIFVHDGEIPNSIRNSIEFAAQRGKIKLLLCTNTLAQGVNLPIKTMLVTSVGQGSLKLKNRDLRNLIGRVGRSGIENEGNIIFVQGSDFANKNTGNAIRQLVENIPPENLGSSLLNLFQPTPVDPYNMQTELITSDQWFTADFLENPEEWVSNHISTDDLARAEVYRKKGEAVSKIEGFLMSLWDFIQMGNPTDNLRLIAESTYAYHISDSEDSRRDIENLFYFLYRKIVRLVTESDLTIYTKMLTGINESALMKNWVLENEPLIVNTNSLGQIISDLWPLLKHDLNPKEMEHDNLFQKLLEGWVMGTSYGDLLDVWKSFEGVKIKNKNPNVETVYNICDRLFQFNMAERVSAIAELIEDDVKKKRLYLLHTAIKSGLPTLTENAIYSIGLNDRYLSSQIALLTGDTSLTKGQVKDWISHHKNEIKQRENESLTRFFLKVLDEIV

SEQ ID NO: 54314 - protein, 286 aa, Lactobacillus brevis
MNIPEYMSSYAHFGSIQNIEEKNIEVIAVQAQFDNIELITDWAKSFRHKYISDEDLLEGMEDIGENEPIDFLKEMIYPENKKFKSGDFGEILVAEYLMYTENFWVPTLSLRYSEKSNKEESTKGSDIIAIRFDQDPAHESVYDLLCIGEVKTGSTSTSTIRGRLQDAINGSNKDSIQLLNAKRGSVGLNAVKLKIKHREPKENQGEYSYREIARFENPIERPYQTQYVAAAVVDQKHINQNTVKKVVTKESQHVDSLRMIAVGVSDIQKLIDALYSELGVSNLDNE

SEQ ID NO: 54315 - protein, 998 aa, Lactobacillus brevis
MTTNNEVLRDIWVRLKEQEFASSSDLTSNREMWNKLLYYALSSVTDYLCEDNLAVNQQLRSQLEFAGKFFETLPQINLDVNKLFGDEELILFSATAYSFAGYPGASAVVLKGLTGDKLSLTERVLAEVIRYGDANFPWENSQIGLTTSLVFSGHEDISILYKQVDSLIEDAYRRDDDMDIIAAECVKKTIRQCWENATIKLMPNFSDTDQQKWISSLTTEKLHPVLWSAQQELGKHNVFRGNSAVVQLPTGSGKTASFSLILRASLYRDSFHVAIIVAPFKSIRDEIYWDLKLQFHGEEVDINRISTELKVDFSDFSLIERPAIIIVTPEKLLFMIRHNPNFLDETGLFIFDEAHQLDNSERGITFELLLSTINFLVADEIQKVFVSAVIGNPDEVSGWFNSGNNDIVSELQPRKFEKVLGYSYWNNETNHGELLIWNKLQETEPLVKFPYFFDPIKIRKNKTQPDFTIKNHTAGIRWATALTTRRFMRGGMVAVYAPRKDTIKGLAKVFMELQKAAPISINDSESIAALCNLFELNFGKNSVLVKAYQSRIFIHDGNIPDGIRSSLEFEAQKGNIPLLLCTNTLAQGVNLPIKTIIITSVGNGDLELNNRDTINLVGRVGRAGVINEGNIIFMQNINPNSDKRARTALNDLVNETPADPIGSSLASLFMRTAVDSYDNATEYIQASDWCTAEFLNDPLKWISNLVEDVSPKQAKAYSHVFLEKANGVWKIENYLMSIWDVIQEGDQEANIEKVIRKMFASTRIQDDEFDLMVWTFKYLGEKISSLAVGGYDILVMSKMMVGINEALNVESFVDSNGESIIESDDLEQIIIDIWPILRTSVSVKNQSEENLYSFLLIEWIKGKSYIEILESWKLEYPEVGLSNRKLEVERVYIICSQVFQYDMQLKLTALMEVITDPVKHARLEKLQIAMKTGLPRKTEQLMYGIGISDRVLARLLCEEMGVDTADHKEVLHWLRMNKKQIIEKFGSMIPEYFRSRMW

SEQ ID NO: 54316 - protein, 227 aa, Lactobacillus brevis
MEDIGENEPIDFLKEMIYPENKKFKSGDFGEILVAEYLMYTENFWVPTLSLRYSEKSNKEESTKGSDIIAIRFDQDPAHESVYDLLCIGEVKTGSTSTSTIRGRLQDAINGSNKDSIQLLNAKRGSVGLNAVKLKIKHREPKENQGEYSYREIARFENPIERPYQTQYVAAAVVDQKHINQNTVKKVVTKESQHVDSLRMIAVGVSDIQKLIDALYSELGVSNLDNE

SEQ ID NO: 54317 - protein, 725 aa, Lactobacillus brevis
MYRDSFHVAIIVAPFKSIRDEIYWDLKLQFHGEEVDINRISTELKVDFSDFSLIERPAIIIVTPEKLLFMIRHNPNFLDETGLFIFDEAHQLDNSERGITFELLLSTINFLVADEIQKVFVSAVIGNPDEVSGWFNSGNNDIVSELQPRKFEKVLGYSYWNNETNHGELLIWNKLQETEPLVKFPYFFDPIKIRKNKTQPDFTIKNHTAGIRWATALTTRRFMRGGMVAVYAPRKDTIKGLAKVFMELQKAAPISINDSESIAALCNLFELNFGKNSVLVKAYQSRIFIHDGNIPDGIRSSLEFEAQKGNIPLLLCTNTLAQGVNLPIKTIIITSVGNGDLELNNRDTINLVGRVGRAGVINEGNIIFMQNINPNSDKRARTALNDLVNETPADPIGSSLASLFMRTAVDSYDNATEYIQASDWCTAEFLNDPLKWISNLVEDVSPKQAKAYSHVFLEKANGVWKIENYLMSIWDVIQEGDQEANIEKVIRKMFASTRIQDDEFDLMVWTFKYLGEKISSLAVGGYDILVMSKMMVGINEALNVESFVDSNGESIIESDDLEQIIIDIWPILRTSVSVKNQSEENLYSFLLIEWIKGKSYIEILESWKLEYPEVGLSNRKLEVERVYIICSQVFQYDMQLKLTALMEVITDPVKHARLEKLQIAMKTGLPRKTEQLMYGIGISDRVLARLLCEEMGVDTADHKEVLHWLRMNKKQIIEKFRQYDP

SEQ ID NO: 54318 - protein, 286 aa, Lactobacillus plantarum
MKKKPTYMDCFCEVVPIKNINNHEIELVEIKVPFTNTSIIENWAISFRNKYINNDDLKDMTEATGIGSFFEYLIHYVYPDKDDQQGKIVRIGDFGEILVADYLMFVRDYWIPSLLTRYSSKQNKDRSTMGADIFAIKFVDNMTSDNPEDELCICEVKTGFSKKARYRLKDAVDDINKDNVAELDKRASISLAATMIALKKRNDIEANFIDKIRRFQNPVEKPFKTSYLAAAVIDETQLREKNLMDVKTDSSPHREQLGLITFHGENLKQLMNILYGELGVKNIGDK

SEQ ID NO: 54319 - protein, 998 aa, Lactobacillus plantarum
MAINDDLLKDIWGRKKEIELSTHNVSSKKENTWSKLLYFTFGALSDYLVSKDKNEQFSTRLQFSAKYFELLPAIKDESNPLSGDNELMLFGAAAYFFADYPGAASVALKPIVVSELSSFEEVLYAVISGNVHISNEIFKSIPSTLNEILLGFQTEDAINENLKIFVDQAYNYGTDEDILAVECVSAVIRRKIKTSTLKLMPQMSGGSVDYWKDIIQNKKVEQTMWASQRALGEQGVFDGKSSVIQMPTGAGKTASISLILRSALSKRQLGIAIIVAPFKSIRDEIYQKQVHNFRNEPIRVNKLSTDLKIDFDFILQQEDSKILVVTPEKLLFMIRHSPDLLSQTELVIFDEAHQLDNAERGITFELLLATIRQLASDKTQKIFISAVVGNPQTVSEWFNAGNNVEITGIQQKRYSKAYGIAQWNIDSNSGQLFLTTDINSTKKWIQYNNVVNPIRVTNRTIEPNFSRKDPANAYRWLTVLFAGRFVSNGTVVVFSPRKDSLSVIAIEFTKYAKISDEFRSNLVLDSDTKAIISLFKCNFGQTSKLVKAFQAGIFIHDGEIPSSIRNSLEYAIQHRSIRLLLCTTTLAQGVNLPIKTMLVTSVGQGSLHLKNRDLQNLIGRVGRSGIENEGNIIFVQGKSASSKYNILEAVSMITNKTPAENLGSSLLNLFQPTPLDDYNPQSEVITSNQWLTTDFLEDPEKWISDNVLKEDTKRIEIYRRKGQAVAKIENFLMSLWDLIQMGDSTDNLESIVKNTYAYHISESEEQHKKLENLFYLLYDKIVRLITGENDIQVYSKMLMGVNEALAMKKWIFENIENIINTSDIKQIVSELWPLLSMVLTDKEMQYNNLYLEILKGWITGENYENLVNIWNQFADVKIKNKNPNVETVYCICDQMFQYDMSAKVSAIAEIVENDNVKRERLYMLHTAMKSGLPTLTENSIYSIGINDRYLASQIAIQIGNYDLSENQVKKWVKQHKEEIIQNEGENLPKFFLELINQI

SEQ ID NO: 54320 - protein, 285 aa, Lactobacillus paracasei subsp. paracasei Lpp229
MKIPDYMSSYVKLLPIKTNEGNPIELIEVHAPFDNNELITEWARLFRLKYISDEDLLESMEDTGLQSGIEFLRSVVYPQNSKFRNGDFGEILVAEYLMYVEKFWVPTLTLRYSDKATSEESVKGSDIIAIHFELNSNQESPDDVLCICEVKTGSVSSVRGRLQDAVNDSNKDDLQLHAAKRGSIGLNAVKLKLKRKERAGNSDSYSYRAIARFQNPFEHPYQTQYAAAAVVDQKRFNRETIKKIEAKESQHVDSLRMIVVGVTDIKKLIDVLYSELGVANIGNEQ

SEQ ID NO: 54321 - protein, 999 aa, Lactobacillus paracasei subsp. paracasei Lpp229
MATNNEVLNDIWIRLKEQELANNSSLSSNKTLWNKLFYYTVGAITDYLCQDDALADANLRWRLEFSGKFFEILPRIDLSNNGLFGDEELALFSAVAYDFAGYPGASTVALEGLKGNRLSLVEKVLADVLEHGSSNFPWERSRIGLTMALVFSGNEDITLLYEQADSLIENAYKHDNYMDIIAAECVRRVISNYWSNSTIRLMPDFSNTKPDQWTPAIVAGKLHPVLWRAQRELGKHNVFRGRSAVVQLPTGTGKTASFSLILRSGLYRNSYHVAIVVAPFKSIRDEIFRNLEEQFQNEQIDINSISTELKIDFSDFTFKERRAVLIVTPEKLLFMVQHSPNFLVEVGLFIFDEAHQLDNSGRGVTFELLLSTIDLLVSKEVQKVFVSAVIGNPDDVSRWFNSGENVVVSELLPRKFSRILGYSKWQDKTMHGELHTWNKLQKTNSWVEFPNFYRPVQIKKNKFQPNFNVKNHTEGTRWATALTTRQFVKGGMVAVYAPRKDSINGLSKVFIKLKNKLSEHNEMKQSISALCNLFALNFGKNSVLVNSYLSGIFVHDGDVPDGIRTSLEYEAHRGNIQLLLCTNTLAQGVNLPIKTLIITSVGNGMLELNDRDTINLVGRAGRTGVINESNVIFMQNGNSSADKRSRRALTNLMWDRPANALGSSLASLFMPTAINAYNRSLGDLQVTDWCFEDFLDDPLAWITLRVEKTSPKQSRSYRNVLLEKANGIWKIENYLMSVWDIIQEGNQEENIESIARRTFAATRIGADELELMIWTFKYLGRKIAQLASQHNVTIMGKMMVGVNEALKIEDFVESYAELILTDDALDQIIMDIWPILRDTIPVKDQSNEELYQLLLFEWVRGKTFFEILESWESTYPEKRFGKRKPNVEKVYQICSQTFQFDMQLKVNSLMELVSDHDKHQRLERLQIAMKTGLTERTANSFYEAGINDRVLASQFSAKMGVVGAGKDEVVTWMHKNHEKILAKFEDILPTYFREKIKKA

SEQ ID NO: 54322 - protein, 266 aa, Listeria monocytogenes serotype 1/2a str. F6854
MSEKNLSYKENKHPFFISLDVSDEKTDSNIPHKVLIENGNNDVLINHMVPLIKNHHIEPEALIRRKELVESLRILNLPSTPIKSPYPRNFSTQKGNFAEIFLAEYLTSTSDVELPIYRLRYNSNPDQSMKGDDVLLFDLDAEPVRIIVGESKYRGIPDKTSVMEMMDGLIRSNREGLPISLMFVSEMLIKEGKLELGKKVQNCALLFATNKLTIEYVGLLMGNQNAKNPINKHTPKGLRNLLMISLGIRNPENIIKSSFERLEDSL

SEQ ID NO: 54323 - protein, 1108 aa, Listeria monocytogenes serotype 1/2a str. F6854
MSLPIEYIRELLAEVSNDKIENIITQTDARRILQEVKEDSENYPNFDVSLTEKATHIAYLLISCGCSLLAQENIKSGEGLLILEKAGKILSDNFKYNSEEMDTKDNNLLISGMALYAAKQFSRSFIVLDNVNLDFSVGQMIILFLKKDFMSLIKMASSIFFIRETEELDIQEFDDWVISHEIARCFLIIIDFMYTGNEDNFRLVNDILEKLEKISFESNLTLNWLIIRLLKIIFLTYQDVTFWSTLPPFLPLSSMTTNYIRLLCSLKSPITELWPSQTESLPLALGNSKGGVVNLRTSGGKTRVAELAILKMLTENPASKVLYLAPFRSLAFEIEQSLSMIFEPLDITVSQLYGGSTANVSDFEIIGFSQVIIATPEKAKALIRSGTELENEVKLIIIDEGHLFGAEKRHIKNEMFFNHLQKISDLKGIRMLLLSAVLPNASELAKWLTNDSSLVAKSDWKPSLERLGLLIWNGNQVNLEWKSEGSPFNPSFIKKAPLGYGRRRNLFPNKKNEAVAATAVRLSKIGTVMIYSARANSIDGLAENVLLALGENPEDFPWDFLQWRIFENICKEELSDDDIVLVAARKGIICHSNRLPAQVRIAIEKLMRSKEALIIIASSTLAQGVNIGISTVIVSTPYYSAEPINNRDFWNICGRAGRAFSDVEGKILYAIDTSDAKDEWQIKKDYQLAQNYFNDQQMKKVESGLLLVLNHFNSLSAQLGIDFSFLIEMVANDFIKYNIADDTVNRINNFFDLIDDELLAMHENLGNNFNLDWVDDTFRNSLAIIQADRGNKELYILLLKSRANALLKRMPDRTIRKKAIASGVPLSVAKALIDDSEYFRNLSFNFIDSIQSGENKSEAINVILQNIELWSRQNAGTVIENIPDQSVLNVIRQPWLSGMPLKEIRKIDRNIDDIAKNYYGFNLPWIVNAIAQIFDKEAEEEINKIYSNLAIFVELGLPDMTAVNIYLAGVRSRNIALELSSKEIFNDRNVSQIKRLLTNFPSEDIKITDAANLWINNFSENIDLKGNQTISFSAFTIESDSYNGRLYIREANQKCFLTSVDGYYNISVRSTLDLPFVKIANIPDLYFESTDNIWYLKSYNPQVRINYN

SEQ ID NO: 54324 - protein, 266 aa, Listeria monocytogenes F6900; identical to SEQ ID NO: 54322

SEQ ID NO: 54325 - protein, 1108 aa, Listeria monocytogenes F6900; identical to SEQ ID NO: 54323

SEQ ID NO: 54326 - protein, 261 aa, Listeria monocytogenes J0161
MSYKENKHPFFISLDVSDEKTDSNIPHKVLIENGNNDVLINHMVPLIKNHHIEPEALIRRKELVESLRILNLPSTPIKSPYPRNFSTQKGNFAEIFLAEYLTSTSDVELPIYRLRYNSNPDQSMKGDDVLLFDLDAEPVRIIVGESKYRGIPDKTSVMEMMDGLIRSNREGLPISLMFVSEMLIKEGKLELGKKVQNCALLFATNKLTIEYVGLLMGNQNAKNPINKHTPKGLRNLLMISLGIRNPENIIKSSFERLEDSL

SEQ ID NO: 54327 - protein, 1108 aa, Listeria monocytogenes J0161; identical to SEQ ID NO: 54323

SEQ ID NO: 54328 - protein, 266 aa, Listeria monocytogenes J2818; identical to SEQ ID NO: 54322

SEQ ID NO: 54329 - protein, 1108 aa, Listeria monocytogenes J2818; identical to SEQ ID NO: 54323

SEQ ID NO: 54330 - protein, 266 aa, Listeria monocytogenes; identical to SEQ ID NO: 54322

SEQ ID NO: 54331 - protein, 1108 aa, Listeria monocytogenes; identical to SEQ ID NO: 54323

SEQ ID NO: 54332 - protein, 266 aa, Listeria monocytogenes; identical to SEQ ID NO: 54322

SEQ ID NO: 54333 - protein, 1108 aa, Listeria monocytogenes; identical to SEQ ID NO: 54323

SEQ ID NO: 54334 - protein, 266 aa, Listeria monocytogenes; identical to SEQ ID NO: 54322

SEQ ID NO: 54335 - protein, 1108 aa, Listeria monocytogenes; identical to SEQ ID NO: 54323

SEQ ID NO: 54336 - protein, 266 aa, Listeria monocytogenes; identical to SEQ ID NO: 54322

SEQ ID NO: 54337 - protein, 1108 aa, Listeria monocytogenes; identical to SEQ ID NO: 54323

SEQ ID NO: 54338 - protein, 266 aa, Listeria monocytogenes; identical to SEQ ID NO: 54322

SEQ ID NO: 54339 - protein, 1108 aa, Listeria monocytogenes; identical to SEQ ID NO: 54323

SEQ ID NO: 54340 - protein, 277 aa, Listeria monocytogenes
MINLIYNNNGVKFMVLKYLSYLEEEEIITTEIGKKIKVLHLNVCKDDNILNEWASHFRKHYCSDEEIDDLRSGYGMTRKEFLREIKFPDRSSLGSATRSGDFSEILVADYVEFILNYFVPRIRYDGKFNKNTSIQGSDLIAFKVDNNISENDELMVFEVKAQASNAKAKNKLQEAIEHSKKDFRRVGVSLNAIYQRLRYKGLIEDAKKVQRFQNATDRPYKQTYGAAAVHSNFSYSKEILLDVTTEGHHDPNLELIVIHRENLMEFIHELYERACGC

SEQ ID NO: 54341 - protein, 1051 aa, Listeria monocytogenes
MIGSRSQFLLKKARAKAKMIEYNIPKQDHIEVEADVPKLFLIAISAIGNIANDIIQEPDDSINIIKKENDNLKFSSIFFDAYLNAQFETESDYYFYLFGSIAYFFNDYIGNSKVLINKIDLDKIDFGTHDIERALVALLQGQFVEFEFINIDAKYAMHLKNMQNDLQLYYSNGTIPDLHTLEYIRRQVYEDGSDIEVLLVDALCAIYILKIRYSAINLLPRYMNLSLNDLNSLLFKSNIISELWPSQRLLGELDVYSGRSAVIQMPTSSGKTKSISLIIASAFLANKTNLAIIVAPYRALCREISTDLAKDFSFDDSIYIDELSDILQEDELLFETVNEGEQKVLVATPEKLIYILRKNPEIIDDLGLIIFDEGHLFDDPTRGTTYELLISTIKTFLAEDIQKIIISAVISNAKELNNWFTDANGAVISGNIINSTHKSLAITDWKRSKAQMYGYLYFVNPENPEEEEFFVPRLISIVDLEKKGKERKLRRFPEVDFKTKKVKNNDIAINYALTLSDNGGVAIFCGSKIIANSILKRTLDLASRNYSIASLLNNSEIDEVEKISRLIALNYGIDNDYYKSAKKALFVHHAGISTGIKIAIEHAMREEKIKVVVCTSTLSQGVNLPIKYLVVTNIYQSTNLIKVRDFHNLLGRAGRAGIHTEGTILFTETFVYNQPHSSKNWKWTNYKNIIDNNNSEPCSSRILFLVQQAHISPTQSLNINNIVNMYYTDPDKYLDRYHKTYEKISAESVDLANNYFNVLDLAIQSLEYIESFLLTYLTQNTWEECKESINHVIKQTLAYSLANDIEKEKLLELFQMISQYCIDLVPDSNVRYIFSKSLLGIKKMIFIKEWASENVQLILECKTTNMLYDILIECIIDESLDIPKMKKLYDPTNLKIIGAAWINGMSYMDIWNKCKRNNIMVYYRNKPKLIDLDDIILICDNILSYNGSLIVSALSEVVDLIVGGDNDISELFKQLATSMKYGISYGAETLIYEMGFSDRVVSQVIANYFHDNNIRITTQSNCRKQLKSHSENIGEIISIFPSVFIEKLLAL

SEQ ID NO: 54342 - protein, 266 aa, Listeria monocytogenes; identical to SEQ ID NO: 54322

SEQ ID NO: 54343 - protein, 1108 aa, Listeria monocytogenes; identical to SEQ ID NO: 54323

SEQ ID NO: 54344 - protein, 266 aa, Listeria monocytogenes; identical to SEQ ID NO: 54322

SEQ ID NO: 54345 - protein, 1108 aa, Listeria monocytogenes; identical to SEQ ID NO: 54323

SEQ ID NO: 54346 - protein, 277 aa, Listeria monocytogenes; identical to SEQ ID NO: 54340

SEQ ID NO: 54347 - protein, 1033 aa, Listeria monocytogenes
MIEYNIPKQDHIEVEADVPKLFLIAISAIGNIANDIIQEPDDSINIIKKENDNLKFSSIFFDAYLNAQFETESDYYFYLFGSIAYFFNDYIGNSKVLINKIDLDKIDFGTHDIERALVALLQGQFVEFEFINIDAKYAMHLKNMQNDLQLYYSNGTIPDLHTLEYIRRQVYEDGSDIEVLLVDALCAIYILKIRYSAINLLPRYMNLSLNDLNSLLFKSNIISELWPSQRLLGELDVYSGRSAVIQMPTSSGKTKSISLIIASAFLANKTNLAIIVAPYRALCREISTDLAKDFSFDDSIYIDELSDILQEDELLFETVNEGEQKVLVATPEKLIYILRKNPEIIDDLGLIIFDEGHLFDDPTRGTTYELLISTIKTFLAEDIQKIIISAVISNAKELNNWFTDANGAVISGNIINSTHKSLAITDWKRSKAQMYGYLYFVNPENPEEEEFFVPRLISIVDLEKKGKERKLRRFPEVDFKTKKVKNNDIAINYALTLSDNGGVAIFCGSKIIANSILKRTLDLASRNYSIASLLNNSEIDEVEKISRLIALNYGIDNDYYKSAKKALFVHHAGISTGIKIAIEHAMREEKIKVVVCTSTLSQGVNLPIKYLVVTNIYQSTNLIKVRDFHNLLGRAGRAGIHTEGTILFTETFVYNQPHSSKNWKWTNYKNIIDNNNSEPCSSRILFLVQQAHISPTQSLNINNIVNMYYTDPDKYLDRYHKTYEKISAESVDLANNYFNVLDLAIQSLEYIESFLLTYLTQNTWEECKESINHVIKQTLAYSLANDIEKEKLLELFQMISQYCIDLVPDSNVRYIFSKSLLGIKKMIFIKEWASENVQLILECKTTNMLYDILIECIIDESLDIPKMKKLYDPTNLKIIGAAWINGMSYMDIWNKCKRNNIMVYYRNKPKLIDLDDIILICDNILSYNGSLIVSALSEVVDLIVGGDNDISELFKQLATSMKYGISYGAETLIYEMGFSDRVVSQVIANYFHDNNIRITTQSNCRKQLKSHSENIGEIISIFPSVFIEKLLAL

SEQ ID NO: 54348 - protein, 277 aa, Listeria monocytogenes; identical to SEQ ID NO: 54340

SEQ ID NO: 54349 - protein, 1033 aa, Listeria monocytogenes; identical to SEQ ID NO: 54347

SEQ ID NO: 54350 - protein, 237 aa, Propionibacterium freudenreichii subsp. freudenreichii
MVHMVAPSATIGTGVDWAASQIPNQYTGPDRVAAILADLGKPAAAEYLEGKLPTSKRTRSGDLGEIIGAQYATLELGFRVVERLRWKDHREMSMRGDDLVGVRAATNGSLELLKGEAKSRTTLGTATVTDADLALRRDRGRPSPHALSFVADRLHELGEHALANLVDDAQLTTGISERQVVQLLFTFTGNDPRNLLRTNTTAYRGGVKRLAVGLQVSEHQAFIANVYSKVIANDRDS

SEQ ID NO: 54351 - protein, 1166 aa, Propionibacterium freudenreichii subsp. freudenreichii
MTETVEDIEAAIEEATTPGFREQLLARGEARSLIWRDGVLPEDAPAFDQLLSYDLLSYGYSLLGLGLRLVEASGSQSLAQRAFEGAATAIESVIARGPNSRERGFHRVVAAAAYHLGSYSARAYSLLQTALDSGEVTIGERSLIHIIRRELDTLAALILSHRDEDAAADANLVETLRGLLEPTSDENQDDDSGDTDVIDVVDLALTDAFVGAISMALLAFERGEQALLDEALSTLQVGLGAASELNMVSQWWCHRLAIHLLRGLWEASFHRLLPDGPIDGDGGDWARLRATFIASLFRRRRSEIDLWPSQLAAAERVLNTSENLVLSLPTSAGKTRIAELCILACLAGGRRVVFVTPLRALSAQTETALQRTFTPLGKTVTSLYGAIGASSADEDLLRERDIVVATPEKLDFALRNDPTLLDDVGLVVLDEGHMIGADEREVRYEVQVQLLLRRGDAATRRIICLSAILPDGDEVEDFVNWLTDDQPDGLIASSWRPTKLRYGEVIWQGDRARLSIIVGDEEPFVPRFLEPFVPPIGRRTTPFPKDQQELTLATAWRLVDDGQTVLIFCPLKSSVNAFAKVIVDLHTRGALGSVFEGDPGDLASAITIGEEWFGRDHSILACLRLGVAIHHGSLPAPYRREVESLLQRGALKVTVSSPTLAQGLNLSASALVMHSLWRNRELIKASEFRNIVGRAGRAFVDSVGLAVHPIFKDVSRGRRNWRQLVEDTALRDMESGLLKLVMNLLVRMQAKHGFRDLDALLEYVAGTAAWDYPEVAAESDEEAEHSRTAWRSQLASLDNALLSLLNDSAVADDGVEGALDDVLASSLWNRSLARRQEPVQTALRAGLTARARLLWSQSTAAQRRGYFLAGVGLETGRQLDEHASILEQHLRDADEGIRIGDPGAAIDVLTSFARIAFGIHPFAPRALPPFWEGVLAGWLRGEDPSQIAGEEVTDTLEFIEDSLAYRLPWALEAVRVRATAHEDPVGDLWALLTDEHGLAVAALETGTLNRSAALLMQAGFSSRAGALAAVTVGGGTFTTVSELHQWMNSEEIRRRADDTHWPTVSSHDLWVGFISRSTAAPERTWINTVEDAAVTWLLDHQPSSGTPYRAVSLANGETILQAADGRRVGLLEEPLNPNRRGLLAVTGASAANVVELRYRGPSDLRA

SEQ ID NO: 54352 - protein, 274 aa, Mobiluncus curtisii ATCC 51333
MDNNSINCSNIRELPEPSFLSCLKKEGHVLIYDAKVQCFSIEGNIDDKILQEWALHIRRHYVRDDELTDYVHVYEIDAKKHLREDCIPDIPQIRSGDFAEIIISDLIQFIEGYEVPRYKQHGREDKNKSEHGTDVIAYKVTNGSEANNNDELLAVEVKSRSSSPNLKGAIADAARDSLKDRSRIAMTLAYYANRALAAHDTRTSTELKRFLHASEHPFKETFAIGAVVGIKDAEHSLRDKSASDLSINHGQRVFIIHRTRLMDLIHSIYNRCVS

SEQ ID NO: 54353 - protein, 1002 aa, Mobiluncus curtisii ATCC 51333
MIYGKRSDRELMCAKAKAKASEFFVDPHSIPDSGLNSAELHYSSVLTLSTYVNARLSGADGLEHMEDLQKTASFYDAASNDEGNKPFTDGYWMLAMATYFLLGNYGSAKVSAAKVHDPSFYGERAQTLHSLVSYLLEADMPAPSELSALVSYLRGFDMKEEDVIKDASALLTKSNPEDAFFSGILYVAISDAMSTSIRALLPRYTGLSIDVWRPYLSMQTSPKLLWQAQRQLGVVGVFAGGNAFVELPTGSGKTKSIELLLRARFLAGKCKLAIVVAPLRALCSEIARDLASALDDVAKVEQASEVMEIDSWFTESPQGFRVMVFTPEKLGFVMHRNAMLREDSDLFVFDEAHLLDSESRGPGYELLLTEIFRTKPDVQKVLMSAVVSNADEIAKWAFRDSNLIASGKDIQVTEKSIGLIQNEGTKISYVEQDDISSENYFLCVDVSPQPLKVRKREKERFFPDKISKASNHTRDLAIYYANRLLPNGACAIYVPKQVSLPPMFNRLQELIQRGANISNLQGSMEEIDKEKMSNLVDAHYGKGNWITSGIRAGVLPHYGDLQGSIRQAVEYEIAKENAGCIACTSTLAEGVNLPIKYLIITGAMRGFGVPRTRDFQNLIGRTARSGKFSEGSILLADSTGDLRSKRMYSSLMRKSNTERCESAILNLLADACDKEENPIKRVAGHDIVKVLLNHIEDPRLEFVLADFFRQSLGCNKNRAYVLASRRMRPLEAIESYLSGVIAASNDEVDVTNLCSSTYAYASSDEETQGRLLKLFQTVYDSLESVSKERASLYHKMQLGARDAASLIRWAESPEGKDFIYNGCSNIVSAVQQFLMSRPDVAATLSDEQLADIIELWVGGNDLSQMTIVLNKNYPSKPKLKIARMERVTSKVIRYSFSHFISCIIDIASQDAGLSAQSNLENLAAFQRKVKYGVSNLREAAVCEKVIDDRVIAKRIVSMLGAKESSDANKMKLEAIASRAKIEQLADTLPAYCSERILGWISK

SEQ ID NO: 54354 - protein, 276 aa, Gardnerella vaginalis JCP8151A
MNLSFDNSEYFKFDKSILTKDGNEIHIYKLNSELLDDKSLNNWAFGLRNNYIEEHLLTKAISGTGLTKKEYLEKRIFPDPNVPQGAATMSGEFGELLVYDYINYVLKYYVPRIRYLNKVNPNTPIHGSDVIGYKIKIGNQPSKDDELLVAEVKTRSTVSGDKTKACTKIVTDAITDSNKDRVRVGESLNAEKLKLLSRNRIEEANIVERFQNKTDNPYKLEFFAVAVMDNELYSDQVVLDVINSQGGNIKSTNILIIHSKKLKLFLRDLYRRACLC

SEQ ID NO: 54355 - protein, 1033 aa, Gardnerella vaginalis JCP8151A
MLIGNISKYYLKKVRAKAKMYEYGVPENLHIAVENESNDLIFLSIGIIGDIANEILNMKNEPIILPKEKEEELYFVSRFFDSYFQSKMSKEFNPYYILMGSVAYYFCNMNGSSKVMLSVMPNLLNDFEFSASGLENVIIYLLDDSSKFDISIIAEKYRNYIKQLIDYHNIFFAGKNSEKAQFEKFRKYVYRYGNDREVLFTDIILAILKKKICNSCINLMPRYSGLDKDKWLLTFNNNTMMKEMWSSQILLGEKGIFNGKSGVIQMPTSSGKTTSISLAIQSAFLSERTSVVIVIAPFRALCKEILFDMEKFFSFDENITVTEFSDIPEPSEIKFVTSESINKKVLVMTPEKLVYILKHNTKIIESINMIVFDEAHLFDDETRGTDYELLLATINNYLRQDAQKILVSAVISNAKQLNAWINNDGTVINNNTIKTSEKTVAFNVFPSNNVNSDYSNLYFVNPNKCLEEEFFVPRVVQTKELNKKSNERKTRYFPDFKNNKQDVGIYYAIKLIKNGNIAIFCSKKSTVNNILMRFIDLKHRGILLDDFCTLSDEVECLKIAYLIREHMGENYLYNAALNGILGHHSGVPNGVRIAEEYALKKSLVHCVVCTSTLAQGVNLPIKYLIVSSVYQSNKVIKVRDFHNLIGRTARAGKETEGTIILTENVYKNYKKYNKLNTYKRLLNVENSEECSSNLLKLVRKIQLDNADCVSIESLHKYISLRYSEPENYSNIKNKIFEYKEQYKEYGAEFIDKINEIEHILVSLENFILRFADDKDESFEIIQSTYGYYLANKEEKEELKNIYNLIKSNIDSLEVNDKLLYRKSMLSILQTKKLSKFINENLYEILDAEFDTLLNLIVNKLKESEDCKIIPKFIDDRYLCELLKMWINGQSYVQIWNYAKTVNLLIKRGKNSKIISLEDIITLCDLDFGYASLAIIQTIIEILNTKDCSENVQEKLTELIYRIRYGLPNKESAFIYELGFADRIISQKIADEISYSDCSTKKKTKCTIKGNREKLQELLADYPSYFLNILQKLR

SEQ ID NO: 54356 - protein, 272 aa, Legionella sainthelensi
MPWSSEHTKWLVDTGERLQTSDGKEISIWEFQYQDNAPIFSAWAKHFRNHYCFDHEIDKWRKGTKHSRSEYLTNIKFPDEKTAPGPSTRAGDFGEILVADFLEYLLGYWVPRTRYRDKTIRNESTKGSDVMGFYFINEGKTSVEDKLAIFEVKTQFSGRKSKARLQDAVNDSAKDITRKAESLNAIKQRLYASNKCDDAEKIDRFQNEVDNPYKELYGAVALFENKLFDNELMSSIITATHPCSNDLKLIVIKGVDMMSLVHNLYRKAADEA

SEQ ID NO: 54357 - protein, 1045 aa, Legionella sainthelensi
MRPEQKSKQLLSITRSKSKMLEYSIPEEHHIRIPQDPFKLFTLSIGLLGDLASSINREKSDSPILSELRENLLFSTHFFDSYLQSKLNETLDPYFALLGSASYYLCNLPGSALLLANRLNEQTLDLDAEGLENLLLWLLQANLKPYLSNPNSPFRKYIDNIASEFVQFFKNGTGEENLINLSVTLKKAAYEFGTPRQLLFGDIIGAVIRVKLENSTWKSLPLYSALSLDKWLPTLEKESFIKELWPAQHLLGKANVLKGESAIVQMPTSAGKTKAIELILRSSFLSNRITLAIIIAPFRALCHEIKNSLTDAFHNENINVDELSDTPQTDFEIAELLGHQQILIITPEKFLYVLRHSPELASMVGLLVFDEGHQFDSGTRGITYELLLTSLRSMISEEAQKVLISAVISNAETIGKWLNNKPTVVEGSTLNPTFKSLGFASWLDPLGKIEYVDIRNTEQSEFYVPRVIERLNLGKKVKEKTDRYFPEKTGQDIALYLGLKLAHNGSVAIFCGKKTTAASICKRAVECIKRSIPLPIPLEFSNQEEVDKLYNLHIKNLGSLAPASISAKHGIFTHHNNTPHGIRLAVEHAMRENLVKFVICTSTLAQGVNLPIRYLIITSVYQGTEQIKVRDFHNLIGRAGRAGMYTEGSILFADPIVYDKKLSRYDSWRWKVVKDLIDPTKSEECVSSLSKLIPLIIQNDRNKSNDKKDHSLTWDILSFAKAYIKGWDSLNEIIIEIEKSHNTQGFTEDALRPQFESFSIMLSSIEGFLLSNWGVTDNELSEVELLDLTKQTLAYFLAEDKQREQLQELFKILAKNISTNITDINRRKVFGKTLYGVNEAQAIERWVQLHTEELITVKEEEFIELIWPLFNQHIHSKTFRNFNRQDVLMAIAKQWFLGVPFHELFKISKEQDCKLGKGKKPRKIKIENIIDICEGGLSYDGALVINAVCEFYANLDCKAGNDVSKRLQFFQKRIKYGLPTEASISFYELGFADRVICQDLAMSINLSGTRKKECIKTLKQNSESALILIKKYPHYFQERMNELLR

SEQ ID NO: 54358 - protein, 256 aa, Yersinia kristensenii
MANFDVWCDSVNINLGTNFLQKLTARIADFDGGVQSTASIVPHHYTSPENIAIAFELLGKPGVAEFIKDFLPISKQTRSGDIGEILATEWINARSNGYKVPLNRLRWKDHRNLAMRGEDVIGMYIDPQSETLFFLKTEAKSRVKMNASTITDARNNLNKEQGLPTPHALAFIATRLLETGQTDLGRAILKASLSQGILPGHVRHLIFLLSGNASDVLLTTSINAYQGNIQQFGVTVMIARHGEFIEEIFDTVISNA

SEQ ID NO: 54359 - protein, 1174 aa, Yersinia kristensenii
MLETPEEIIEAIRAATATGFRSRLIARGQARAMIWRDGLLPDEAPVFSPQLSEDLQGYAYSLISLGLGLRELNGDIAYSRLAFEYAATALESVIAKGARDNQDSDFHFVMAAASYHLAHLSARAYSLLAIVDEDDNFSPIERTLTKLILRDFHTLRTSVLCYRARGEGNEERIIEGMRGEVSPREEGDDNAAGVEHDALLEGLDIALTDTYMSAMALYILAVERGERIFLTKAIDKLRTGLEVCSRFNMLPQWWVIFITIHLLSDLWSDTFHELLPVASVGGEAEAWPALREAFISLLMRRPRAEIDLWPSQREAALRAVNDEDDLVVSLPTSAGKTRIAELCILRCLAGQKRIVFVTPLRALSAQTEATLSRMFNPLGKTISALYGSIGVSGMDEDAIRKRDIVVATPEKLDFALRNDPGLIDDVGLFIFDEGHMIGAEEREVRYEVQIQRLLRRQDANERRIVCLSAILPDGDQLNDFANWLRRDKPGGVIKNDWRPTRLRFGEVIWTGTSARLNLSVGEEKPWVPRFLVSTVPPTIKLHGKKQRKKNFPGTSNELCLATAWRLVDDGQTVLIYCPLRRSVEPFAETIIDLHQRGLLRPLFEGDADVLARAIALGEEWLGAQSPILACLRLGVALHHGALPTAYRKEVERLLRDGVLKVTISSPTLAQGLNLSATAIVMHSLHRNKELINISEFRNVIGRAGRAYVDVEGLVIYPIFEQIMKRQRNWSRLTKDMGAREMESGLVQLVISLLKRMSQLLGNDINVVSDYILNNARAWSFPVIAVEDANEKERAAALWERQIATLDTAILSLIGESDIPDGQIETTLDDILQSSLWYRSLQRYPDDGSRRLIKSGLLARSHYIWLHSTPAARRGYFLSGVGLTTGLQLDAIAPVANQLLIEANGAILSGDEEGAIAALTALAERVFTFYPFIPAPLPENWQAILRTWLLGEHITTIANVVKSETLQFVETGLAYRLPWAMEAIRVRAIANGDIVDDDGLTIEDYELDLAVAAVETGTLNRSASLLIQAGFNSRLAAIKVVADTGADFQSGRDLRRWLRSDLAIAWSEFADWPTPETHAMWIDFAKGVSPVENNTWSLRKYTGTVDWEGVTPELGTALHFHQMDGINYILAGDGTPLGRIAAAINTERKGLLRVKVGDKLNIVLDYMGPDDIRVP

SEQ ID NO: 54360 - protein, 256 aa, Yersinia kristensenii; identical to SEQ ID NO: 54358

SEQ ID NO: 54361 - protein, 1174 aa, Yersinia kristensenii; identical to SEQ ID NO: 54359

SEQ ID NO: 54362 - protein, 271 aa, Vibrio nigripulchritudo SO65
MPWTKEHIQWLHHTGEVISISTGDKVPVFEFVYDVTNEEAMSHWARHFRNHYCADDAIEILKPQGMTNRDYLLNLKFPHKTKSPGPSIRAGDFAEILVADYLEFLHDYYVPRTRYDRKIIGNESSKGSDVLGFKQTNHAPSGKDELLIYEVKARLTENNAKNTLQTAIDDSSKDEARLAESLNGAKQRLYDQRDFAGMGIISRFQQNVDHPYKTKFGAAAVLTDSSCCVETIAEASTKEHSSPTHLEMIVIRGPLLMSLVHELYERAANEA

SEQ ID NO: 54363 - protein, 1035 aa, Vibrio nigripulchritudo SO65
MKLEQSSKKVLAITKSKAKMYEFAIDEASHIELPVDPRKLLITTIGILGDLSAIEARGELQVGDSDEHEELKSELISVGQYFDALIQSHLADEMTTYLKIIGSAAYYLANIPGSSIVLGKSLVYKTELLTDTNLEGILIWILKSNFNENWYRVEKTYLTQAIDGVGYATRRFFGLNLDTQSFKQAIQVLRNEVYEKGSDRELLFADIISSILLRKLENSSIVCLPKYTQIPLEQWVNVITKPTFVQEFWPAQRLLGEQGVLSGVSAVVQMPTSAGKTKSTELIIRSSFLSGRSDVAVIVAPFRALCREITATFERAFEGEDININELQDVLDISDSDDELIRLLTGETEQDGIATKSIVVTTPEKLVYLLRYEPALADSIGLLIFDEGHQFDTGKRGVTYELLMAYLKSRVGDDVQKVLISAVMANANSIGEWLNGKTGIEIQGAGCLPTVRSTAFASWQTAIGQLQYIDQDREADRDFFVPRVIEQINLGTRGRERNARLFPGKNDNPSVAAYLGVKLCHQGPVAIFCGVKSTVKSICELLVNYYERGLALPPPSSSSDQSELDKIAYLSSLHFGEESIFTRSVSLGILPHSSNVPNGIRVSVEWAMESNKSVLVVCTSTLAQGVNLPIRYLVVSSTFQAGQEISTRDFHNLIGRAGRAGYHTEGSVIFADTDVFDKRNSFRERWRWQRATHLLDFTNAEDCASSLLDLTSPFDFTELDVDAGQFIANPGGYRQSCIDVGYKNSIDISSLHDQMDYKEALIEAIESYFLSYLKDNPNAPQTFFDELAQGTLAYFLSDDDQKQKLRVAFSLIASRVLSVPEEKRQFFGRSLLGLKNLYLIENWLDENWGEVAQAQSSNELLVICWPLLSQLNNNKIFLKIKPENVILDFAKLWISGSSYADLHSHLDQSGAYYQAGSQRRNIKMDHVVDLAEGALSFDSMLYVGAIADVAEGKGIGDDVLELVRSLQSRLKLGLSNSLEMWLYSQGYVDREVCKALGSALNGQGVDPDVFDSDVLKTYHQVVSECISKFPSYFSG

SEQ ID NO: 54364 - protein, 271 aa, Vibrio nigripulchritudo AM115; identical to SEQ ID NO: 54362

SEQ ID NO: 54365 - protein, 1035 aa, Vibrio nigripulchritudo AM115; identical to SEQ ID NO: 54363

SEQ ID NO: 54366 - protein, 271 aa, Vibrio nigripulchritudo FTn2; identical to SEQ ID NO: 54362

SEQ ID NO: 54367 - protein, 1035 aa, Vibrio nigripulchritudo FTn2; identical to SEQ ID NO: 54363

SEQ ID NO: 54368 - protein, 277 aa, Colwellia psychrerythraea
MPWTNQHLKWLEDTGDIITTACGKQAPIYTFNPDMADEAALSAWAKHFRNHYCDDNEIDDLRDGTGLSRKEYLLKTKLPVQKVTAPHEKTGPATRSGDFTEILVSDFLEFNLNYWVPRTRYEFKVNPNLSENGSDVIGFKFSDDGKPKNDELMIYEVKGSLTGNKPSNRLQIAVNDSNKDRFRIAESLNAIKQRLKLKGLQQDVPKVQRFQNIGDRPYKEKYGAASVLTNTMYSDAELNKTDTTGHVNNSALSLLVIKGDALMDLVHFLYQRAADEA

SEQ ID NO: 54369 - protein, 1040 aa, Colwellia psychrerythraea
MKLEHSSKIYLSITKSKAKMYEFGVEEEHHINLAIEPQKLLLLTIGILGDLSAIEASHLAQDDNDEEYLALKSQLIDVSQYFDSLNNSRLESSLSNYLNLLGSASYYLADMPGSSLVLIKDVDYDIDELTPSYIEGVLIWLLKGDLEQIWYVAGNCDFEGELEYFTSSITKCFKQEVPFAQLDDAIRKLRKAVYEGGNDRELLLVDILAAIAKRKLEYSSLICLPKYTGLTVDLWKAALAKDSFIKEFWPAQRLLGEKGIFEGKSAVVQMPTSAGKTKSTELIIRSSFLSKRSNLAVVVAPFRALCREIADSFKKSFSNENIKINELQDVPQLNPNDLAMINDLLNIEDDDNVSDSVIVSTPEKLVYLLRHEPELASNIGLLIFDEGHQFDSGSRGVTYELLLASLKVNIPDDSQLILISAVMSNAETIGDWLYGENGTEVKGTHCLPTIRSTAFASSSGQLQYIDKEFVGEREFFVPRIINQVNLGTQGTLETVERIFPKRGDNSAVSAYLGIKLAQQSPTAIFCGTKAIITSICKTLVDYYSRGLDMPPPIVKSDEQELSKIANLSRMHFEDNSIFPKAIDLGILPHGSNIPNGLRVSAEWSMENNKASLVVCTSTLAQGVNLPIKYLIISNTAQGINKISTRDFHNLIGRAGRSGYHTEGSVIFANTKLYDERLTWAGEKRWQEVRALLDPSNSEDCVSSLKLLIEPIIVGNQQLKAIKFIKNPTKYRKLCLKAARKNGVTGQDLKDLLFDLNSKQKTINALESYMMSFLKDASNDNNETVFLDLAQGTLAHHLCSEKEKLLLIEAFELIYQSVINIEPGKLSFYGKALLGIEDLIFIEEWLEENYESLCAQEDIFELFKYIWPLLLDVCRNELFEKLSPLEVVLESSCLWISGASYSEIFNFMGTNKVRYQAGTQSRKVTMDQIVKYTDNTLGYDAMLIVGALADLCNGKYDNEELEEDLKHLQNSLKLGLSANFELWLHSKGYVDREICKLISKSFHESGADISNFEGNILDKNSELVSSIMSEMPTYFSSIQVN

SEQ ID NO: 54370 - protein, 258 aa, Burkholderia pseudomallei
MLNFKDWCTTEKATVGLHELRVITVNSAKINIGITATAEVVPSHYASEERIARILARLGKPEASKFIQELLPTTKAIRSGDLGEILATEFIQERTRYDVPIKRLRWRDHRNMAMRGDDVIGIAHNEKTGHAKFLKVEAKSRVTLTAGVVKEARTALDKDDGLPSPHALSFVASRLAETGDDELANLIDDAQLKYGIQQESVRHLLFTFSTNLPNKILTASLAGYSGPIGQWGAGLVVQDHAAFIANVYKQVIHNANNS

SEQ ID NO: 54371 - protein, 1174 aa, Burkholderia pseudomallei
MPTTVDGIVADINEASTPGFRGRLIARGQARAMIWRDGVLPPDAPAFSPQLSYDLHSYGYSLLGLGLRLGELGGDPAHARIAFEQAGTALEAVVAKGNRGDHDRDFHFVMSAAAYHLARLSARAYSLLSIVRSEANFSPIERVLALLMLRDFSALQDSVLGFRMSGAAADLRLRAAIEANVARAEAAADEDRDDEHAAHMLDQVDLALTDNFFGALSEYLLALERGEQPLLEEALERLRLGLDVCGEINLVPQWWSHKIAIHLLSDMWDSTFHKQLPVLPAGGDAHEWPRQRELFIATLYRRPKAEVDLWPSQLSAASRSVDQADDLVVSLPTSAGKTRISELCILRCLAGGKRVLFITPLRALSAQTEQTLQRTFGPLGKSVSALYGSIGVSGFEKDAIRRRDIVVATPEKLDFALRNDPTLLDDVGLLVFDEGHMIGLNEREVRYEVQIQRLLRRADAQQRRIVCLSAILPDGEQLEDFSSWLRRDRPGELVKADWRPTRLRFGEVMWNGATARLNLRVGDERPFVPKFITGFVPQLYVPPKRKRKKTFPADQQELTLATAWRLVDDGQTVLVFCPERRSVEPFADVIVELNERGALRSLLTADAAQLETALTLGAEWLGQEHAILKCLRLGVAFHHGALPTPFRKEVERLLRDGVLKVTISSPTLAQGLNLSATAVVFHSLHRSGEVIPAAEFKNVIGRAGRAYVDIEGIVLYPIFDEQKKRLSRWEGLISDVNARDMESGLVQLLMWLLIRMYSKTGGTLDELVEYVVNNAAAWTFPEVPGEKTDARELAYATWTRHVATLDTAILSLIGDNDIADEAIPDALDGILQSSLWERRLKRRDEGDQRVLKAALTSRSRFVWARSTPLRRKGYFLAGIGLETGLALDAISAELNALLIASNGAIVTAQYEAAIQAITSIAELVFAIYPFTPDPLPENWREILRQWLLGAQLAEVAAGQENETLQFVEGGLVYRLPWAMEAVRVRAAANGDVDADFGLPLDTFELDAAVAAVETGTLNQSAALLIQAGFASRLAAIKAVTDTGATFLNAAELRGWLASDAVAAWSTTPNWPSAETVSMWKEFVLGFAPRGESIWSERKYLAPVAWHNVPPPPETPVRLFHLDDRPVVLDATGSLIGALRAPLNVIRKGVARVSVSREAGKVLVTYLGPDDLWTT

SEQ ID NO: 54372 - protein, 259 aa, Salmonella enterica; identical to SEQ ID NO: 52946
  subsp. enterica serovar Montevideo str. 315996572

SEQ ID NO: 54373 - protein, 1177 aa, Salmonella enterica; identical to SEQ ID NO: 52993
  subsp. enterica serovar Montevideo str. 315996572

SEQ ID NO: 54374 - protein, 259 aa, Salmonella enterica; identical to SEQ ID NO: 52946
  subsp. enterica serovar Montevideo str. 495297-1

SEQ ID NO: 54375 - protein, 1177 aa, Salmonella enterica; identical to SEQ ID NO: 52993
  subsp. enterica serovar Montevideo str. 495297-1

SEQ ID NO: 54376 - protein, 259 aa, Salmonella enterica; identical to SEQ ID NO: 52946
  subsp. enterica serovar Montevideo str. 495297-3

SEQ ID NO: 54377 - protein, 1177 aa, Salmonella enterica; identical to SEQ ID NO: 52993
  subsp. enterica serovar Montevideo str. 495297-3

SEQ ID NO: 54378 - protein, 259 aa, Salmonella enterica; identical to SEQ ID NO: 52946
  subsp. enterica serovar Montevideo str. 495297-4

SEQ ID NO: 54379 - protein, 1177 aa, Salmonella enterica; identical to SEQ ID NO: 52993
  subsp. enterica serovar Montevideo str. 495297-4

SEQ ID NO: 54380 - protein, 259 aa, Salmonella enterica; identical to SEQ ID NO: 52946
  subsp. enterica serovar Montevideo str. 515920-1

SEQ ID NO: 54381 - protein, 1177 aa, Salmonella enterica; identical to SEQ ID NO: 52993
  subsp. enterica serovar Montevideo str. 515920-1

SEQ ID NO: 54382 - protein, 259 aa, Salmonella enterica; identical to SEQ ID NO: 52946
  subsp. enterica serovar Montevideo str. 515920-2

SEQ ID NO: 54383 - protein, 1177 aa, Salmonella enterica; identical to SEQ ID NO: 52993
  subsp. enterica serovar Montevideo str. 515920-2

SEQ ID NO: 54384 - protein, 259 aa, Salmonella enterica; identical to SEQ ID NO: 52946
  subsp. enterica serovar Montevideo str. NC_MB110209-0054

SEQ ID NO: 54385 - protein, 1177 aa, Salmonella enterica; identical to SEQ ID NO: 52993
  subsp. enterica serovar Montevideo str. NC_MB110209-0054

SEQ ID NO: 54386 - protein, 259 aa, Salmonella enterica; identical to SEQ ID NO: 52946
  subsp. enterica serovar Montevideo str. OH_2009072675

SEQ ID NO: 54387 - protein, 1177 aa, Salmonella enterica; identical to SEQ ID NO: 52993
  subsp. enterica serovar Montevideo str. OH_2009072675

SEQ ID NO: 54388 - protein, 259 aa, Salmonella enterica; identical to SEQ ID NO: 52946
  subsp. enterica serovar Montevideo str. CASC_09SCPH15965

SEQ ID NO: 54389 - protein, 1177 aa, Salmonella enterica; identical to SEQ ID NO: 52993
  subsp. enterica serovar Montevideo str. CASC_09SCPH15965

SEQ ID NO: 54390 - protein, 259 aa, Salmonella enterica subsp. enterica serovar Montevideo str. 19N; identical to SEQ ID NO: 52946

SEQ ID NO: 54391 - protein, 1177 aa, Salmonella enterica subsp. enterica serovar Montevideo str. 19N; identical to SEQ ID NO: 52993

SEQ ID NO: 54392 - protein, 259 aa, Salmonella enterica; identical to SEQ ID NO: 52946
  subsp. enterica serovar Montevideo str. 81038-01

SEQ ID NO: 54393 - protein, 1177 aa, Salmonella enterica; identical to SEQ ID NO: 52993
  subsp. enterica serovar Montevideo str. 81038-01

SEQ ID NO: 54394 - protein, 259 aa, Salmonella enterica; identical to SEQ ID NO: 52946
  subsp. enterica serovar Montevideo str. MD_MDA09249507

SEQ ID NO: 54395 - protein, 1177 aa, Salmonella enterica; identical to SEQ ID NO: 52993
  subsp. enterica serovar Montevideo str. MD_MDA09249507

SEQ ID NO: 54396 - protein, 259 aa, Salmonella enterica; identical to SEQ ID NO: 52946
  subsp. enterica serovar Montevideo str. 414877

SEQ ID NO: 54397 - protein, 1177 aa, Salmonella enterica; identical to SEQ ID NO: 52993
  subsp. enterica serovar Montevideo str. 414877

SEQ ID NO: 54398 - protein, 259 aa, Salmonella enterica; identical to SEQ ID NO: 52946
  subsp. enterica serovar Montevideo str. 366867

SEQ ID NO: 54399 - protein, 1177 aa, Salmonella enterica; identical to SEQ ID NO: 52993
  subsp. enterica serovar Montevideo str. 366867

SEQ ID NO: 54400 - protein, 259 aa, Salmonella enterica; identical to SEQ ID NO: 52946
  subsp. enterica serovar Montevideo str. 413180

SEQ ID NO: 54401 - protein, 1177 aa, Salmonella enterica; identical to SEQ ID NO: 52993
  subsp. enterica serovar Montevideo str. 413180

SEQ ID NO: 54402 - protein, 259 aa, Salmonella enterica; identical to SEQ ID NO: 52946
  subsp. enterica serovar Montevideo str. 446600

SEQ ID NO: 54403 - protein, 1177 aa, Salmonella enterica; identical to SEQ ID NO: 52993
  subsp. enterica serovar Montevideo str. 446600

SEQ ID NO: 54404 - protein, 259 aa, Salmonella enterica; identical to SEQ ID NO: 52946
  subsp. enterica serovar Montevideo str. 609458-1

SEQ ID NO: 54405 - protein, 1177 aa, Salmonella enterica; identical to SEQ ID NO: 52993
  subsp. enterica serovar Montevideo str. 609458-1

SEQ ID NO: 54406 - protein, 259 aa, Salmonella enterica; identical to SEQ ID NO: 52946
  subsp. enterica serovar Montevideo str. 556150-1

SEQ ID NO: 54407 - protein, 1177 aa, Salmonella enterica; identical to SEQ ID NO: 52993
  subsp. enterica serovar Montevideo str. 556150-1

SEQ ID NO: 54408 - protein, 259 aa, Salmonella enterica; identical to SEQ ID NO: 52946
  subsp. enterica serovar Montevideo str. 609460

SEQ ID NO: 54409 - protein, 731 aa, Salmonella enterica
  subsp. enterica serovar Montevideo str. 609460
MIWRDGVLPPGAPDFSAQLSFDLHSYAYGLLGLGLRLLESDGDPNQARIAFEQAATALESVMANGNREEADRDFHFLLAAASYHLAHLSARAYSLLAIVADEANFSPIEHALTLLIRRDINSLRTRVYTFRLDGRGSDATITTFLQQHLTESIVADAAERDGKDFLFEGLNLALTDVFFGAFSMFLLALDRGEYTLLEKAIAQLRENLDICGELNLIPQWWVHRIAIHLLKDFWSNTFHEKVPLLPAGGVAPSWPVLRELFIGLLARRPRAEVDLWPSQIEAASRAVNQTDNLVVSLPTSAGKTRIAELSILRCLAGGRRAIVVTPLRALSAQTEATLQRTFGPLGKTISALYGSIGVSGFDEDAIRGRDIVVATPEKLDFALRNDPSLLDDVGLLVFDEGHMIGSGEREVRYEVQIQRLLRRKDADQRRIVCLSAILPDGDQMEDFSAWLRRDQPGGPIKNDWRPTRLRFGEVTWNSPTARLNLRVGEERPFVPRFLTGAAPPLFVPPKKRRNRLFPDNQQELSLATAWRLVRDGQTVLIYCPERRSVEPFAKVIVDLHSRGALESLLTVELTTLQIAIALGEEWLGTDSYILKCLRLGVALHHGALPTAYRKEIERLLREGILKVTISSPTLAQGLNLSATAVVMHSLYRHGEMIKVSEFKNVIGRAGRAYIDVEGLVLYPIFEDVNNRKHNKWVNLIEDHGAREMESGLIQLIFSLLSRMHSHIGGDL

SEQ ID NO: 54410 - protein, 259 aa, Salmonella enterica; identical to SEQ ID NO: 52946
  subsp. enterica serovar Montevideo str. 507440-20

SEQ ID NO: 54411 - protein, 1177 aa, Salmonella enterica; identical to SEQ ID NO: 52993
  subsp. enterica serovar Montevideo str. 507440-20

SEQ ID NO: 54412 - protein, 259 aa, Salmonella enterica; identical to SEQ ID NO: 52946
  subsp. enterica serovar Montevideo str. MB101509-0077

SEQ ID NO: 54413 - protein, 1177 aa, Salmonella enterica; identical to SEQ ID NO: 52993
  subsp. enterica serovar Montevideo str. MB101509-0077

SEQ ID NO: 54414 - protein, 259 aa, Salmonella enterica; identical to SEQ ID NO: 52946
  subsp. enterica serovar Montevideo str. MB102109-0047

SEQ ID NO: 54415 - protein, 1177 aa, Salmonella enterica; identical to SEQ ID NO: 52993
  subsp. enterica serovar Montevideo str. MB102109-0047

SEQ ID NO: 54416 - protein, 259 aa, Salmonella enterica; identical to SEQ ID NO: 52946
  subsp. enterica serovar Montevideo str. MB110209-0055

SEQ ID NO: 54417 - protein, 90 aa, Salmonella enterica
  subsp. enterica serovar Montevideo str. MB110209-0055
MPTTPDAIIAAITDAATVGFRGRLIARGQARAMIWRDGVLPPGAPDFSAQLSFDLHSYAYGLLGLGLRLLESDGDPNQARIAFEQAATAL

SEQ ID NO: 54418 - protein, 259 aa, Salmonella enterica; identical to SEQ ID NO: 52946
  subsp. enterica serovar Montevideo str. MB111609-0052

SEQ ID NO: 54419 - protein, 1177 aa, Salmonella enterica; identical to SEQ ID NO: 52993
  subsp. enterica serovar Montevideo str. MB111609-0052

SEQ ID NO: 54420 - protein, 259 aa, Salmonella enterica; identical to SEQ ID NO: 52946
  subsp. enterica serovar Montevideo str. 2009083312

SEQ ID NO: 54421 - protein, 1177 aa, Salmonella enterica; identical to SEQ ID NO: 52993
  subsp. enterica serovar Montevideo str. 2009083312

SEQ ID NO: 54422 - protein, 259 aa, Salmonella enterica; identical to SEQ ID NO: 52946
  subsp. enterica serovar Montevideo str. 2009085258

SEQ ID NO: 54423 - protein, 1177 aa, Salmonella enterica; identical to SEQ ID NO: 52993
  subsp. enterica serovar Montevideo str. 2009085258

SEQ ID NO: 54424 - protein, 259 aa, Salmonella enterica; identical to SEQ ID NO: 52946
  subsp. enterica serovar Montevideo str. 315731156

SEQ ID NO: 54425 - protein, 1177 aa, Salmonella enterica; identical to SEQ ID NO: 52993
  subsp. enterica serovar Montevideo str. 315731156

SEQ ID NO: 54426 - protein, 259 aa, Salmonella enterica; identical to SEQ ID NO: 52946
  subsp. enterica serovar Montevideo str. IA_2009159199

SEQ ID NO: 54427 - protein, 1177 aa, Salmonella enterica; identical to SEQ ID NO: 52993
  subsp. enterica serovar Montevideo str. IA_2009159199

SEQ ID NO: 54428 - protein, 259 aa, Salmonella enterica; identical to SEQ ID NO: 52946
  subsp. enterica serovar Montevideo str. IA_2010008282

SEQ ID NO: 54429 - protein, 366 aa, Salmonella enterica
  subsp. enterica serovar Montevideo str. IA_2010008282
MPTTPDAIIAAITDAATVGFRGRLIARGQARAMIWRDGVLPPGAPDFSAQLSFDLHSYAYGLLGLGLRLLESDGDPNQARIAFEQAATALESVMANGNREEADRDFHFLLAAASYHLAHLSARAYSLLAIVADEANFSPIEHALTLLIRRDINSLRTRVYTFRLDGRGSDATITTFLQQHLTESIVADAAERDGKDFLFEGLNLALTDVFFGAFSMFLLALDRGEYTLLEKAIAQLRENLDICGELNLIPQWWVHRIAIHLLKDFWSNTFHEKVPLLPAGGVAPSWPVLRELFIGLLARRPRAEVDLWPSQIEAASRAVNQTDNLVVSLPTSAGKTRIAELSILRCLAGGRRAIVVTPFALYLRKP

SEQ ID NO: 54430 - protein, 259 aa, Salmonella enterica; identical to SEQ ID NO: 52946
  subsp. enterica serovar Montevideo str. IA_2010008283

SEQ ID NO: 54431 - protein, 466 aa, Salmonella enterica
  subsp. enterica serovar Montevideo str. IA_2010008283
MPTTPDAIIAAITDAATVGFRGRLIARGQARAMIWRDGVLPPGAPDFSAQLSFDLHSYAYGLLGLGLRLLESDGDPNQARIAFEQAATALESVMANGNREEADRDFHFLLAAASYHLAHLSARAYSLLAIVADEANFSPIEHALTLLIRRDINSLRTRVYTFRLDGRGSDATITTFLQQHLTESIVADAAERDGKDFLFEGLNLALTDVFFGAFSMFLLALDRGEYTLLEKAIAQLRENLDICGELNLIPQWWVHRIAIHLLKDFWSNTFHEKVPLLPAGGVAPSWPVLRELFIGLLARRPRAEVDLWPSQIEAASRAVNQTDNLVVSLPTSAGKTRIAELSILRCLAGGRRAIVVTPLRALSAQTEATLQRTFGPLGKTISALYGSIGVSGFDEDAIRGRDIVVATPEKLDFALRNDPSLLDDVGLLVFDEGHMIGSGEREVRYEVQIQRLLRRKDADQRRIVCL

SEQ ID NO: 54432 - protein, 259 aa, Salmonella enterica; identical to SEQ ID NO: 52946
  subsp. enterica serovar Montevideo str. IA_2010008284

SEQ ID NO: 54433 - protein, 1177 aa, Salmonella enterica; identical to SEQ ID NO: 52993
  subsp. enterica serovar Montevideo str. IA_2010008284

SEQ ID NO: 54434 - protein, 259 aa, Salmonella enterica; identical to SEQ ID NO: 52946
  subsp. enterica serovar Montevideo str. IA_2010008285

SEQ ID NO: 54435 - protein, 1177 aa, Salmonella enterica; identical to SEQ ID NO: 52993
  subsp. enterica serovar Montevideo str. IA_2010008285

SEQ ID NO: 54436 - protein, 259 aa, Salmonella enterica; identical to SEQ ID NO: 52946
  subsp. enterica serovar Montevideo str. IA_2010008287

SEQ ID NO: 54437 - protein, 1177 aa, Salmonella enterica; identical to SEQ ID NO: 52993
  subsp. enterica serovar Montevideo str. IA_2010008287

SEQ ID NO: 54438 - protein, 259 aa, Salmonella enterica; identical to SEQ ID NO: 52946
  subsp. enterica serovar Montevideo str. 80959-06

SEQ ID NO: 54439 - protein, 1177 aa, Salmonella enterica; identical to SEQ ID NO: 52993
  subsp. enterica serovar Montevideo str. 80959-06

SEQ ID NO: 54440 - protein, 259 aa, Salmonella enterica; identical to SEQ ID NO: 52946
  subsp. enterica serovar Montevideo str. CT_02035278

SEQ ID NO: 54441 - protein, 245 aa, Salmonella enterica
  subsp. enterica serovar Montevideo str. CT_02035278
MPTTPDAIIAAITDAATVGFRGRLIARGQARAMIWRDGVLPPGAPDFSAQLSFDLHSYAYGLLGLGLRLLESDGDPNQARIAFEQAATALESVMANGNREEADRDFHFLLAAASYHLAHLSARAYSLLAIVADEANFSPIEHALTLLIRRDINSLRTRVYTFRLDGRGSDATITTFLQQHLTESIVADAAERDGKDFLFEGLNLALTDVFFGAFSMFLLALDRGEYTLLEKRSPSFVKTSISAGS

SEQ ID NO: 54442 - protein, 259 aa, Salmonella enterica; identical to SEQ ID NO: 52946
  subsp. enterica serovar Montevideo str. CT_02035318

SEQ ID NO: 54443 - protein, 1177 aa, Salmonella enterica; identical to SEQ ID NO: 52993
  subsp. enterica serovar Montevideo str. CT_02035318

SEQ ID NO: 54444 - protein, 259 aa, Salmonella enterica; identical to SEQ ID NO: 52946
  subsp. enterica serovar Montevideo str. CT_02035320

SEQ ID NO: 54445 - protein, 1177 aa, Salmonella enterica; identical to SEQ ID NO: 52993
  subsp. enterica serovar Montevideo str. CT_02035320

SEQ ID NO: 54446 - protein, 259 aa, Salmonella enterica; identical to SEQ ID NO: 52946
  subsp. enterica serovar Montevideo str. CT_02035321

SEQ ID NO: 54447 - protein, 1177 aa, Salmonella enterica; identical to SEQ ID NO: 52993
  subsp. enterica serovar Montevideo str. CT_02035321

SEQ ID NO: 54448 - protein, 259 aa, Salmonella enterica; identical to SEQ ID NO: 52946
  subsp. enterica serovar Montevideo str. CT_02035327

SEQ ID NO: 54449 - protein, 1177 aa, Salmonella enterica; identical to SEQ ID NO: 52993
  subsp. enterica serovar Montevideo str. CT_02035327

SEQ ID NO: 54450 - protein, 259 aa, Salmonella enterica; identical to SEQ ID NO: 52946
  subsp. enterica serovar Montevideo str. IA_2010008286

SEQ ID NO: 54451 - protein, 1177 aa, Salmonella enterica; identical to SEQ ID NO: 52993
  subsp. enterica serovar Montevideo str. IA_2010008286

SEQ ID NO: 54452 - protein, 259 aa, Salmonella enterica subsp. enterica; identical to SEQ ID NO: 52946

SEQ ID NO: 54453 - protein, 1177 aa, Salmonella enterica subsp. enterica; identical to SEQ ID NO: 52993

SEQ ID NO: 54454 - protein, 259 aa, Salmonella enterica subsp. enterica; identical to SEQ ID NO: 52946

SEQ ID NO: 54455 - protein, 1177 aa, Salmonella enterica subsp. enterica; identical to SEQ ID NO: 52993

SEQ ID NO: 54456 - protein, 259 aa, Salmonella enterica subsp. enterica; identical to SEQ ID NO: 52946

SEQ ID NO: 54457 - protein, 1177 aa, Salmonella enterica subsp. enterica; identical to SEQ ID NO: 52993

SEQ ID NO: 54458 - protein, 259 aa, Salmonella enterica subsp. enterica; identical to SEQ ID NO: 52946

SEQ ID NO: 54459 - protein, 1177 aa, Salmonella enterica subsp. enterica; identical to SEQ ID NO: 52993

SEQ ID NO: 54460 - protein, 259 aa, Salmonella enterica subsp. enterica serovar Senftenberg; identical to SEQ ID NO: 52946

SEQ ID NO: 54461 - protein, 1177 aa, Salmonella enterica subsp. enterica serovar Senftenberg; identical to SEQ ID NO: 52993

SEQ ID NO: 54462 - protein, 259 aa, Salmonella enterica subsp. enterica serovar Montevideo; identical to SEQ ID NO: 52946

SEQ ID NO: 54463 - protein, 1177 aa, Salmonella enterica subsp. enterica serovar Montevideo; identical to SEQ ID NO: 52993

SEQ ID NO: 54464 - protein, 259 aa, Yersinia frederiksenii
MVQFNDWCDSADNPVGQHSLRVMTGRAANLAVGVQATAAAIPVHYASEEHVARALRRLGKPAAATLIEGKLPTTKNIRSGDLGEIFATEWIDAQSGGYHAPIKRLRWKDHRNMAMRGEDVIGIFQDPQTHRLNFLKTEAKSRATLTAQVVTEARANLDKDGGLPSGHALSFISARLLELGNVPLADAIDDALLKYGIPPASVRHLLFTFSGNSPEAMLTASLQAYPGIFNQYGIGLRVEGHADFIGAIYEQVITNANNA

SEQ ID NO: 54465 - protein, 1172 aa, Yersinia frederiksenii
MPTTPEDIIADINEAAAAGFRGRLIARGQARAIIWRDGVLPPDAPEFSAQLSHELHSYAYALIGLGLRLRELDGDASKARIAFEQAATALEAVIAKGNRVDVDRDFHFVMAAASYHLAHLSARAYSLLTIVENDDNFSPIERVIARLIRRDFGTLRASVLNYRANNEGSDEYITAAIQANLDEIDSGNNFAGSGNDFLFGGLDTALIDAFMAATSLFLLAVERGERLLLDQAIARLRESLTICGELNMLPQWWVHIIAIHLMSDLWSTTFHERLPLLPEGGGAPEWPKLRELFIALLQSRHKAEIDLWPSQIEAATRAVNQSDDLVVSLPTSAGKTRIAELCILRCLAGGKRVVFITPLRALSAQTETTLLRSFGPLGKTISALYGSIGVSGFDEDAIRERDIVVATPEKLDFALRNDPTLLNDVGLLIFDEGHMIGLNEREVRYEVQIQRLLRRPDAHERRIVCLSAILPDGDQLDDFAAWLRRDQPGGVVKKDWRPTRLRFGEVVWTSPTARLNLRVGDERPWVQRFLTGTAPPNWVPPKRRRTRIFPDNQRELCLATAWRLIEDGQTVLIFCPQRRSVEPYAEVIVDLHERGALRSLLEVDPIVLNTAITLGEEWLGANSMILKCLRLGIALHHGALPTAYRKEVERLLRDNVLKVTISSPTLAQGLNLSATAIVMHSLHRNGEVIEVSEFKNVIGRAGRAYVDVEGVVLFPMFDEIVKKKRNWEALITDLGAREMESGLVRLVAVLLLRMRARIGGDLNELVDYVVNNAAIWTFPEVENEKPEARERALADWEKHVATLDTAILSLLGENDVPEEEIEDALDNILQSSLWQRRLLRHNEQTQQLLKAGIISRSKFIWGHSTAVLRRGYFLAGVGLATGHALDAIAVNVNLLLLEANSAILHDDAEEAVATITALAEQVFAFHPFKPDILPGSWRDILRAWLLGQPLAGIAAGQESETLQFIEGGLVYRLPWAMEAIRVRAVANGDAVGELGLQLDEYELGQAVLSVETGTLNRSASILIQAGFNSRLAAIKAVTDTGATFHNGRELRQWLNSEIVAGLSVQADWPTAETKTIWTDFVQSFSPTENRTWEERRYWVNVAWLGAPPQPGTPVQIYHGVGQPRVLAADGKPLGSIPVALNPARSGLLRAQVAQDVTRIDLIYLGPADLLQI

SEQ ID NO: 54466 - protein, 276 aa, Anaerococcus lactolyticus ATCC 51172
MNLFFDNSKYFIFDKLIPTSSGEEIQVYKLNSELLDDNSLNNWALGLRDNYVEEILLESLVRGTGLTQKEFLEKNIFPNHQNKLGASTMSGEFGEILVYDYINFVLKHYITRTRYLEKVNPDMPVSGSDVIGYKVKNINKPSKSDHLIVAEVKTRSSKVGNKNRLCEKTVKDAIEHSIKDRVRIGESLNAEKRRLLNRSRNDEAKIVERFQNKTDNPFTLDFFAVAVLDNELYSDQVVLDVVNSQHENIKSTNILIIHSKELKLFLRDLYRRACLC

SEQ ID NO: 54467 - protein, 1032 aa, Anaerococcus lactolyticus ATCC 51172
MLIESTSKYYLKKVRAKAKMYEYGVPENLHIEVEDQANDLILLCIGIVGDIANEIWNMEQAPIILPKEKEEELYFVSRFFDSYFQSKMSIEMNPYYILMGAVTYYFCNMNGSSKVMISIMPDLSDFEFFASGLENVIMWMLDNNHKFDVGKIDGKYRNYIVQLVDYYNMFFDCKNPNNSNFDDFRSYVYKLGNDREILFTDIILAILKKKIYNSCINLMPLYSGIDKNDWISTFKNNALMKEMWSSQILLGKEGIFEGKSGFIQMPTSSGKTTSVALAVQAAFLSHRTSIVVVVAPFRALCKEIMLDMEKFFAFDENISVTEFSDIPEPSEIELVKSESIGKKIFVMTPEKLEYILKHDTEIIESINMIVFDEAHLFDDESRGTDYELLLTTINSYLRPDAQKILVSAVISNAEQLNAWINDDGIVIKNNTIKTSEKTVAFNTFTSTNVNNAYSNLYFVDPNKYLEEEFYVPRVVQTREINKKGNEKKLRYFPDFKNNTQDVGIYYAIKLIRNGCIAIFCSKKDSVNKILLRFIELKERGVSLEDFSRLSDYAECSKIAYLIREHFGENDLYTAALNGIVGHHSGIPNGVRIAEEYALKKSLVRCVVCTSTLAQGVNLPIKYLIVSSVYQSKQVIKVRDFHNLIGRTARAGKETEGTIILTENIYKNSKEDYKLNKYKRLLNADNSEECSSNLLKLVREVDLGNNRTISFDFLKKYINSRYSNKAEYTELKKGIIEYKEQGKECGEEIFYKMNEIDHILVSLENFILGFVDVEDESFEIIKSTYGYYLANEEEKEELKNIYNLIKSSIDSLEVTNKLIYRKSMLGILKMKELSIFIDNNLYEIVNANFDELIRIIANRLKESEVCKIIPKFVDDSYVYDLLKIWINGKSYIEIWSYAKSVNLLVKRGKRSRDISLEDIITLCDSDFGYASLTIIQAIIEVLNTKDCSENTQENLSDIIYRIRYGLPNKESVFIYELGFADRIISQKIANEISDFDCSTKTKTKSTIKSNREKLRVLLSNYPSYFLDRLQKLR

SEQ ID NO: 54468 - protein, 258 aa, Komagataeibacter europaeus NBRC 3261
MVRFPNWCDSAREDVGPHALQVISARAADTANGCVAVAAIVSEHYAAEVQVVRILRRLGRPKAAAFIENKLPTTKSIRSGDLGEILATEYITGETPYDVPIKRLRWKDHRNMAMRGDDVIGLMRDQATGRLHFLKTEAKSRAALAGGVVTEAREGLDKEGGLPSAHALEFISARLMEAGEDALADAIDDALLKHGIAPQTVTHLLFTFSGNDPGNILRTNLQGYAGGYPQHYVGVRIDAHGTFIANVYDRVIADANHG

SEQ ID NO: 54469 - protein, 1134 aa, Komagataeibacter europaeus NBRC 3261
MIWRDDVLPPEAPAFTPHLSNDLLGYGYALLEMGIRLRDKGGDRVRARTAFEQAATAIEAVIARGPRGGSDRSFHFVVGAASYHLARLSARAYSLLSHVIADANFSRSERALALLMLRDLDELESMVLAFRGSGAGSDRTITASLENQLLVEESLGRPEGDDPGFIFDAVDTVLTDRFFGAIAMFLVALERGERALVDAAIAELAENVAASEELNLVPQWWINRIAIHLLSDLWDCSFHNLLPIVPAGGDAPTWPGLRTLFLAVLHSRRKAELELWPSQIDAAARSVNQADDLVVSLPTSAGKTRIAELCILRCLAADKRIVFVTPLRALSAQTEIILQRTFGPLGKTISALYGSTGVSDVDEDAIRTRNIVVATPEKLDFALRNDPTLLDDVGLLIFDEGHMIGLSEREVRYEVQIQRLLKRADAADRRIVCLSAILPDGDQLDDFACWLRRDQPGGLIKNDWRPTRLRYGEVLWNGNSARLNLRVGDERPFVPRYLASFVPPVGRRTTPFPKNLGELCLATAWRLVNDGQSVLVFCPVRKHVEPFADRVIDLHRRGALRSLLTVDPAVLETALVLGAEWLGAAHPILECLKLGVAIHHGALPTAYRKEVERLLREGVIKVTISSPTLAQGLNLSATAVIIHSLYRNRARIEAAEFKNVVGRAGRAYVDVEGLVLYPIFDQHYYRTAQWEGLIADITSREMESGLLRLVLTLLRRMQAQVKRSLPDLTEYVLNQAQAWAFPAVAGESPEDAERECRAWDGYVASLDTAILALLGDAEVPDDDIAEALDTILRSSLWSRRLNRRGEEAQAALRAGLIGRSRVVWANSTPQQRRGYFLAGVGLGTGHALDAIAAQANNLLVAANAALQEPDVDAVIQAITGLAELVFPIFPFTPDVLPDNWRDILRAWLLGQPLAHLGPGDPSATLQFVEGALVYRLPWAMEAIRVRGIANGDALGDFALDDFELGLAVAAVETGTVNQSAAILIQAGFTSRLAAIKAVTDTEANFATMGELQVWLGSDVVQAFDQLAGWPTAETKVLWKEFVAGFVPVEKRTWSERRYWAWVKWCEGIVPAAGSALRLKVLDGQRLVAAADGSVMGELQAVLNPNHRGLLRTQVSAEVNKVDITYYGPDDLWLA

SEQ ID NO: 54470 - protein, 274 aa, Streptobacillus moniliformis DSM 12112
MFFDNSKYFIFDKSIPTSSGEKIQVYKLNNELLDDNSLNNWALGLRNNYIEEHLLEQAISGTGLAKKEYLEKMIFPNPRVPQGAATMSGEFGELLVYDYINYVLEYYVPRIRYFNKVNPNTPIHGSDVIGYKMESYNKRSKNDKLLVAEVKTRSSISGNKTKICTNIVTDAITDSNKDRVRVGESLNAEKLKLLNRGRIKEANIVERFQNKTDNPYTLDFFAVAVMDSDLYSDQVVLDVVNSQHENVKCTSILIIHSKELLLLLRDLYRRACSC

SEQ ID NO: 54471 - protein, 1032 aa, Streptobacillus moniliformis DSM 12112
MLIESTSKYYLKKVRAKAKMYEYGVPENLHIEVEEQANDLILLSIGIVGDIANEIWNMKQAPIILSKEKEEELYFVSRFFDAYFQSEMSIDLNSYYILMGAVTYYFCNMNGSSKVMMSIMHNWNNFEFSASGLENVIIWLLDGNYKFDVSDIDEKYKSYIIQLINYHNRFFDGENLEKAQFEEFRNYVYHFGNDREILFTDIILAILKKKIYNSCINLMPLYSGLDKDNWISTFKNNAMMKEMWSSQILLGEKGIFKGKSGVIQMPTSSGKTTSVSLAVQSAFLSKRTSIVIVVAPFRALCKEIMFDMEKFFSFDKNITVTEFSDVPEPSEIELVTSESIVKKIIVMTPEKLAYILKHNTEIIESINMIVFDEAHLFDDETRGTDYELLLTTINSYLKPDAQKILVSAVISNAEQLNTWINKDGIVIRNNTIKTSEKTVAFNTFTSTNINNAYSNLYFVEPNKNLEEEFYVPRVVQTKKLKKIDGERKFRYFPDFKNNKQDVGIYYAIKLIANGSIAIFCSKKDTVNNILKRFIDLKERGISLEDFSTLSDETECSKIAYLIKEHLGENNLYISALNGIVGHHSGVPNGVRIAEEYALKKSLIRCVVCTSTLAQGVNLPIKYLIVSSIYQSKQVIKVRDFHNLIGRTARAGKETEGTIILTEDIYKNSKEAYKLNNYKRLLNADNSEECYSNLLKLVREVDLGNNRVISFDFLKKYIESRYSNKAEYTETKKGILEYKEQGREYGEEIFYKMNEIEHILVSLENFILGFADIEDESFEIIKSTYGYHLANEDEREELKNIYNLIRSNIESIEVGDRLLYRKSMLGILTMKTLSRFIDENLYEIANADFDTLINLVANKLKESGNCKLIPKLIDDSHVYELLKMWINGKSYIQIWDYSKSVNLLIKWGKRSRNISLEDIITLCDSDFGFASLTIIQAIVEILNTKDCGENIQEALNDIIYRIRYGLPNKESVCIYELGFADRIISQKIADEIIEFDCSTKKKTKSAIKSNREKLKELLTNYPLYFIDRLEKIR

SEQ ID NO: 54472 - protein, 258 aa, Burkholderia xenovorans LB400
MVQFNDWCDSADTPIGNHYVRVITSRPADVPTGIQLTASTVPGHYAAEERVSRALARLGKVEAARMVTDLLPQTPQIRSGDLGEIYATEWINSQSGYRAPVKRLRWKDHREMAMRGDDVIGMILDPETQRLRFLKTEAKSRNNLRAQTLTEARAGLDKDGGLPSAHALSFISARLLDLADLPLADAIDDALLRHGIPVDNVRHLLFTFSGNAPQALLEQSLQAYPGPITQWGVGLHVDGHAAFIGAVYTQVIANGNHP

SEQ ID NO: 54473 - protein, 242 aa, Burkholderia xenovorans LB400
MATTPDAIGQAITEAAAAGFRGRLIARGQARAMIWRDGILPADAPAFSPQLSFDLHSYGYALLNLGLRLLEMGGDPGQARLAFEQAATALEAVMAKGNRREVDRDFHFVMAAASYHLAHLSARAYSLLAIVAADENFSPVERALALLMRRDIATLRAHVYAFRLDGQGSDARIAGLFQERLGQENVAGDLQRDGHDFLFEGLDLALTDIFFGALAQFLLALERGERQLVERAIGAYFGEAEH

SEQ ID NO: 54474 - protein, 258 aa, Burkholderia xenovorans LB400; identical to SEQ ID NO: 54472

SEQ ID NO: 54475 - protein, 210 aa, Burkholderia xenovorans LB400
MIWRDGILPADAPAFSPQLSFDLHSYGYALLNLGLRLLEMGGDPGQARLAFEQAATALEAVMAKGNRREVDRDFHFVMAAASYHLAHLSARAYSLLAIVAADENFSPVERALALLMRRDIATLRAHVYAFRLDGQGSDARIAGLFQERLGQENVAGDLQRDGHDFLFEGLDLALTDIFFGALAQFLLALERGERQLVERAIGAYFGEAEH

SEQ ID NO: 54476 - protein, 272 aa, Enterococcus casseliflavus EC30
MSFMDIPKFIDYFIHEEIVITDKGKDISVIKIEINDDLTVFEQWARHLREHYCSLEELDELREGTGLSRAEFLRDMKFPNPNFGLGSATMSGDFSEILIADYIEYILNYIVPRVRYRQKFNRNTSTQGSDLIGYKVESIETNSINDEMLIVEVKARNSESNPEATLQNAVDHSAKDLVRIAESLNASYRMLKNYNEEEGMRLVRRFQNPTDRPHKRTFAAAAVSSDKAFSRELLKEIDTSEHPSPDVQLIAVHSPKFLEFIKQMYVRAANVN

SEQ ID NO: 54477 - protein, 1026 aa, Enterococcus casseliflavus EC30
MFEYNVPLEEHIQVEYMAQELIVLAIATIGDASNFIWDNRYTEFSSKLNNELFENLNFTSIYFDSLLTSEIGEASYNDYFGLLGAISFYLSDALGSTKVMINKIDWAMDLEINEIDTFLLYLLADRLDELKGYEFSSQYGNLFYYLIYDLSQFYLDGTPIDFEKLNDLKQEIYLSQNPREILFGDSLLAVFIKKYKNSALNLLPNYSDTTIQDWEDLLLNNHTIKELWPSQILLGEKNIFKGKSGVIQMPTSSGKTTSIGLIIRSAFITHRTKLAVVVAPFKALCKEITLNLIEFFSNDEVIINELSDIAEKDDIAFFDNDIATNTLIILTPEKLLFLIRNNSEILEELNLIIFDEAHLFDDSSRGTNYELLVSTIRYYLNESSQKILISAVIANSEVINEWLNGTDGEVISNNNIISSQRSIAIGDWMGQTGQLYFLNQDNPDIDDFYVPRIVDIREINRLDRERAKRYFPDVDFRKRKLNKPYDMQIYYALKMVHNGATAIFSGTKKTADKTIERLLELEERGLDISAFSNEVSQNENTKIASLINMNLGSDTEYYISALKGIFIHHGNIPLGIRLSVEYAMSQNLINFVVCTSTLAQGVNLPIKYLIISSLYQGKSQMKVRDFHNLLGRVGRAGKHIEGTVILSEPFIHSNKSNWKWNRYKNMLDIDNSEDSESNLLKLVRPIIIDKFPPINLWNVLPQKYTNQEQFNDVINKIKTVISNSNFPNKISDFNFELKIILDILKDVENYVMYFVKYFKDSNPNFTNMVTQQTLGYHLASDSEKEKLVELFEVIKTYSLSFTEAELSLYSISSLGFDNSKVLSQWISEKIENITQARSEFELIDIIFPQLILFSENNIINRIDDTSIFTQICELWTQGQSYSDILNYCQSNQFQISKRNQLVPLILQDIIEICDNILAYSTILPLNGVATFMENSENDSTLHLIKSLQKKIRYGLPSNLSINIFELGFSDRVIAQILARIIENSSSFTITSISKRITKELLRQNKREIEEALKVFPQYFLDILRKI

SEQ ID NO: 54478 - protein, 272 aa, Enterococcus casseliflavus EC10; identical to SEQ ID NO: 54476

SEQ ID NO: 54479 - protein, 1045 aa, Enterococcus casseliflavus EC10
MLIENNSKYYLKKVQAKSKMFEYNVPLEEHIQVEYMAQELIVLAIATIGDASNFIWDNRYTEFSSKLNNELFENLNFTSIYFDSLLTSEIGEASYNDYFGLLGAISFYLSDALGSTKVMINKIDWAMDLEINEIDTFLLYLLADRLDELKGYEFSSQYGNLFYYLIYDLSQFYLDGTPIDFEKLNDLKQEIYLSQNPREILFGDSLLAVFIKKYKNSALNLLPNYSDTTIQDWEDLLLNNHTIKELWPSQILLGEKNIFKGKSGVIQMPTSSGKTTSIGLIIRSAFITHRTKLAVVVAPFKALCKEITLNLIEFFSNDEVIINELSDIAEKDDIAFFDNDIATNTLIILTPEKLLFLIRNNSEILEELNLIIFDEAHLFDDSSRGTNYELLVSTIRYYLNESSQKILISAVIANSEVINEWLNGTDGEVISNNNIISSQRSIAIGDWMGQTGQLYFLNQDNPDIDDFYVPRIVDIREINRLDRERAKRYFPDVDFRKRKLNKPYDMQIYYALKMVHNGATAIFSGTKKTADKTIERLLELEERGLDISAFSNEVSQNENTKIASLINMNLGSDTEYYISALKGIFIHHGNIPLGIRLSVEYAMSQNLINFVVCTSTLAQGVNLPIKYLIISSLYQGKSQMKVRDFHNLLGRVGRAGKHIEGTVILSEPFIHSNKSNWKWNRYKNMLDIDNSEDSESNLLKLVRPIIIDKFPPINLWNVLPQKYTNQEQFNDVINKIKTVISNSNFPNKISDFNFELKIILDILKDVENYVMYFVKYFKDSNPNFTNMVTQQTLGYHLASDSEKEKLVELFEVIKTYSLSFTEAELSLYSISSLGFDNSKVLSQWISEKIENITQARSEFELIDIIFPQLILFSENNIINRIDDTSIFTQICELWTQGQSYSDILNYCQSNQFQISKRNQLVPLILQDIIEICDNILAYSTILPLNGVATFMENSENDSTLHLIKSLQKKIRYGLPSNLSINIFELGFSDRVIAQILARIIENSSSFTITSISKRITKELLRQNKREIEEALKVFPQYFLDILRKI

SEQ ID NO: 54480 - protein, 260 aa, Oligotropha carboxidovorans OM5
MGLYERWCESTKEKDKRKHYWTYVEKDGGRDEISGDLAETIRSHYDRLERIAEDVERLGYTVAAKILSEAMPQTAKGRSGDLGEILATELVEEDIGLRVPVRRLRYKDGRNMAMRGDDFIGAGYGGKDEKLWLLKGEAKSNKKLGKSTVNSARKVLDRDSGRCTPDSLLFVANRLLESNDPAENALGRDLRDEVGVKSLRADRIDHMLFTVSGNGPHASLREDLDAAGTNRDHYVVNIHVEDHQDFIAAMYQGAEDLGDA

SEQ ID NO: 54481 - protein, 1174 aa, Oligotropha carboxidovorans OM5
METPDELTAFLATATVDGILGRLLYRGAAWSLMREAGVLPQNAPPLGATIETDLAEHGFALLRGAMALRAQTGASDLTDKAFERAANAFEALVRNGDPEAPERGFRRTIAAAAYHLAGYSAVAYSLFNELAEDLNAAPGETAIRHLILRDLDQLRGFVRDWLGNEAHSDEQMAETLGGDEPDIDDVLSTILNTTICRALAFFDFALETGEDEPIDTARDLLATAVSLADNAENVPLWWISNLCRHLIDDLWQHALHQNLPTEPPAGTEERYPDLRRLFIGSLYARKTSEVELWPSQREAAQRSTDVTDDLVVALPTSAGKTRVAEIAALMTLSSARRVLIVTPLRALSAQTERSFRKTFAPLGFSVSSLYGASGLSVGDEDALRTREIIIATPEKLDFALRSDPSLIDDVGLIVLDEGHMIGPSEREIRYETLVQRLLRRADAAERRIVCLSAILPSGDELNDLTAWIRSDEPGEPVRSDWRPTRQRFGALTWRGKDALLRLDLDDDGPFLDKFVEEKPARGREKNPYPRKNSHLALFAAWEFAGQGKRTLIFSTQANWVESYGKQVVDLCRRGYLDSLLEDEAPIARALEVGKEWLGEDHPAVASLKAGVAIHHGRLPSPFLRELEVLLSEGVLKVIVASPTLSQGLNLNAAVLLVPALYRAGEKIKGEEFANVAGRAGRAFVDVEGLIVHVMFDKTDWRKKEWRKLVASAKARTLKSGLIQIVAEILERLSREGVLDRDDAWEYLANAREAWRSPTEEAEVAERLAAAGEYDSVPDADEDDETDEGDEEETIDEEPLSQLVERLDATVFGLIEALDADRADLPKLLDEALKGSLWARQIAHEEEEVAPLHKKVFEARAALIWKSTTPQARRGHFAMGVGLEAGLSIDTMADELAQLLDRADDAALSGDVDELADALGGLGERLLFMRPFIPDKKNALPANWKVILRAWISGDAVEKIGPQNMRAVEEAFTYRLVWALEAVRTRRMSLGWSPETVAGGAAAAVETGVPQFMMAMLIRAGLPSRRAAIAAIQDAEPIFVTPAEMRAWLESDEITAYTDAGDWPTPDTAALWARFRTEALSGGIQKWSVERYKRLLDIAAAPPAGLYRIVTDEGDGRTWLETPDYRRVAPFKKPAVDPKPSLFSGRLPGNTRLVEALRVGRGKLRWPPADARGEN

SEQ ID NO: 54482 - protein, 260 aa, Oligotropha carboxidovorans OM5; identical to SEQ ID NO: 54480

SEQ ID NO: 54483 - protein, 1174 aa, Oligotropha carboxidovorans OM5; identical to SEQ ID NO: 54481

SEQ ID NO: 54484 - protein, 260 aa, Oligotropha carboxidovorans OM4; identical to SEQ ID NO: 54480

SEQ ID NO: 54485 - protein, 1174 aa, Oligotropha carboxidovorans OM4; identical to SEQ ID NO: 54481

SEQ ID NO: 54486 - protein, 259 aa, Stenotrophomonas maltophilia
MAQFNDWCSSVDTMVGNHHRLVMTAQPANLAIAIQATAAIVPSHYASEEHVARALFRLGKPAAAALIEEKLPTTKQIRSGDLGEIYATEWIAAYSGGYSAPIKRLRWKDHRNMAMRGEDVIGIRQDPHTLGLQFLKTEAKSRAGLTAQVLTEARAGLDKNGGLPSAHALHFISARLVELGDLALADAIDDAQLKHGVQSQSVQHLLFTFSGNAPDDFLATTLQAYTGHINQWAVGLRVEGHVAFIGAVYDRVIADANNP

SEQ ID NO: 54487 - protein, 1177 aa, Stenotrophomonas maltophilia
MPTTPESIAADIAQATAPGFRGRLIARGQARAIIWRDGALPPDAPDFAPQLSYDLHSYAYSLLGLGLRLRELGGDPAVARTAFEHAATALEAVIAKGNREEEDRDFHFVMSAAAYHLAHLSARAYSLLAIVEREDNFSPIERALAHLMTRNFNALRTSVLDYRTLGQGSDERVAAFIESHLNQLKVANVSPDPGGDDFLFEGLNTAVTDAFMSGMSLYLLALDRGERELVDHALEKLRVSLAVCGQMNLLPQWWVHRVTIDLLSDLWSSTFHERVPLHPLGGAAADWPQLRELFIAALQRRRRAEVDLWPSQIESAARAVDQSDDLVVSLPTSAGKTRIAELCILRCLAGGKRVAFITPLRALSAQTESTLQRTFGPLGKTISALYGSIGITDFDEDAIRKRDIIVATPEKLDFALRNDPSLLDDVGLLVFDEGHMIGINEREVRYEVQIQRLLRRADAGERRIVCLSAILPDGDQLEDFAAWLRRDHPGGLIKNDWRPTRLRFGEVVWTSPNARLNLQVGEERPWVQRFLTGITPPNWVPPKRRRAQLFPKNQAELCLATAWRLVDDGQTVLIFCPERRSVEPYADVIVDLHERGALRSLLDADPNILNTAIALGEEWLGSTNPILKCLRLGVALHHGALPTAYRKEVERLLRDNVLKVTISSPTLAQGLNLSATAVIMHSLYRAGELIDISEFKNVIGRAGRAYTDVEGLVLYPMFQDAYRKRAAWADLVTDLRARNMESGLVLLVVELLTRMSASIGGDINQLVEYVVNNAAAWNFPEIANEQQERRARAAEDWGRYIATLDTAILSLIGESDIPDEGIEAALDNILQSSLWQRRLLRIEPEMRRLLRASLSSRSRLIWSNSTAAKRRGYFLAGVGLTTGLALDAIASEVNILLIQANGAVLAGDAEAAISSITSIAERVFAFYPFTPDTLPVNWKGILRVWLLGEPLTTLVGEITSDVLQFVEGGLIYRLTWAMEAIRVRAIANSDTVGEERLGLELFELGLAVPALVTGSLNRSASILIQAGFNSRLAAIKAITDTGGNFSTRSELRQWLDGDVVAAWNAQADWPTRETRKIWLEFVQSFAPSAGSSWAIRPYWASIEWLSVPPPPGTVIQLHHLDGRTWALSAEGAPLGMLKGTLKANRSGLLRAKVAQDVSRIDIEYLGPDDLATAEPAS

SEQ ID NO: 54488 - protein, 123 aa, Blautia obeum ATCC 29174
MVAAEVKATLSNTEYIPIKNAIIDSRKDEHRLARSVNYCRKRLKELGKIEEAEEVKRFLFKPDNNYRITYVAAGVSSRENVDDAIELDFSGEELEIRKNELIFYVHGKKLMELAHNIYQRCCK

SEQ ID NO: 54489 - protein, 1016 aa, Blautia obeum ATCC 29174
MIFGKNAGLMLKYQKAKAKMVEYDVSKQEYPHFPLNSNELSYPTTYVLSRYSECIIENNHDELKELELLLITTAEYYDSAFKSKDRPEYDWDFLLSGASAYFLRKDFGSAKVLAARVVDLIDEERSPQKLLTNIYNYLLGGVYLPYLRVIDTYERINNFFLDYFGKGKSLEALKSNLWVYRNEIYENGDPDSIFYVDILVAVIIVACENSSWSLLPSSSGILDEEWESYLQSKMSIKMLWPAQRLIAEKGLLRGESSIVQLPTGVGKTRSIELIIRAAFLSERANIAIIVAPLRALCNEITMDMYKAFGNDVTINQFSDVLQNDFWNLFSEDIKRQILICTPEKLSYVLHHDPFFLSAIDLFVFDEGHMFDDGGRGATYELLVTHIRQNITSEQQLVLLSAVLPNSGDIAQWLFEDRGCLATDDRIVSTPKSIGFSSTQRDIHFFSDDKSNEDYYIPRILRVEQLKKLPRERSNKYFPDLSSSIDVAIYNAIKLCHNGSVAIYLGQQRSMKTVFERIINLDKRNYDLKALKDNTNQAELSKIKGFIESYYGSEHYYTKAAELGVLPHSSNLQNGVKLVVEHALKNKYVSCVVCTSTLAQGVNIPIKYLLVTSIRNGLKLVKARDFQNLMGRTARAGIYTEGSIIITDCKIYDNRTNWKNGGGYLWNDCVKLFDTKLTEPCGSSILSLVQDFNIDYDVTVSGEKFIDIVIDHLDERDFLLDYAKKLEKAYLKTNPKRTQNLIVQEILLRQDIISNIENYLCLVRSAETLVNDSKKSIVDICTNTLAYAIATEKEKELLIKVFQKIEENIQQYSVEKLSRYSNAMSGIGLSSLIEEWIVQNELTEKIYTETELLSVIAELYLQICGDFRYQEHIQSICKKWIDGQTPMEINNKETIGIAEVESLCNKRISYEMNFLIGNICDLIEVDGENEEQVDQRNILTLLQKKVKYGVPNMTAISICESIFNDRLLAIELAQILSDANIGTDKILNMLKAHSEEIFSCLDSYPEYFKDRLSVLMK

SEQ ID NO: 54490 - protein, 264 aa, Pseudomonas denitrificans ATCC 13867
MDDLGFDFGNAVQWFPHEQEQPYVLVRMTAQQVALLEAAMAEPLRRCYITDEVLEAAADRHGLTLSDVLASKLPDAGATMAGDFGEVLGYFYQSAMEYPGAAIGPKKWRLKQDRTKPAPKSDVIHFIMPQRPSASADDQVLCAEVKVKSTSASSDPIGSAITDCAKDRTSRLASTLVWLRERAITEDLGDVDIPLLNRFINAVDHPPAALRYRAVAVICESFVTAELSNAPATASDKYTLVVISVPNLHATYNAAFAAARASVL

SEQ ID NO: 54491 - protein, 994 aa, Pseudomonas denitrificans ATCC 13867
MRASLQNWINDADMARHLGQFSVAALPIELAQIGNRLADYYISLVGELFDGIHSTNTPSDDWAQLGNAFLQFSKETPAEQVEALGISKDEAALFAAAAFYFGDFPASACLAMRQSTRPTDPQSPWAACYDFLARPSSLGSQTAIEVREQLRSGDLFGLSDNVEASATEAQSALADGPDTWVAAALLSRLLARFEASNFRAVLPEGANAFWTPLINSFINRKPSTWEFFPSQIQAIERGLLGNAESYSLQMPTGAGKTTLCETLLYWHLKRNPTHVAIMIVPYRSLASELRHSLVRQLNGLGIAARCAYGGTIPSGDEVHGLDHINALIATPESLSGILSADPAFAQRISLVICDEGHLLDSSGRGIGLELLLARMKARQVNPIRFVFMSAIIPNIEEINAWLGGGEDTVIKSTYRPAIAEFSVLRSAGSGVGKSVRLDMHPHAQQRQYSIHGFLDRNTFQYVNARTARTKTYGFSSTKTLAVAAARKVLSMGTTAIFAANKRGDQGAIGLAEELIKQLEYPLPLPKPIDHADLEALRTRVDYLETEFGAAWIGTRSLHNGAVLHHGDIPQETREVLEELLRDRRVQLVICTSTLAEGVNLPIRSLVLYSVQRRMGSGRPENMLARDIKNLVGRAGRAGANTRGLVICANPDQWWLVLPVATAGAGEPVRGSLRTLIGELEHFLRTHSIALDNQFLESQPASHPLIDGVDATLIELIAEEIGDAEFLRLATDLSDHTFAAHQLPVGSAVTLRTVFKLRAQRLIALRADGKIAWLQATGAKVRLLEFVEQVLLPSRADWASPVDPASDDILSAILEWAWQDTELKSDVRVAFRLENGQDLETVKATFFGIIRQWVRGATYAKIAQATQMEVDEILGIHTRAITYSLQTLVEQGVSLLARLLLERGIAVNDGVAAFAEHLKFGAPSRFGVLLANGGVRHRKAYVALGNAIQALTPAVQHASAKAVALQSLENYPDEWRDALGEFVYSNTLKDVGGVG

SEQ ID NO: 54492 - protein, 178 aa, Bacteroides caccae CL03T12C61
MLRKYYLLIIFKHHKKKEFIKVYKLKYNPNVDQAIKGDDTLMVDLFEENGNEKIKIYLGESKFRTTPQKNVVEDITKSLNKDTLPLSYTFLVEEIAKSDELLARKLDDYIVQDIKDRGDLIYVGLLLSNTKTSETVEKHLNSDNSNLVFISIGIGQPEEFIKSIFEKAEELISNPDLL

SEQ ID NO: 54493 - protein, 1116 aa, Bacteroides caccae CL03T12C61
MNIEHVEKSYQELESDSTLQNLIAQANARYILYNTEESKENFPRYTIKDEQLNILAFKYLNIGCNYFSEHNYLKASHSLEKGALILEYIHGSIHIQTKNKKLFCLISALSYYVCFQYSKAFILIGKLESDTMISSLVSLFLNRKFDQLLSEIDKLITNSSYGDEYLAEHFEEDNATKIYEIIIAKSLNYYVQFYQTGNKDFLEIAKKDLVNLQEVAAMRGEPDVWWVIRLLLLIIDGFKESSLWYVLGNYFNTEDKLPLKYIQSLVYKNGSITELFLTQRNSLPKVLNNKQGSIVSIPTSSGKTRIGEIAILNCLLNEPKAKILFIAPYRSLAYEIENSFDEIFSNLDVSVSHLYGGSLFSKLDERIIDESSVIVATPEKAKALFRSNEDILSCIKLVIIDEGHLLGTDKRLIVNEMFYEELKYHVKANGGRFLLLSAVLPNAEDLSEWLTDSTDNVYKENWRPSDERIGIMEWNGVSVNLNWKSTDAERNSFNPNFIMRQKLPKKPKERIMHYFPENKNQAIASTAYKLRKFGPVLIFVGIKKSVFAIAREYEKCIQPEEQKFRFRNKANWRAFKLACIESYGEDTEWVKFAKQGIFCHNADLISDVRIPLERLMRSEKPRVIIATSTLGQGVNLGVSTVIFSTLYQSGNPITKRDFWNIAGRAGRAFVDHEGKILVAHDITKKDENKINWERKMISAYLNKSNIDRAESGCLELIRTLKTVAQLNGIAFDNLINLLAENRINEIDESLDEVNDLLDLIDDGLLSLHNSNNFEGNTLEWIDSYFTKSLAYIQAQYYEDITGDEVLDFIKARIKGITKKVGIEKSIWESIVSSGIPINSDLQIDEKLSEIISIVQSYIVSDKTLEERISLLENIEDVIRDVNIYKEKFEDSVDIKEIRKKWLSGISMSDIVQHENAVNIVTQHYSFNMPWVLNGISKKMKKQNLIEEADTIEELAILVELGLPNIKSVKIYQAGIRSRISAYEIANLYDDDLWEKSIRTYKQDLIDHADYYKNQVSENAALWIDLLVRFSKRKFIKIKKVPNFRYGKVHKRTKRLMARIINDKQYLVSPNFSVINEIGESDIDFSKVSNINGIYFDYDEDDKLWKITCMNPYVVFT

SEQ ID NO: 54494 - protein, 273 aa, Bibersteinia trehalosi USDA-ARS-USMARC-190
MSFSFHHMKWLIDTGNQLKTQDGKEVKVLEFQHEYNDEILSEWAKHFRNQYCKDEQIDSLRNGTGLSRKEYLNQIKFPDKSIPPGPSIRAGDFAEILAADYLEYQLRHWVPRTRYSHKTIRNESEKGSDTIGFLFFTDDISKGSSQDTLTIIESKAKYTGQHDNKLQTAVEHSNKDVIRKAETLNAIKQRFLDKEDYTNSKRIERFQNEADNPYIQQFGAIAHLDNNNYADDVITSVNASKHSYSNELFLIVIKGKEMMKLVHELYKRAADEA

SEQ ID NO: 54495 - protein, 1054 aa, Bibersteinia trehalosi USDA-ARS-USMARC-190
MNYIREQQMKPEKKSQNLLSITRAKAKMFEYDVPENEHIRISDNPDKLFTLSISLLGDFAAAINRGESELPYFLEMQKNLHFSAYFFDSYIQSKLDNSVDQYLLLLGAAAYYLCDSPGSSLVLIEKLKKTISSSGIDELYFPNLNGDGLDFLLFWILESNYTFHFSNIQSIFGEFIEKISKKICMFFSLGNKNNIDDLLDELREFSYANGSARHILLSDVICAVINKKLYNSSWECLPKYSLLSKGRWSETLKKESFIKEFWPAQHLLGKANVFQGNSAIIQMPTSAGKTKAIELIIRSAFLARRASLSIVIAPFKALCNEIKNSLSDAFHNEIKVDELSDVLQADFEITKLLGHKQILVVTPEKLFYILRHNPELSEYIGLLIFDEGHQFDSGMRGIAYELLLASLKFMLHENIQKILISAVIGNADKIGEWLNRTPNVINGSTLTATFKSIGFTSWLDQLGRIEYVNAHNIENNEFFVPRVIEKISLARKERERKNRYFPEKEDGQSIALYLGLKLVPNGSIAIFSGRKDTAAKICEKITDIVSRNIPLPLPSEFSDNEEIERLKNLHIANLGSASSASISAGYGIFSHHGNIPHGIRISVEHAMRENLIRFVVCTSTLAQGVNLPIRYLIVSSVYQGGERIKVRDFHNLIGRAGRSGMHTEGSILFADPIVYDKRYVFKEKWRWEQVKELLDPNNSEPCISNLLSIFDPIKSDDGKSILDIDALLLVELYINSPDEIERLTSEIAKKDKNFSYTGVQQQIFWKIDLVCSVESFLLSYWDYQTETFSGENIVSLVESTLAFFLANEQEKENLKKLFNLLAQNISVNLTNPLYRKVYGKTLYGINDSKIILEWLNNNVNDLIQSRNIKDIYEKLWGIVEKYIRNSSFNKFNRKDVLKEIVMNWIAGHSFYELFLLAETCRIGEGERPRKVKIENIIDIFERGIAYDGVLLINALIEFLELIDLNDYDSKLLFERLQFIQKQFKYGLPSKTSIILYELGFSDRTISQELIRLLNLTSNQKDELLEELKQKAEIVKDIMDRYPSYFQKVMLRILE

SEQ ID NO: 54496 - protein, 264 aa, Pseudomonas amygdali pv. lachrymans
MDDLGFDFANAVPWFAHEQELPYVLVRMTAQNVALLEAAMAEPLRRCYITDGALAAAVARHGVTPADVLAAKLPDAGATMAGDFGEVLGYFYQSTKEHPDPAIGPKKWRLKQDRTKPAPKSDVVHFIMPNRPAASADDQVLCSEVKVKSTSAASNPIGSAIADCAKDRTSRLANTLVWLRERALFEDLGDVDIPLLNRFINAVDHPPTTQRFRAVAVICESLLTAELPNAPVTASSEYTLVVISVPNLYTTYNAAFEAARATVR

SEQ ID NO: 54497 - protein, 994 aa, Pseudomonas amygdali pv. lachrymans
MRASLQTWINDADKARHLGQFSVAALPIELAQISNRSTDYYISLVGELFDGLHSTTVSGDDWAQLGNAFLQFSKDMPAEQIEAMGISKNEAALFAAAAFYFGDFPASACLAMRQSSPPADPLSPWAACYDFLARPETLVSQTAHQVQEHLRTGDLPGLRRIVEASTSEADNALQVGPDQWVAAALLSRLLARFDASNTRAVLPDGADAFWTPLINAFIDRKPSTWEFFPSQIQAIDEGLLSTSESYALQMPTGAGKTTLCETLLYWHLRRNPTHVAIMIVPYRSLASELRHSLVRQLNGLGIAARCAYGGTIPSGDEVHGLDHINALIATPESLSGILSADPAFAQRISLVICDEGHLLDSAGRGIGLELLLARMKARLVNPIRFVFMSAIIPNIEEINAWLGGDDETVIRSTYRPAIAEFSVLRSSGAGANKSVRLDMHPHALQRQYSIHGFLDRSNFQYRNPQTRRTNTYTFTSTKTLAVSAARKVLSMGTTAIFAANKRGHQGAIGLAEELIKQLECPLPLPKPVDFADLDVLRSRIEYLETEFGDSWIGAKALRNGAVLHHGDIPQETREVLEELLRDRKIQLVICTSTLAEGVNLPIRSLVLYSVQRRVGSGQPENMLARDIKNLVGRAGRAGANTKGLVICANPDQWWIVQPVATAGAGELVRGSLRKLIVVLEAHLRTTGIVLSNQFLEAQSASHSLIDGVDATLIELMAEEIGDADFVRLAADLSDHTFAAQQLPAAAVVTLRTVFELRAQRLIGLRTDGKIAWLQDTGAKVRLLDFVEQTLLPSRVDWTAEVDPVADELLTAILEWAWQDRELKSDVRVAFRLEDSQNTEQVKPRFFEIVRQWVQGATFAEIAESTRMEVDDVLGIYTRAVTYSLQTLVEQGISLLARLLLERGIEVNEGVTAFVEHLKFGAPSRIGVLLANGGVRHRKAFVELGNAMQALTTPITAANARTFARRSLETHSGAWRDALGEYVFSNTLTDVGRVG

SEQ ID NO: 54498 - protein, 264 aa, Pseudomonas amygdali pv. lachrymans; identical to SEQ ID NO: 54496

SEQ ID NO: 54499 - protein, 994 aa, Pseudomonas amygdali pv. lachrymans; identical to SEQ ID NO: 54497

SEQ ID NO: 54500 - protein, 258 aa, Leptospira fainei serovar Hurstbridge str. BUT 6
MDIYKKFTKKIINDYVRFEIDRSEWVNVKDYIKSHGKEFYLKEDELPRFSKKSADERKKYLANNVLPSKGKIRSGDFGEIFSFFFIQSEYTSKKIDLYGPKKWRWKEHPDSPAPFSDVIFLFAKDPMNPHSNDLAISIESKMNATKPSKKKNRIQEALDGAEKDRFTRFAQTINWVETKYEREDIQSDLPLVRRFKDPVNYPYRQEYYAIAIFDIGYIDSEISKGYTKPSNEIKLYLLSINDLKKLYETYFQELINEA

SEQ ID NO: 54501 - protein, 998 aa, Leptospira fainei serovar Hurstbridge str. BUT 6
MKLEISNKLSNWIAQSASYQSYFDFAIEEDSIADYTIVKKYSDFYTSLYHLALDLFKGKYTEISSKEIIALARGMETFTLKGRNSFLGINIYEVYLMTASLRLLAGFSATSNLIVKNLIFDNFEGKPGLQFVLSILGRSIFPKNEFSKSISRFLNSGEFSVLDQITYDLEAKIEEGLNTNPQAYAESVLAKSIFEYFKKNSIWNTLLSIDDNSRFWKKYVKENIEKRIWYFFPSQLEAIERGLISSEKTFAMQMPTSAGKTALCELIIYYHVKKNPLSKIVLLAPFRSLASELRQSLAQKLHRYGIKVKTLYGGSVPTAIEKNSIDNSNLLIITPEKMMAIEDIFPEVLNNVDLVICDEGHLLDDKNRGFDYELFLTRLKILKGEDIRFIYLSAIVPNIEDVNNWLGGSSETIVRSNFRPTLFDYATVQLSEKDEEGFVLHFNPKDKRPKRYELYNFLKKSDYQFINPQTGRENTYKFWDSSKKRLSVACALKSLPAGTVALFAPTKFDNGVAGLCTEIISQIKLISDYAIKNNNPYNYADSEYVAIVAEYASRLFSESYLLVQCLRMGFCFHHGSLPQYIREILENCIRDEKIRLVVCTNTLAEGVNLPLKTMVIHTTKRQFDQRWHQLTNREIKNLLGRVGRAGKEKNGVIIIPHKEDLEPIFEACNDIKIHPVKGYLYAVIERITRVISNRKIALTNDMIENQNESFLKLIDSIDSAILDLIGDNVDLSALDEIASRLVENTFSYVQSNEQQRNNFKHLIQLRSEKIKNNISNESLPKIKKSGSSLRLYLSILENADFENDIWFKKINPLDAEWIDFIFNHLEYISAIKEDLEEGSYSDIGSLDRLKDITLSWLSGMTYGQISENYNLSIERSLDIVNNLLSYQLTNVFSAIIRIRQQNLEQDQIIDESISSWPLLLPLGLDNYLKLKLHSIGFADRIGIIGLANYLETSFDILNKDEEEIKVILMENLETILQDLSVTLPRLSILEIENSLNVE

SEQ ID NO: 54502 - protein, 266 aa, Aerococcus urinaeequi
MLKKHEETHKAIANYFTSEDKTTDSGIEHRVLLGDNNAALFVDFITPIVRKHQISEQDYSTRKKLLEKLKIENLPNTIPSPFPKNLSTQKGNFAEVFLAEYLEKATDFTLPIYRLRYNPNVEQSMKGDDVLMLDLDSEPVRIIIGESKFRTTPQKKDVTDIIEGLIRANKAKVPISLMFVVNLLRAEGKIELAEKVQECVVLFASDKIEIDFVGLLMSSTKASRTVDRHTSAELRNILMISVGVDNPVEIVKNVYGNLEGDYECID

SEQ ID NO: 54503 - protein, 1102 aa, Aerococcus urinaeequi
MSVSIESIQRILQILDDNKIKNLGAQSDARRVLQEVGELSLNFPNYDPHLSEKNSYIAYLLIFNACDIVENSFENQISSAEIFERAGKLLADNYQFAQEAEDISNINLLISSMSFYCAKHFSQAYISVERVKPNNSIVSMVKLFLRKDFNQLFTESIENFFVEQPYLSELDQLDQWIISHEIARCFMIYLNTLYSGDLGQFNQISFILETLEDLCELNRFVTSWLIIKLLKIIFKTFETSSTWKNIPPRIPNASLTPKYIRLLSELRPSVVELWPSQLSAIDLATSKNDGGVINLRTSSGKTRVAEIAILKTLATNPESKVLYLAPFRSLAFEIEKSLLQVFGKLGFGVSQLYGGSTANKTDLELFSDNQIIIATPEKAKAMMKSDDEFINQIELIVVDEGHLIGKEFRNIKNEIFLTHISEIAKNKGKRILLLSAVLPNANEIAEWLTGDESAVSKSSWKPSLERFGILNWNGEGVTLRWLNGEKPFNPNFIEKKPLGFSKRRNHFPNSKNEAVAATAVRLSKSGPVMIFSARANSIRGLARDVLLAMGEAPNDYEWDENLWDIVESTCEEELGVDSIEIKAARKGIICHSNRLTTNVRIVLEQLMRSKPPKIVIASSTLAQGVNIGISTIIVSTPYYAQDPISKRDFWNVCGRAGRAFSDSEGKILYAIDLTKESWQIRKDLSLARDYYQGVQTEKVQSGLYYLLNRIYEISLISEVTFDTLLEKIANDTFVDSLLEEQKSEVRGLFDLIDDELLSMNQEFQSLDADLSWIDNIFRNSLAFIQSKDAELSVYPEILKARTKFLLQETVTLENRRMIISTGLPFSVAQKMVADIDYFRDIASDVLQNYYNDEVETITYLLKAVEVWASKFASSIIKSSYDSEILDSVRNNWLTGVSINEMRELTTDINEIVKDYFGYTLPWILNGIAQIFYLEDREISKLYSKIATLTEFGLPSTDAVKIYLCGIKSRAAAIEISALSEFKTKSMIQLRKLLSDYSLEQNELSLTSKKWISIFRESYSMAKSEIISFPIFNIKDWKGADNIVVRKVNQNVYLSTVDGYYFISVKSTKELPFEKIANIPGIFFVRKETGWHIRSNSSRIEIE

SEQ ID NO: 54504 - protein, 268 aa, Enterococcus durans IPLA 655
MTFPKFIEYFIREENVVTNQGKDISIIKIDINNDEDVLKQWAIHLRNHYCSLEELDELREGPGLSRLEFLRDMKFPNPTLGLGSATMSGDFSEILIADYIEYILNYIVPRVRYRQKANRNTSTQGSDLIGYKVESIETNSINDELLIVEVKARNSESNPEATLQNAVDHSEKDIVRIAESLNASYRMLKNYNEYEGMRLVRRFQNPTDRPHKRTFAAASVHSDTSFSVDLLKQVDISKHPEDVKLIAIHSPNFLTFIKEMYVRAANVD

SEQ ID NO: 54505 - protein, 1044 aa, Enterococcus durans IPLA 655
MLIEKNSKYYLKKVQAKSKMFEYYVPIEDHIQVEYMAHELIILAVATIGDSSNFIWDNRLSNTASSLSEELYENLNFTSIYFDSLLTSEIGEASYNDYFALLGAVSFYLSDVLGSTKVMINKIDRAMDLEINEIDTFLLYLLADRLNDLKEYEFSSQYSDLFDHLINDLSQFYLDGTPIDFEKLNDLKQEIYLSQNPREILFGDSLLAVFIKKYKNSALNLLPSYSDTTIQDWEGLLLNNRTIKELWPSQILLGEKNIFKGNSGVIQMPTSSGKTTSIGLIIRSAFITHRTRLAVVVAPFKALCKEITLNLIDFFSNDEVIINELSDIAEKDDIAFFNNDSDTNTLIILTPEKLLFLIRNNSEILEELNLIIFDEAHLFDDNSRGTNYELLISTIKYYLNESSQKILISAVIANSEAINEWLNGTDGEVISNNNIISAQRSIAMGDWVGRTGQLYFLNQDNPNIDDFYVPRIVDIREINRIGRERSKRYFPDVNFRDRKLNKPYDMQIYYALKMVHNGATAIFSGKKDAADNTAKRIIDLDKRGVDISVFSKNIINNEHLKIAELIKRNLGINNEYYDSALIGVFVHHGRIPLGIRISIEYAMSQNSISCVICTSTLAQGVNLPIKYLIIPNLYQGQSKIKVRDFHNLLGRTGRAGKHIEGTIILSEPFVHSNKRGWKWRDYESILDIANSEDSVSNLLKLVRQIRIRNLPAINLWETILLKYSNIEEFNRTINRLNQVVQINYSKLYLLFSEELQTILSSLNDIENYVMFFMKYFGEEEMNFTDIVIKQTLGYQLADEEEKEKLVHLFETIKVKSLAFTQEELNLYSITSLGFESSQNLSQWISDKFDIITQPNSEIELIDVIFPQVILFTDNTIINRIDDSSIFTQICKLWIQGQSYFDILVYCQDHQFQITKRNRLVSFILQDVIEICDNLLSYGTILPLNGIVTFIDGFENNSTIHLIKSLQKKIRYGLPSHLSINIFELGFSDRVVAQIMAQIIDGSSFSTPTLISKRRTKELLRQNRQELEVALQDLPQYFLDILRNI

SEQ ID NO: 54506 - protein, 259 aa, Pseudomonas coronafaciens pv. porri
MPLYKRWCKSSKTKAKRKFYWTYVERAGGRADIHEDLCETIRSHYDHLERIADDVKRLGFVVAGKILSKGMPQDKKGRSGDLGEILATELVEEEVGLRVPVRRLRYKDGRNMAMRGDDFIGAGYDKNGELSLLKGEAKSNKVLGKTTVTSARKVLNRDNGRCTPDSLLFIANRLLESSDAADVRLGRCIRDEVGLESLHANQISHMLFTLSGNGPHPSLKSDLDATETTRDQYVVNVRIEDHQNFITAAYEGAEDLGNN

SEQ ID NO: 54507 - protein, 1173 aa, Pseudomonas coronafaciens pv. porri
METIDELTTFLRAATEEGIFGRLLYRGEAWSLMRDRGVLAPTAPSFASSLETDLAEHGFALLRGAMALRARNGSSDLTSKGFERAANAFEALIRNGDLEAHERGFRRTIAAAAYHLAGFSAVAYSLFNESDNDLNMTPGETALRHLILRDLNELQDFIRDWLGDPLHGDEHVAEMLRTDESDVDDTLAIVLNSTICRALAYFDFALETGEGEPMDKARSMLETAVRLADNAGNIPLWWTCSLCNHLIDDLWKHSLHNTIPSELPGAPEESFLDLRQMFISSLYARKTSEVELWPSQREAALRSTDVTDDLVVALPTSAGKTRVAEIAALMNLCLGQRVLIVTPLRALSAQTERAFKKTFAPLGFTVSSLYGASGVSASDDDALRTRHIIIATPEKLDFALRSDADLINDVGLIVLDEGHMIGPSEREIRYETLVQRLLRRSDAEDRRIVCLSAILPSGDELDDLTAWIRSDKEGEPVRSNWRPTRQRFGALTWRGSSKNAILRLDLNRRGPFLDKFVSEKPARGREKIPYPRKNSHLTLFAAWEFANQGKRTLIFSTQANWVEGYGSQVVDLCKRGYLESLLDDEAPIARAMEVGKEWLGEGHPAVDCLKWGVAVHHGRLPSPFLRELEILLSAGVLKVIIASPTLSQGLNLNAAVLLVPALYRSGVKIKGEEFANVAGRAGRAFVDVEGLIVHTMFDKPTERMRAWRHLVASAKARTLKSGLIQIVAEIIDRLASDGVLGRTDAWEYLANSREAWRSPDEESNVTEHLGFPTELGADDGDETLEGQDSADEESTSLGKEPLSQLVERLDAVVFGLIESLDAEEEDLPVLLDRALQGSLWARQIEREDDGEAQLHARIFRARAALIWKSTSAQTRRGHFAMGVGLEAGLAIDAMAAELAVMLDQADLAALNGDVDILAGALCGLGERLLVIRPFIPDKANALPVNWRDILRSWVSGGDVGEIGPENMRIVEDAFTYRMVWALEAIRTRRICLGWSPDIVAGGAAAAIDTGVPRFMMAMLIRAGLPSRRAAIAAVEDTAPVFVTPAEMRAWLESDEVVAYTDAGNWPTPDTAALWTRFRTEALSGNIQRWSITRYKRLLDHGNIPSAGLYRIITDEGDGRTWLATPDYKLVSTFKKPALDPKPSLFWGRVHGDDRLVEVIRVGRGRLRWPRANS

SEQ ID NO: 54508 - protein, 179 aa, Sulfobacillus acidophilus TPY
MKEHYQPNYVLKGPKKWRWKEDRNQPVHKTDIVLFAKQADSPSNDDLVVAVEVKAKATQKNSYDPIHDAVKGAHDDSTRRLAATINWLKSQYVKRNNPEAVEYLERFRNPVEHGSYQKHFNAVAVVDEQLAEAELTRPRDLSPYSFSDPFCIIVVSIPSLKTMYENVYEKIPASGGDLF

SEQ ID NO: 54509 - protein, 1007 aa, Sulfobacillus acidophilus TPY
MIESKLAYWVAQSKSWHTFKEFKLSIENQADYPFLGHPKDFYITLFGKMFELIHKDPSEENAALNRIKNQMLQIAKGMEIYSLKETRSEFQGVDFSRNMLYVASLYYLADYPASAYILAKLFPPTVYEGEVDQFISSFLCRDLDHLPTFADPFARFVLTGKRENLEGLSATLHDGSVKARDPDEFVSFRIAEALVKSFMANNVWQDLADRFDVLTEERWKQFIRHGFDRRPPVWSFFPSQRQAIAQGILSEDARCFALQMPTSAGKTALCELIIFNHILQKPGKVLFLAPYRALASELLSGFGRRLATLGISSKAMYGGHVPNNEERAAIQDVDVLIATPEMFLAVESVIPEVYESFSLVICDEGHLLDDTTRGLNYELLLAKFKLRSPNARFVFLSAVVPNINEINQWLGGNESVVRSNYRPTELDLAYLQKTARNGYMLNFNPHKRRPENYQLYHFLTRGDMEFVNIQTGRINHYRLETSVTRQSVATAMKALLAGKVALFSPHKRKNGVESLAEKLIRQTISSSLPKPIEFADSTMIERLQEYFGRVFGKDYLLTRLVRVGALYHHGDLPQNIREVVESAIHTSAFRLLICTNTLAEGVNLPIKVVVIHSARRFDKYTGTLKPLKLRDLANLFGRAGRSGQETTGMVIVVNPVDRQIVSDAIEGTKNEAVSGYLFGLIENLERVIREHRLVLDNRLLESQSEDFLRLLDSIDVSLISLLAEEIDVDHLTREINTLIQSTFAYHQGDSEQRDTLRAIFKSRGERLVPYVQNGQFKAIKNSGATLRFFEQVVHRLHLEDEVWSKTTHPCDDRWMAHLFDILFSLPQIIATVDDFNTGRSKDEMAVDATVIRDICTLWMKGHWYGEIATRLNVEVSYLLRIFSSIVHSTIGTYVAQIIRLASYLSEHEVGISISETILDWPQYLMSGLQYKTELELVNLGFTEREGVIAIARWMALNNVQGFSGPALKSWLVLFEDKLLAEIKDLITTVAYDKSAKDFDLLRHQPIL

SEQ ID NO: 54510 - protein, 249 aa, Sulfobacillus acidophilus DSM 10332
MIFRASEGKLGQLINKLPAEYRRCYITDQDLLDRVSTFKRSYSDILREAYIPDEPKIKSAEFAEILSYFLVKEHYQPNYVLKGPKKWRWKEDRNQPVHKTDIVLFAKQADSPSNDDLVVAVEVKAKATQKNSYDPIHDAVKGAHDDSTRRLAATINWLKSQYVKRNNPEAVEYLERFRNPVEHGSYQKHFNAVAVVDEQLAEAELTRPRDLSPYSFSDPFCIIVVSIPSLKTMYENVYEKIPASGGDLF

SEQ ID NO: 54511 - protein, 1007 aa, Sulfobacillus acidophilus DSM 10332
MIESKLAYWVAQSKSWHTFKEFKLSIENQADYPFLGHPKDFYITLFGKMFELIHKDPSEENAALNRIKNQMLQIAKGMEIYSLKETRSEFQGVDFSRNMLYVASLYYLADYPASAYILAKLFPPTVYEGEVDQFISSFLCRDLDHLPTFADPFARFVLTGKRENLEGLSATLHDGSVKARDPDEFVSFRIAEALVKSFMANNVWQDLADRFDVLTEERWKQFIRHGFDRRPPVWSFFPSQRQAIAQGILSEDARCFALQMPTSAGKTALCELIIFNHILQKPGKVLFLAPYRALASELLSGFGRRLATLGISSKAMYGGHVPNNEERAAIQDVDVLIATPEMFLAVESVIPEVYESFSLVICDEGHLLDDTTRGLNYELLLAKFKLRSPNARFVFLSAVVPNINEINQWLGGNESVVRSNYRPTELDLAYLQKTARNGYMLNFNPHKRRPENYQLYHFLTRGDMEFVNIQTGRINHYRLETSVTRQSVATAMKALLAGKVALFSPHKRKNGVESLAEELIRQTISSSLPKPIEFADSTMIERLQEYFGRVFGKDYLLTRLVRVGALYHHGDLPQNIREVVESAIHTSAFRLLICTNTLAEGVNLPIKVVVIHSARRFDKYTGTLKPLKLRDLANLFGRAGRSGQETTGMVIVVNPVDRQIVSDAIEGTKNEAVSGYLFGLIENLERVIREHRLVLDNRLLESQSEDFLRLLDSIDVSLISLLAEEIDVDHLTREINTLIQSTFAYHQGDSEQRDTLRAIFKSRGERLVPYVQNGQFKAIKNSGATLRFFEQVVHRLHLEDEVWSKTTHPCDDRWMAHLFDILFSLPQIIATVDDFNTGRSKDEMAVDATVIRDICTLWMKGHWYGEIATRLNVEVSYLLRIFSSIVHSTIGTYVAQIIRLASYLSEHEVGISISETILDWPQYLMSGLQYKTELELVNLGFTEREGVIAIARWMALNNVQGFSGPALKSWLVLFEDKLLAEIKDLITTVAYDKSAKDFDLLRHQPIL

SEQ ID NO: 54512 - protein, 259 aa, Raoultella ornithinolytica 10-5246
MVPFYDWCDSADMPLGNHHVRVMTGRLGDIATGIQMTARAIPAHYTTEARIATALAKLGKTAAAHMLSDLLPQTAQIRSGDLGEIYATEWIEAYSGYRAPIKRLRWKDHRNMAMRGDDVIGMLLDAETQRLSFLKTEAKSRINLRAQTLDEARSGLDKDNGLPSSHALSFISARLMEIGTNAPLVDAIDEALYRHGIPPESVKHLLFTFSGNPPQALLTQALQAYPGPIGQWGVGLHIDNHAAFVGAVYDRVIADANNP

SEQ ID NO: 54513 - protein, 1145 aa, Raoultella ornithinolytica 10-5246
MIWRNGVLPPGAPDFSAQLSFDLHSYAYGLLGLGLRLLESDGDPNQARIAFEQAATALESVMANGNREEADRDFHFLLAAASYHLAHLSARAYSLLAIVADEANFSPIEHALTLLIRRDINSLRTRVYTFRLDGRGSDATITTFLQQHLTESIVADAAERDGKDFLFEGLNLALTDVFFGAFSMFLLALDRGEYTLLERAIAQLRENLDICGELNLIPQWWVHRIAIHLLNDFWSNTFHEKVPLLPAGGVAPSWPVLRELFIGLLARRPRAEVDLWPSQIEAASRAVNQTDNLVVSLPTSAGKTRIAELSILRCLAGGRRAIVVTPLRALSAQTEATLQRTFGPLGKTISALYGSIGVSGFDEDAIRGRDIVVATPEKLDFALRNDPSLLDDVGLLVFDEGHMIGSGEREVRYEVQIQRLLRRQDADQRRIVCLSAILPDGDQMEDFSAWLRRDQPGGPIKNDWRPTRLRFGEVTWNSPTARLNLRVGEERPFVPRFLTGAAPPLFVPPKKRRNRLFPDNQQELSLATAWRLVRDGQTVLIYCPERRSVEPFAKVIVDLHSRGALESLLTVELTTLQIAIALGEEWLGTDSYILKCLRLGVALHHGALPTAYRKEIERLLREGILKVTISSPTLAQGLNLSATAVVMHSLYRHGELIKVSEFKNVIGRAGRAYIDVEGLVLYPIFEDVNNRKHNKWVNLIEDHGAREMESGLIQLIFSLLSRMHSRIGGNLDRLIDYVINNAAAWVFPEVAGEKVDEREQALKEWDRHMATLDTAILSLIGEADVPDDQIETALDNILQSSLWQRRLLRVNDESRAAYRTALFTRSRYIWANSTAVTRRGYFLAGLGLEAGHALDAIAPEANNLLMQANAALVVSDHEAAITAITEIAERVFTFYPFEPDTLPANWREILRGWLLGHPLAMMIAGEEVDALQFIEGGLGYRLPWAMEALRVRAAANGDTVGMPALALEDYELGLAVPAVETGTMNRSASILIQAGFNSRLAAIKAVTDTAANFTNGAELHDWLRSPGLAVYSAQPNWPTVEARTIWLEFIQEFAPSDNLSWARRDYLGNVNWFDVPALPGTPVGLFHWNGQPLVLAPDGHAIGLLQHPLNLNRRGLVRATVAMNNGQINLSYLGPDDLWVVAKPH

SEQ ID NO: 54514 - protein, 256 aa, Pectobacterium wasabiae WPP163
MANFNDWCDSIDSNVGQHFLQTLTVRATDFDNGVRATAEVVPHHYASPENIAVAFEVLGKPGVANYIKEYLPISKQTRSGDIGEILATEWINERSNGYIVPLNRLRWKDHRNLAMRGEDVIGIYASPDSQTLFFLKTEAKSRVNMSASTVTEARNNLNKEQGLPTPHALSFIATRLLETGQPELGRAILRASLSQGILPGHVRHLIFLLSGNASDGLLKTSMHAYQGNIEQMGVTVMVVRHGDFIEQIFETVIRHA

SEQ ID NO: 54515 - protein, 1197 aa, Pectobacterium wasabiae WPP163
MVILLNKFLKRSFAMLETSEEIIEAIRAATATGFRGRLLARGQARAMIWRDGKLPEDAPEFTPQLSEDLQGYAYSLISLGLGLRNLNGDAYYSRLAFEYAATALESVIAKGARESYDNNFHFVMAAASYHLAHLSARAYSLLAMVGDNDNFSPIEHVLTKLIRRNFHTLRSSVLSYRVRGEGSEERIIDDMRANVDPQVEGGAEDDRENNLAEAEYNALFEGLDTALTDTYMTAMSLYILAIERGDRLYLTRAIEQLQSGLAVCSRFNMLPQWWVIFITIHLLSDLWSDTFHELLPLDTAGNEAEAWPELRELFIALLHQRPRAEVDLWPSQREAAVRAVNDADDLVVSLPTSAGKTRIAELCILRCLAGGKRVVFITPLRALSAQTEATLSRTFNPLGKTISALYGSIGVSGMDEDAIRLRDIVVATPEKLDFALRNDPGLINDVGLFIFDEGHMIGADEREVRYEVQIQRLLRRSDANERRIVCLSAILPDGNQLDDFANWLRRDKPGGVVRNDWRPTSLRFGEVIWAGAAARLNLSVGEERPWVSRFLVSAEPPVVKLRGRKQRKKLFPGTSNELCLATAWRLVEDGQTVLIYCPLRKSVEPFADTIVDLNQRGLLRSLFEGEADVLDRAIALGEEWLGAQSPILTCLRLGVALHHGALPTAYRKEIERLLRDGVLKVTVSSPTLAQGLNLSATVIVMHSLHRNGELINVSEFRNVIGRAGRAYVDVEGLVIYPIFDEVGKRLGNWNKLTKDTGAREMQSGLVQLVISLLTRMSLQVSGDIDTLTDYVLNNARAWTFPIKTGENANERERAFTLWEKQIATLDTAILSLIGESDVPDDQIEDTLDDILHSSLWQRSLQRYPGDNIRGLIKSGLLSRSHHIWQNSTPAARRGYFLSGVGLKTGQQLDSIAPEANRLLIEANAAIMRSDEEGAIAALTALASRVFTFYPFTPDPLPDDWQAILHAWLSGKPTTAIADVVKTEILQFVENGLTYRLPWAMEAIRVRAIANGDIVDDEGLTLDAFELGPAVAAVETGTLNRAASLLIQAGFNSRLAAIKAVKDSDADFISGRGLREWLRSDLIVAWGELPDWPTPETHRMWIDFTRVTNPADDQTWSLRRYTGTVKWIGAIPQPLTPLHFYQLDGVNYLLAEDGRPLASITGAINTKRKGLMRVTVGNQSNIEVDYLGPDDIAAQREG

SEQ ID NO: 54516 - protein, 265 aa, Streptomyces canus
MFGKWLEQEPVEQPEGELHYEALVESGELGDEELMDQLGHDVARNYLSPSELALVFDDLGSPEVADYLRANKFPTRVAVRHGDFGEIVTAALYRRVRRWCVPILKLRYKQTPNQAVQGTDVLAFRFRQTPPVIAVPEVKTRATRKRDLGKEAYDSLEKVLVRLDESIHFAMVRCAERDHQFLVRHLAGLLRRPKERVVERHMVFVHDAQAWKDDVVDILAGVVTQPTELTVVKISGLQAFVARVFEAAETGAGPRRTETSEDTAA

SEQ ID NO: 54517 - protein, 1199 aa, Streptomyces canus
MKDYNGTLHRLGEEVLTDGDAAPGLRAQLRSHVLGDQISLEGAPVAYTYDLDGMRNGLTLARLGQLTRTPRERRTDPGPLTEIAEAYADLADRYEAAHPQRVELLAIAATMWSLAGYQANAATLAVAFTREARSLFALGENEVFETPTTASPYRIAELTGAVLRRDLDEVSRLGQQTADDLRGLGQRLLGETAEGRADVADAAVLAAYGLAGRAARNLAALWRTGNRAAGHTAVADLRKAASILLDASVADTWTLIDSLAHVAEDIVATSPWLLLRRAATWGRLWEHYLKALIVAERPVIQVWPSQRAALDAGLVDAAARNMAVTMPTSAGKTHIAEWAILHALAPRPGDENRWWLVSRLAVYVVPTRALAAQVERHLAESLELLGLRVSSLFGGAEHVRYEMQLLDFTDVLVVTSEKLDLLLRNMPELSSRLALVLVDEGHAIDRSERGLRLEMLLTRIRRTAPAARLLLLSAVLPNGEDLARWLDPDADATNLAKINWSPSRLRMGVFSWRGREADGQQGAIDYGNGGNGDFFLPRVLTRHKKRVNLFPSAPKDVAAALALHFDRLGPVLIAQPTKVKARAAAKALGEALKKQGAPKLGTADGSFSAEVARRRLEASAEIGRHIGNNHELALMVLGGYAYHHAEVPQAVRNCLERAYRNGALRVLCATSTLSQGMNLPTKTVLVPDTWRGQGERVSVRDFWNTAGRAGRAGQETEGHVVLIAKDSSAAQELRRHYLDRDRIEPVVSTIGWLYYELVIARLGHRPGAGEDLTALDLADPAGGKLAEWAEGLDIQLLALLAEEVVDTPDQHLLEQAAQALLGDTLAAHQLGAQDWSLAPLARFSARRVAAIAQRLPDRPARAAIVRSGLSVQGGTDALAAAEQIQTVLDVRPELLTPEHWPHLQRLILTLAANVHEVQRGIRQKKVAAPALLPLAADWIAGHPAADLHQRHHGNLLTPDITATTSAIDKIIVQDLAWVVSALLQILELRRGVPAEGHLAALPAMIKYGVSSPAACYASSIGIHDRATATTLATNCPYPEPTFRQFLDWLSQLTTDEITTLTDPDTARLLIRSTERRSPRATQAAILSGTGTFTCPLRGVRHSGNDTHLAQLPAGTPLDLVRDPGNEADPNAIQVQHQGVFLGWIAREIARPLALALDEDPTPHIYTQLTTDARSIAQHNGADQLHSHNAVTLTIMLAPR

SEQ ID NO: 54518 - protein, 266 aa, Streptococcus macedonicus
MHSYIKYLTQEDPIITDEGKQIEILHLDIQDDPEIFEDWAKQFRRNYCSDDELAEMIGFMNISPKEYLENFKLPSDSGIGLSTMSGDFGEILVSDYLQYIEEYVVPRTRYDSRVNKDTSTQGSDVLGYKQDSSNVSNDEVVVIEVKSSASDSSSSKAKNKLQEAINHSDKDFERFSTSIVASYLRLKKSNSDQANVVERFLNITDKPFNVIYGAVAVYSNQSYDIDVIKTVVSKKHRDFQKLRILVIHSDELMKFIRELYSKASEV

SEQ ID NO: 54519 - protein, 1023 aa, Streptococcus macedonicus
MIEFGRKSLYFSKLVRSKAKMIEFDIPLESHIPISEDAQKSFLGALAIAADTARKYFEDYINHKSFDSQLKNQLHNVAEYFDALLVSGLGNSAEYQDYIAILGTTAYYLGDYNGSSRVMVNYISDDMHLLEESITLVKVFIDVITDKLFLNHSPIEGKYSSELNTLVESYRNYILSKTEFSIDIYRDLQDKVYRNGSDFSVIIVNCLLAVVCKKIDSSSTKLLPEFSGLDFSLWQDYIQSTGSIKELWPSQIELGRKGMFSGKSGIVQMPTSSGKTASINLTLRSAFYSNRIDNALIVAPFRALCREIYRDINAHFVDENNVIVSEVFDLPEIPQDFSIFNDGKKRVFILTPEKLLFLLRNHQSFIDEIGLCIFDEAHLFDDPSRGTNFELLLSTVKQIFPKEIQKILISAVIPNSEAINRWFNEDGVIVSNNSIKTTEKRVAFSDLNGSNEQLYFIDPITFEEEFFVPRTVGVSELERLGKERKQKVFPELTNANDISIYYGTKLINNGGVGIFCGRKDTVNVVLRRFIDLNNRNYDLTDFLKNSDRSEVEKIGNLIGQNLGYDSVEYTSSQLGVFSHHSGIPMGIRIAIEYAFSKSKINNVVCTSTLAQGVNLPIKYLIISSVYQAGDAIKVRDFQNLIGRAGRAGKYTEGTIILTEPNIYKSPKNKWKKQNYEALLNPINTEGCQSNILSIIQFKSVVPTDYRFEPIKFDYWSLIKEKFDSSVDYRTKINNILSELKGQNSPYFKDFNSKIDQIDNTLIAIENYIASMYATELETDSLAENTFGYFLGNEEEQEKIKELFILIKSKIITSLVETEIIAKNSIGLYQSELLNEWVQENKTSILSCEKEEDLLGVLTKIIIDLSNNKAMRKLSIENLNYISQLWIKGISYFQILESCTEKSISIEKRGKSKPIDMSDIISICDNGLGYETSMVLNAINNILEELVGEELDVLTMLIKRLKYGLPLEKEINIYELGFSDRIVVQVIGQEINSVSKNQIRNEIKRKSARLEDKLSDFPSYYTQI

SEQ ID NO: 54520 - protein, 269 aa, Shewanella baltica OS195
MPWTNEHIKWLQNTGNVLVLACGREAKVFRFNHDVNDQKKMSAWAKHFRNHYCNDAQIDLLKATSLTRADYLLSMKFPSASKAPGPSIRAGDFAEILVADYLTYLHNYTVPRTRYDRKGVPNESTKGSDVLAFKQTIGKPSDDELLVYEVKAKLSPGGRSLLQEAIDHSAKDDLRLAESLNGIKQRMIDRNELQSVGMINRFQDSVNQPYKLRFGAAAICSDSAYDTAILSGASTTEHPYAQSLELLAIQGSELMSLAHALYERAAYEV

SEQ ID NO: 54521 - protein, 1064 aa, Shewanella baltica OS195
MRELLMKFENKSSKLFSITKSKAKMYEFGLDEEHHIHLAESPTKLLLMTIGIIGDLCREELSSKKDITLYEQRKGELRNVARYFDALIESKLQTKHDYYLSLLGTTSYYLADMPGSSSVLSKKLEQSRVLLTKSGVEFVLEYVINFHERPKIVIVDSDDVKFHLLNPEHLPFPDLPIFMQLFESLNRFFYPKAQVEFNEEEEKRHFSWIVDTILKYFFENGSDRELLLSQILAAVIKKRLNSSTKMLLPRYSGLDWSHWSSVSLKPTFIKEFWPAQKLLGDAGVFSGKSAVVQLPTSAGKTKSAELIIRSSFLSGRASVAVIVAPYRSLCREISTSLSAAFTNEDILVNQLNDVPQIDNFDVELLLQLFGQTDTNTTDFPTIIVATPEKLVYLLRHKPELSEVISLVIYDEGHQFDTGSRGVTYELLLTSLKLDLRVGTQHVLISAVLSNAESIGDWLYAGNGTIVNGAEFLSTERSIAFASWIGGRGQFHYVEPFDINKEEFFVPRVMESFDIPKKGRDLKQRVFPPRGDKTLVASYLGIKLSKHGSVAIFCGKKSSVIKICREIVQPLERIEQLQAPIEHSDHDEINKIGYLSELHLGGKSDVTKAIKLGVLPHSANIPNGLRISVEFAMENGLGRCVVCTSTLAQGVNLPLKYLVVSGLFQDKNKLISTRDFHNLLGRAGRAGKHTEGSIIFADTELFDQHRILKSKHWSQMNDLLDPSNSEGCLSSLLSLAQPLSGKDYYITPMDFLKQPDNYQKRCIELISEGEDYSGLLKQMKQRIGYLESLESFLLANLSTDEMLDGEALTELYSGTFAFSLASDEEKEYLAQVFRVVANRVKQVKPEKRSHYGKALLGIQELNYLEKWLSENLTVFGEESSVIDMLELLWPVIDNLAMNNSLGKLIGKDASLSIAKLWCSGVSYHEILLQSDMFGYKYKAGSKQWKLKTENITDICDNSLGYEVMLVVGASADLLENLFGNPLFTAVVRQLQLSLRIGVSDRLAIELFSLGLADRVVASTISEMLRSSGVVIKESGKKIITTHRQIIESELRKYPSVFIESLYGNI

SEQ ID NO: 54522 - protein, 281 aa, Legionella waltersii
MTTKNNLVAHSLEESILGTHPSDGLFGCHTIASEGYTQSNVLHRALDMEEANSSQMVAQLRPALIKHHADEDKISRIKQQLERLGYDYSKLSLSPFPTKDKTRKGNLAEIFLAEYITASTTFDLPIYRLRFNPNVEQSMKGDDLLAFDFSKNPIKIIVGEAKYRTNPDKTGVQDMINALASSNHAGIPASIQFIANRLFEIGRADLGQQVESCAEGIVNGKHDIMYVGFMMSSNNCKNNVDKHTESLLPNLAVLSFSLRNLNQFYEDCFIQLEEEAFGPPK

SEQ ID NO: 54523 - protein, 1110 aa, Legionella waltersii
MALPNEVSLNVLKAHDTKWIRNLFAQSSASYVLQEVNENHNNFPQFDPLLGEKVTTSAYAILAAGISLHEKQPSLQSAAAIKEAASLLTNIHSSQAKAEKVSSHHILIAAMAFYSCGEYSRSFITISSAKFTSITAIMISLFLRRDRNELISFLNKVFFANKEEITCISMVCEPAVELAVAQALSQVLLFQITGDNHYLDSALDAIDAGMNIAAELMSPTLWWIARLLKLMLRNLGNGSLWKCLPPFFQDAPDILRQYIQLSAFLPKPLVELWNSQISALPIVLDLDRSGAVVNMRTSSGKTRIAELAILQTLALNPQAKILYIAPYRSLALEIEQSLCQTFDLLGFHVSHLYGGFRFSSADKRLANDASITIATPEKTRAIVRTFPELLEEFKLIIVDEGHLIGVDPRLVKNEIFLDHLRVVAHSIGAKMLLLSAVLPNPADLAKWVTESPTNVAKSEWKPSAERFGLLLWDGSRVKIEWKGEFECFNPNFVESNPINLKGRRRHFPGNKNEAIAATAIRLSSIGPVMIFCGKTNSVSTMAKSVLIGLGTNPNIHPWPQYVWDVFASSCQEELGLDTIEYKAARVGIICHSNKLPPLVRMATEKLMRSIPPKIIIATSTLAQGVNIGISSVIIASPYIGRNAINHSDFWNICGRAGRAFVDNEGKILYTIDETDKPRKIQNNKKMAEAYFNMVNYESVRSGLLSCMINIRKIANSAGIDFETLLGLVAENDFSIFGENQNAFNSLCSMIDDDLLAIIEDQNVQSEEDDPLHTIDRVFRGSLAAIQAQIYGEGLDENEVVSILQHRLFYLINNCPDKSERQICVASGLPYKCAKKLYSDHLELKAKLDEMFVDGYELNKFFAFVEWIESWVRSNGEQIIDGKWPEQSEFNLIRNGWIIGTPLYELTNLSKNALKICKDVYGYQLPWIIHGAAQILAKKGYKEDSDVLDALAAMLEFGLPNPIAVNIFLAGIRSRVVACELVSLNEEWESTPAAIRKQLCNSEIVLRITPQISDNALSWLRVLEADTTKSEVIIPTFPTFTLNDWKDSPERIIVRTFDGSTYLCTPDGRQFMAVKTNEKWPFDTIADDLRFAFILNDGTYHLEILDPHQTL

SEQ ID NO: 54524 - protein, 237 aa, Mesorhizobium amorphae CCNWGS0123
MTGRPADSATGIQVTATALPVHYAAEERIAGALARLGKPAAAKMITDLLPQTPQIRSGDLGEIYATEWINAHSGYRAPIKRLRWKDHRNMAMRGDDVIGMILDPATQRLRFLKTEAKSRIDLRAQTLQEARIGLDKDGGLPSSHALSFISARLMELGTDAPLVDAIDEALYRHGIPPESVKHLLFTFSGNSPHALLTQSLQAYPGPIGQWGVGLHVDGHAAFVGAVYAQVIADANQP

SEQ ID NO: 54525 - protein, 1172 aa, Mesorhizobium amorphae CCNWGS0123
MPTSPEAIIAAITEATTTGFRGRLIARGQARAMIWRDGVLPPEAPAFSPQLSFDLHSYAYGLLGLGLRLLELNGDPTQARIAFEQAATALEAVMAKGNRAEADRDFHFVMAAASYHLAHLSARAYSLLAVVAAEGNFSPIEQALALLMRRDITELRARVYAFRLDGRGSDATIATLLQQRLAEPVADAPERNGQDFLFEGLDLALTDAFFGAFAMFLLALDGGERALVDRAIAQLRQNLDICAELNLLPQWWVHRVTIHLLSDLWASTFHEKVPLLPAGGAAPAWPGLRELFIALLARRPRAEVDLWPSQIEAAARAVDQIDNLVVSLPTSAGKTRIAELSILRCLAGGRRVMFVTPLRALSAQTETTLQRTFGPLGKTISALYGSIGVSGFDEDAIRERDIVVATPEKLDFALRNAPSLLDDVGLLVFDEGHMIGPGEREVRYEVQIQRLLRRQDANQRRIVCLSAILPDGDQLEDFSAWLRCDQVGGPIKHDWRPTRLRFGEVTWNSPTARLNLRVGEEKPFVPRFLTGAAPPLFVPPKKLRTRLFPDNQPELSLATAWRLVNDGQTVLIYCPERRSVEPFAKVIVELHSRGALASLLTVDPTMLRTAIALGEEWLGVDSDILKCLRLGVALHHGALPTAYRKEVERLLRDGVLRVTISSPTLAQGLNLSATAVVMHSLYRHGEKIKVSEFKNVIGRAGRAYIDVEGLVLYPIFEDTKNKKHDEWVGLIEDVGAREMESGLVQLIFSLLTRMHKRLGGNLDQLIDYVVNNAAAWTFPEVAGEKADKRERALNEWERHMATLDTAILSLVGEADVPDDQIDAALDTILQSSLWQRRLLRVDDASRAAYRATLLTRSRYIWANSTAATRRGYFLAGLGLEAGRALDAVAPEANMLLIQANAALMESDHEAAIAAITGIAERVFAFYPFEPDPFPDNWRDILRCWLLGQSLVGTVAGREAETLQFIEGGLVYRLPWAMEALRVRAAANSDVVGVFGLSLTDHELGLAVPAVETGTMNRSASILIQAGFNSRLAAIKVVADIGATFTTGAELRAWLRSPGLAAWSAQPEWPSSETRGMWLEFIQEFAPSDNRTWARRDYLGNVQWFAAPAPPGTPVSLHHRDGQPLVLTPDGRAIGLLQHPLNPNRRGLVRASVAQNVAQLNLSYLGPDDLWGA

SEQ ID NO: 54526 - protein, 260 aa, Thauera terpenica 58Eu
MGLYERWCESTKEKDKRKHYWTYVEKDGGRDEISDDLAETIRSHYDRLERIAEDVKRLGFEVASEILSTAMPQTPKGRSGDLGEILATELVEEEIGLRVPVRRLRYKDGRNMAMRGDDFIGAGYDAAGEKLWLLKGEAKSNKALGRTTVTSARKVLNRDSGRCTPDSLLFVANRLLESNTPADNELGRSLRDEVGLKSLSADRIDHMLFTVSGNGPHASLKEDLDATGANRDHYVVNIHVEDHQDFIAAMFLEAEDLGDD

SEQ ID NO: 54527 - protein, 1167 aa, Thauera terpenica 58Eu
METTDELTAFLATATADGILGRLLYRGAAWSLMREEGVLPQNAPPLGATIETDLAEHGFAVLRGAMALRAQDGASDLTGKAFERAANAFEALVRNGDPDAPDRGFRRTIAAAAYHLAGFSAVAYSLFNETAEDLNTSPGETAIRHLILRDLDQLRGFVREWLDDEAHGDEQIAEALRGQDPDVDEALSTILNTTICRALAFFDFALETGEVEPIESARDMLDTAVSLADNAENVPLWWISNLCRHLIDDLWQHSLHQNLPTEPPEGAEEKYPDLRRLFISSLYARKTSEVELWPSQREAAQRSTDVSDDLVVALPTSAGKTRVAEIAALMTLSTDRRVMIVTPLRALSAQTERSFRKTFAPLGFGVSSLYGASGLSAGDEDALRTREIIIATPEKLDFALRSDPSLIDDVGLIVLDEGHMIGPSEREIRYETLVQRLLRRTDAVERRIVCLSAILPSGDELDDLTAWIRSDEPGEPVRSDWRPTRQRFGALTWRGKDALLRLDLDDDGPFLDKFVVEKPPLGREKKPYPRKNSHLALFAAWEFASQGKRTLIFSTQANWVESYGKQVVDLCKRGYLDSLIDNEAPIARALEVGKEWLGEDHPAVASLKVGVAIHHGRLPSPFLRELEVLLSEGVVKVIVASPTLSQGLNLNAAVLLVPALYRAGEKIKGEEFANVAGRAGRAFVDVEGLIVHVMFDRVNWRKSEWRGLVASAKARTLKSGLIQIVAEILERLSREGVLDRDDAWEYLANAREAWRSLDEEAEVAERLAGAVEYDADADADDEDTDDEEESIDEEPLSQLVERLDAIVFGLIEALDADRADLPKLLDEALKGSLWARQIAREDDDVAPLHKKVFEARADLIWKATTAEARRGHFAMGVGLEAGLAIDAMADELAELIDRADQAALSGDIDALVDTLGGLGERLLFMRPFISDKANALPTNWKAILHSWVSGEEVSRIGSQNMRAVEEAFTYRLVWALEAVRTRRMSLGWSPETVAGGASAAVETGVPRFMMAMLIRAGLPSRRAAMAAIEDAEPVFVTPAEMRAWLESDEITAYTDAGDWPTPDTSALWARFRTEALSGGIQKWSVQRYKRLLDIEAAPPAGLYRIVTNEGDGRTWLATPDYQRVAAFKKPAVDPKPSLFSGRLPGDTRLVEALRVGRGKLRWPTADA

SEQ ID NO: 54528 - protein, 269 aa, Roseateles depolymerans
MPAPAYLQYLKQHESLTLNSGEACEVWELDVPADEACLKDWAWRFRQTYCLDSDIDILRHGTGKTRAEYLIDLVFPDKSIAPGPGVRSGDFAELLISDFVEFMLGYWVPRTKYAEKSVRNESVKGVDIVGFRWNAHGHQPTDEMLTFEVKAQLSGGKYTNRLQVAVDDSGKDYLRAGETLAAMKRRMHLAGQHEQLLVVQRFQNVADRPYRLLSGAAAVLSDDSFDADSLKGTSIAAHNNGGSLRLITVRGSKLMLLAHYLYQRAADEA

SEQ ID NO: 54529 - protein, 780 aa, Roseateles depolymerans
MPTSAGKTRSVEVILRGAFLADRTRVAILVAPFRALCHEIAGSLRLAFKGEDVKVNELSDALQLDFVDQLAELLGAVAPATRNLLVLTPEKLLYVLRQEPSLVAHIGLVVYDEGHQFDTGARGITYELLLTEIKSLLQEAAQTVLISAVITNATAVGTWLIGAEPNVVDGTGLLSTARSVAFARWAEQRGQLLFFESGAYEQSDYFVPRAIEAQELQLRGKERKVRFFPEKGDDSWKDVSLYLGIRLAPSGAVAVFCGRKDTASGLAERAVEVYGRGFALPPPATVSNAAEIQTLTHLATMHFGAESTVAQAAALGVFVHHGTTPQGLRLAIEHAMQRELIKLVVCTSTLAQGVNLPIRYLIVSGVNQGEDQIKTRDFQNLMGRAGRAGMHTEGLVLFADPRVVDRWPARDWRMNAAIGLMQPENAEATSSSLLTLLAPLTSPEGISLPLATDALLAAYFLRGEQLSAWADEVVAALPQYGLKQVDVIKAISKRQKLVTALESYLMANRGAESFEELTPRVRLLAQSTLAHALADEGSKAALGRLFELAAAHIEQVLPDPARQATYAKTLLGVLDAARVEAWVSERAELLRALTTNDEWLRAVWSLFLEVVDNKILTGTEPPEVPFQLAQGWIQGSTYQGLIAFAKATEATKPWGEKRRRKVSDADVLDFLEGCLGFDCSLVVAAIGQFLFGATGLNSEGTASLTEFQKALKYGLPSKLAVSVYEAGLADRFIAYDVALSLSLFGYAGHHFIPALAEHRDVVSEVLQRYPSYFTDVLQGL

SEQ ID NO: 54530 - protein, 268 aa, Treponema brennaborense DSM 12168
MNYFNWLKKETSLLSVDGKTIEIYSLNCDLNNDAIMSEWATHFRNQYCDDAEIDLLKPKNQSRKDYLNQIKFPDPSNAPGPSIRSGDFGEILISDFLEFLENYWIPRTRYNRKDIQNESSKGSDVLGFKFASTNSFSADDELCIFEVKAGYSETKGNYDRLQDAVNGSQKDEKRKAESLNAIKQRFIDLKQFNEANKIERFQDPADIPYIQEYGAAALFDENIFLPTRIISVDCTEHSNNDILRLIVISVKEMKTLINSLYKRAADEA

SEQ ID NO: 54531 - protein, 1028 aa, Treponema brennaborense DSM 12168
MKPKTNSKNLLSISQSIAKMIEFHVPEDDRQLRTSQKPEKLFSISIGLLGDYARLINTDYENPQKKELQSDLLYSAEFLESYANSNLDKNPIYELLVGAAAYYLCDLPGSSQVLINKIHENYEYEFNCSNLDRFLYWLLKNDYQNIPDWDCGIYNSHVLILSFYFHRYFNKSTEEELCINIANSFRKNAYIDGNSRELFFSELITSIIIEKIKNSCLKLLPLYSNLQSSVWLPIINNGLFIKELWPSQKLLGENGVFQGKSAVVQMPTSSGKTKSIEIIIRSGFYSERASIAVIVAPFKALCSEITDELRYSFSNDKLIDINQLNDAFENSEQSLFFSDSKKHILVVTPEKLYYLLSLDKSIANTIGLIIFDEGHQFDNGSRGITYELLITELKVLLPESSQKVLISAVIHNASEIASWLMPDSITITNSYVPTKKNIGFIDFSMSPSIRFIDSVTLKEKYFVPRVLPALHSTQNPLLRNISPTNISLYMAFKMVTEGSVAVFCGQKKSVTKIMRDTISAMDLSPEEFNISSLGNLDEINKIGSLCNENLGSESLITKSCTKGIFPHHADIPKGIRAAIEFGMRKSLIKFVVCTSTLAQGVNLPIRYMFVNNTYQVGGEISVRDFNNLIGRVGRAGKLTEGCIIFTDPDIYKYRDIPYKDKQWKKTTKLLDPNQSEDCLSKILDILQYKNRYGTSILHSTNVDSFVNQYYESAPEEYQDIASQLIKHFDLKNISVNDLVSQMNEKLHLIKSIENFLMVLGDDLSDTNVELVAKNTLAYSLADDETKEVIIRLFSLIKAKILSQIEDISTLPIFAKSLSGIDESKIISSWLSDNHNSLIQTSSITDFITSIWPLIIGANKNSYFQFYEDKASLLNALLLWIEGKPYFEIFSYLPKLKVNKRDTLTIEHVINIFENGFGYDVPILINCITELLSLYLEEDEYKEICTKLHNFQKIIKYGLPETGAILLYEEGFCDRTICQKINSILGNPDNRSELFHKLVLKDAEISLLLQTYPSYFYNHYCVLIHKENN

SEQ ID NO: 54532 - protein, 259 aa, Aminobacter aminovorans
MTQFNDWCLSVDEPVGNHFRRVMTGQAASLATGIQATAAIVPGHYASEESVARALNRLGKPAAAALIEGKLPTTKNIRSGDLGEIYATEWIDAHSGGYRAPIKRLRWKDHRNMAMRGDDVIGILQDAATERLLLLKTEAKSRVALTGQVLTDARVGLDKDGGLPSAHALSFISARLLELDNLPLADAIDDALLKHGIPVQNVKHLLFTFSGNAPDALLTASIQAYPGPINQWGVGLRVEGHAAFIGAVYDRVIADANNA

SEQ ID NO: 54533 - protein, 1172 aa, Aminobacter aminovorans
MPTTPEAIAADITEAATAGFRGRLIARGQARAIIWRDGALPPDAPAFAPQLSYDLHSYAYGLLGLGLRLRELAGDAAQARTAFEQAATALEAVIAKGDRLETDRDFHFVMAAASYHLAHLSARAYSLLAIVETDENFAPIERALALLMRRNFSALRISVLDYRASGEGSDARITAVIQANLDQAEAADNPADGNNDFLFDGLDTALTDAFMAAMSLFLLALERGERPLLDQALERLRTSLSICSEMNMLPQWWAHRIALHLLPDLWSSTFHEKVPLQPAGGNAADWPRLRELFIALLQRRPRAEVDLWPSQIEAATRAVDQSDDLVVSLPTSAGKTRIAELCILRCLAGGKRVVFVTPLRALSAQTETTLQRTFGPLGKTISALYGSIGISGFDEDAIRERDIVVATPEKLDFALRNDPSLLDDVGLLVFDEGHMIGLNEREVRYEVQIQRLLRRPDAHERRIVCLSAILPDGDQLDDFAGWLRRDHPGGVIKHDWRPTRLRFGEVVWTSPNARLNLRVGDERPWVQRFLTGAAPPNWVPPKRQRTRLFPDDQRELCLATAWRLIEDGQTVLIFCPVRRSVEPFADVIVDLHERGALRTLLVADPAVLSTAIALGEEWLGPNSAILKCLRLGVALHHGALPTAYRKEVERLLRDGVLKVTISSPTLAQGLNLSATAVIMHSLHRSGERIDVSEFKNVIGRAGRAYVDVEGMVLFPMFDDIAKKRRNWEALISDLGARNMESGLALLVWTLLSRMHARIGGDLNQLVDYVANSAAAWTFPEIANEKPEDGERALTDWERHVATLDTAILSLIGENDIPDEGIAGALDDILQSSLWHRRLLRQNEQVQQALKAGLVSRSRLIWSQSTPARRRGYFLAGVGMTTGQELDAIADDANLLLIQANGGILEGDAEAAIVAITGLAERVFAFYPFTPDPMPANWRDILRAWLLGQPLAGIAAGQESETLQFIEGGLVYRLPWAMEAIRVRAAANGDRVGVFDLALEDHELGLAVPAVETGTLNRSASILIQAGFNSRLAAIKAVTDTGAAFQTGQELRQWLNSEAVAAWSAQPEWPTAETKAMWTEFTQSFIPPENRTWVDRRYWANASWLGAPPPPGTPVQLHHWGDHPRVLSADGAPLGTVQAALNPARAGLARAQVAQDVNKIDISYLGPADLSAA

SEQ ID NO: 54534 - protein, 260 aa, Aminobacter aminovorans
MALYKDWCDDDGDEDGLKRYLALTEKEGGRAAVIDLLGETVRSHYERLDRIADDIDLLGYETAAAILRELLPTKPKMRAGDLGEVLASELAQEMLEFDVPVRRMRFKDGREVPMRGDDFIGVNFCSDDGGLWLLKGEAKSRRKLGKTTITEAREALKRDDGRCTPISLLFVASRLMDSDDEDQADLGRRIRNEVGKKALARNRIDHALFTLSGNGPIDALVEDYKAAEAGRNHAVVNLHIEDYDDFIADIYERAGDLGDD

SEQ ID NO: 54535 - protein, 1146 aa, Aminobacter aminovorans
METTDELQAFLEEMVQPGIWGRLVARGSAWSLMRQDGVLPDGAPQFGRTIATDLSEHAFSVLRGALALRERGEQVELAGRAFERAANAFESLVRNGDAAAPERGFLRTLAAAAYHLAGYSAIAYSLFSDRNAERNTTVGEDALALLILRDFGALRALVRGWLRDADHADAAIAAGLQNETLDGDDAVQLILNGSVCRALAHFDFALQTGDAAFVDTARAILDRALGLADNTASVPLWWVIRLCRSLIADLWQHSLHTTLPIAPPMGGEEEYPDYRRLFIASLYGRKTAEVELWPSQREAAARSTDLTDDLVVALPTSAGKTRVAEIAALMTLSTGKRVLVVTPLRALSAQTERSFRRTFAPLGMKVSSLYGASGVSEGDEDALRTRPIVIATPEKLDFALRSDPNIIDDVGLIVLDEGHLIGPSEREIRYEILVQRLLRRADAGDRRIVCLSAILPDGEALDDLTAWMRSDVPGEPVKSIWRPTRQLFGSVIWQGRSARLGFNLRDNGPFVGRFIQEAAPRGQDQRSYPREVKDLTLFAAWQFAAQGKRTLIFSTQANWVEGYGTCAEKLVRKGYLPSLIDDPAPLARALEVGREWLGTNHPAIKAMRIGVAIHHGKLPQPFLREMELLLGEGVLKVIVASPTLSQGLNLNAAVLLVPYLVRAGEPISGEEFANVAGRAGRAFVDVEGLVAHVIMNNADYRMQQWRQLVASARARDLQSGLFQVIHEVLDRLSGAGILQRADAFEYLANSRENWALDDEPAAGDGDEEEQAPSFLALVEKLDAMILGLIEALDADSDELPRLLDEALIGSLWARKVAREADDVATRHRALLRARATLIWASTTPPQRRGHFAMGVGLDSGLALDEIADELADLVDAADAAAITGDADALGDALVGVAEKLLVIRPFTPDSELPNGWQAVLRSWVAGAAVDQIGPDRMKTVEDAFAYRLVWGLEAIRTRRMAAGWSPDLIAGGGAGAVETGVPSIMMAMLIRAGLPSRRAAMAAVETGGALFTNSAEMRTWIASDEVEALSAEDDWPTVETSALWRRFRNEVTGMSTPAWKIRSHRRRLELAEGQARPANGDYRVEINRRSGRAWIVSPDFQRIAKVRKVVRDAHTALYRARFVAGDDRVHIERLGPGEAHWEDAAA

SEQ ID NO: 54536 - protein, 271 aa, Chlorobium ferrooxidans DSM 13031
MPNHYTFEEVVGTHPVSPHPIGERFSYEDGHSEHGIPTRTLSETDSDVDQFVAAMREFLRTHHSRPEDLERDRLRREAYARQGLTLPLTRFPTNPKTRKGNWTEVLLCEYVTASCNADLPVYRLRYNPNVDQSMKGDDVLAFDLNAHPIRIIVGEAKFRGASSKKAVTDIIESLERSFRGGLPVSLQFVANRLIVERNEALGRRIEECADLFVRNRLRIDHVGLLASNHLAPTHVEKNAISSLRRIAVISMTLSDGEGLVNSCFNGLESTP

SEQ ID NO: 54537 - protein, 1131 aa, Chlorobium ferrooxidans DSM 13031
MLQWIGVHTMSLSVEHSRSIASALRVEPIPNFISQAKAKQLLQEVHELPEHFPGFTEGLDDRVTFVAYRMLSAGCSLVEQDLLGEGILQLHSAGELLESTHRTSARTESVSGFHCLIGAMAFYACGHYSRAYVLIKATETITPVAGIIASFLRKDFAKLIPRLNDVLLREQPLYEEDFIEADRRALDLLIARSVAHVLEHSISGEAELLTNADAILADAMIISEAGANPSFWWIARILRLMFNDYGRGSLWVCLPPFFGPDGKSTIGDYASLLALVKPPVTELWRSQLAALELALNGDNLGGVVNLRTSAGKTRVAELAILKELRANSTAKVLYLAPFRSLAFELERTFEKYLGALGFSISHLYGGSRFSGVDREMVLEAHLLIATPEKTKAMLRAAPELFDNVKLIVIDEGHLLGGSERNVKNELFLEHLRLLSRNRSTRILLLSAVLPNATELATWIGGSESALAQSDWKPSDERFGVLRWTKNGVQIEWRSESRCFNPDFVDFRWVVEPGKKKAREFPRSKTEAVAATAVRLSEIGPVLIFAGQAQWVPSMARSVILALQGEEKTHTWPDTEWRIFEAVCSEELGPDCIELEAARLGIVCHSNRLPPQVRIAIENLMAAGNPLVIVATTTLGQGVNIRVSSVIVSQTLIGKKRHITKRDFWNICGRAGRAYVDGEGKVLFAIDGTKAVWQIKHEMNLANQYLDILKIDKVESGLLQVIRILKRIAKETGVTFETFLELVANSDYESLNRHAEGVRSLMDLFDDQLLTLHVAYKGADPSGDQIDWIESAFQGSLAVIQAEAMENEDSASVLSLLKARTTSILRDVPDAPARQAIISSGLPLSVGKLAFRDLEFFRQCTDAYLASDQNDTAIAVLVSEFEDWARVNASAICGSIASKELLDVVRPQWLRGQPLLAIRESLEDDPLKICTEFYGYELSWLFHAVAQKLDQETEEERREALGLVSLLLELGLPNQAAAKVFLAGIRSRASAVELGAFVLDSTASPKRIRNALLNPETVEDLRSSISPKTANWLDLLEKDQTSSEEEIPSFSNFKLQVPHEITSLHSRKLPEQDTAFLCSTDCRFVFRAKSTEDLPFYDLANDLRFIFLRTGDLWCLHCRDPRLQAPTISFGD

SEQ ID NO: 54538 - protein, 87 aa, Burkholderia multivorans
MKKKAHALGDVDKVQLVERFQNKPDRPFIEQTGAAAVLNNVAYDEAQIILTSTANHPDDAVLLLLVIRGQDMMTLAHSLYERAANEA

SEQ ID NO: 54539 - protein, 1037 aa, Burkholderia multivorans
MYEYSVPEGDHIDVPAATHPEDLFALAIGIVGDAAGELCDEYIQRGTLQGDLVATDGPNLRFCASFFYAYVESKFDSDLDEELLTLAAATFYLAETPGSSAVISKYLAERPLPPDDALVTVLRHVLLSDWHDADEIQEGRFGRWIQRAVRSAIELRTSEGRDEQILLRNCAELRGQVYRIGTAREIAFVDLCIAVILRKVANSSRLSLPRYSRLDEEAWSEVLGKPGFITELWPAQRLLGKAGLFWGTSAVIQMPTSAGKTRAVELLIRSSVLANRAHTAVIVAPFRALVSEISNSLRGAFTGEHLSIDELSDVLQMDFLESLRELLGEIIQPRPKVIVLTPEKLLYVLRQEPRIAANIGLVVYDEGHQFDTGSRGVTYELLLTTLKQLLPWQAQIVLVSAVISNGEQVGKWLIGEHAKVIDGKDLMPTQRSVAFASWQQRGGSGRLEFVPVGDGEQSYFVPRVIEAFEFPLRGRERIVRKFPKREDPSEISLYLGLKLAAQGSTAIFCGQKASVAGMIRDAVGYFERGLPYPPPAEAADAVELSKLVYLHELHFGEDATATKGAQLGLLAHHGNTPQGLRLSIEHAVKEGLAPLVICTSTLAQGVNLPLRYLIISALNQGDEPLTTRAFQNLMGRAGRAGMHIEGSVIFADTRVYDGRLMRREGWRWRNVNGLLDSARVEPITSSLLSLIDPIWNDDKSQVVQDAFDAIVALVADEDNALAQLSDDADYLESIDASPKEVAKQVRKKARLVNAVASFLQSSRGDIGFEQYLDVVRGLSASTLAYSLATDAERETLTDSFVEIARAVERRVPDTGMQSRNSRTLLGLSALNKIDRWCLDHGDEVLAMRNQSELLASIWPIFLVVAENDLFARCIGKNQLLDVAQLWLAGQPYDLIGQFIQQAGIAKRHGEGARRFTPEDVVEICDNCFGYEFSLYLTALVTYFEHNNEGEAVATIDLLKMLQSGLKYGLPDALSVAILESGFSDRMLAQALRPQLDGVFPSKAAVIAYMRNNEALIRPILTRFPSYFDHVFTAQLGA

SEQ ID NO: 54540 - protein, 258 aa, Xanthomonas gardneri ATCC 19865
MGLYEKWCESTKENDERKYYWTYVERDGGRADIREDLAETIRSHYDRLERIADDVDRLGYKVAANILSEAMPQTPKGRSGDLGEILATELVEEEIGLRVPVRRLRYKDGRNMAMRGDDFIGAGYQGDKIWLLKGEAKSNQKLGKTTVTAARKVLDRDNGRCTPDSLLFVANRLLESNDTGDNALGRDLRDEVGLKSMRADRIDHMLFTVSGNGPHASLKENLEAAGANRDHYVVNIHVEDHQDFIAAMFLEAEDLGDD

SEQ ID NO: 54541 - protein, 1169 aa, Xanthomonas gardneri ATCC 19865
METTDELTAFLATATADGILGRLLYRGAAWSLMREDGVLPQNAPPLGATIETDLAEHGFAVLRGAMALRAQEGASDLTGKAFERAANAFEALVRNGDPDAPDRGFRRTIAAAAYHLAGFSAVAYSLFNETAEDLNTSPGETAIRHLILRDLDQLRGFVREWLDDEAHGDEQIAEALRGQDPDVDEALSTILNTTICRALTFFDFALETGEVEPIESARDMLATAVSLADNAENVPLWWISNLCRNLIDDLWQHSLHQSLPTEPPEGAEEKYPDLRRLFISSLYARKTSEVELWPSQREAAQRSTDVSDDLVVALPTSAGKTRVAEIAALMTLSTDRRVMIVTPLRALSAQTERSFRKTFAPLGFGVSSLYGASGLSAGDEDALRTREIIIATPEKLDFALRSDPSLIDDVGLIVLDEGHMIGPSEREIRYETLVQRLLRRTDAAERRIVCLSAILPSGDELDDLTAWIRSDEPGEPVRSDWRPTRQRFGALTWRGKDALLRLDLDDDGPFLDKFVVEKPPLGREKKPYPRKNSHLALFAAWEFASQGKRTLIFSTQANWVESYGKQVVDLCKRGYLDSLIDDEAPIARALEVGKEWLGEDHPAVASLKVGVAIHHGRLPSPFLRELEVLLSEGVVKVIVASPTLSQGLNLNAAVLLVPALYRAGEKIKGEEFANVAGRAGRAFVDVEGLIVHVMFDRVKWRKSEWRGLVASAKARTLKSGLIQIVAEILERLSREGVLDRDDAWEYLANAREAWRSLDEEAKVAERLAAAVEYDADADDEDEDEDTDDEEESIDEEPLSQLVERLDAIVFGLIEALDADRVDLPKLLDEALKGSLWARQIAREDDDVAPLHKKVFEARADLIWRTTTAEARRGHFAMGVGLEAGLAIDAMADELAELIDRADQAALSGDIDELVDALGGLGERLLFMRPFISDKANALPANWKAILHSWVSGEEVSRIGSQNMRAVEEAFTYRLVWALEAVRTRRMSLGWSPETVAGGASAAIETGVPRFMMAMLIRAGLPSRRAAIAAIEDAEPVFVTPAEMRAWLESDEITTYTDAGDWPTPNTSALWARFRTEALSGGIQKWSVQRYKRLLDIEAAPPPGLYRIVTDEGDGRTWLATPDYKRVAAFKKPAVDPKPSLFSGRLPGNTRLVEALRVGRGKLGWPSADA

SEQ ID NO: 54542 - protein, 258 aa, Xanthomonas gardneri; identical to SEQ ID NO: 54540

SEQ ID NO: 54543 - protein, 441 aa, Xanthomonas gardneri
METTDELTAFLATATADGILGRLLYRGAAWSLMREDGVLPQNAPPLGATIETDLAEHGFAVLRGAMALRAQEGASDLTGKAFERAANAFEALVRNGDPDAPDRGFRRTIAAAAYHLAGFSAVAYSLFNETAEDLNTSPGETAIRHLILRDLDQLRGFVREWLDDEAHGDEQIAEALRGQDPDVDEALSTILNTTICRALTFFDFALETGEVEPIESARDMLATAVSLADNAENVPLWWISNLCRNLIDDLWQHSLHQSLPTEPPEGAEEKYPDLRRLFISSLYARKTSEVELWPSQREAAQRSTDVSDDLVVALPTSAGKTRVAEIAALMTLSTDRRVMIVTPLRALSAQTERSFRKTFAPLGFGVSSLYGASGLSAGDEDALRTREIIIATPEKLDFALRSDPSLIDDVGLIVLDEGHMIGPSEREIRYETLVQRLLRRT

SEQ ID NO: 54544 - protein, 258 aa, Xanthomonas gardneri; identical to SEQ ID NO: 54540

SEQ ID NO: 54545 - protein, 1169 aa, Xanthomonas gardneri; identical to SEQ ID NO: 54541

SEQ ID NO: 54546 - protein, 258 aa, Xanthomonas gardneri; identical to SEQ ID NO: 54540

SEQ ID NO: 54547 - protein, 1169 aa, Xanthomonas gardneri; identical to SEQ ID NO: 54541

SEQ ID NO: 54548 - protein, 258 aa, Xanthomonas gardneri; identical to SEQ ID NO: 54540

SEQ ID NO: 54549 - protein, 1169 aa, Xanthomonas gardneri; identical to SEQ ID NO: 54541

SEQ ID NO: 54550 - protein, 258 aa, Xanthomonas gardneri; identical to SEQ ID NO: 54540

SEQ ID NO: 54551 - protein, 1169 aa, Xanthomonas gardneri; identical to SEQ ID NO: 54541

SEQ ID NO: 54552 - protein, 258 aa, Xanthomonas gardneri; identical to SEQ ID NO: 54540

SEQ ID NO: 54553 - protein, 1169 aa, Xanthomonas gardneri; identical to SEQ ID NO: 54541

SEQ ID NO: 54554 - protein, 258 aa, Xanthomonas gardneri; identical to SEQ ID NO: 54540

SEQ ID NO: 54555 - protein, 1169 aa, Xanthomonas gardneri; identical to SEQ ID NO: 54541

SEQ ID NO: 54556 - protein, 258 aa, Xanthomonas gardneri; identical to SEQ ID NO: 54540

SEQ ID NO: 54557 - protein, 1169 aa, Xanthomonas gardneri; identical to SEQ ID NO: 54541

SEQ ID NO: 54558 - protein, 258 aa, Xanthomonas gardneri; identical to SEQ ID NO: 54540

SEQ ID NO: 54559 - protein, 1169 aa, Xanthomonas gardneri; identical to SEQ ID NO: 54541

SEQ ID NO: 54560 - protein, 258 aa, Xanthomonas gardneri; identical to SEQ ID NO: 54540

SEQ ID NO: 54561 - protein, 1169 aa, Xanthomonas gardneri; identical to SEQ ID NO: 54541

SEQ ID NO: 54562 - protein, 277 aa, Bordetella hinzii 1277
MRGITLRTRQGWSIGGSVGLYERWCEATKKKDKRKYYWTYVEREGGRDEIRADFAATIRSHYDRLERIAEDVKRLGYKAAAQILSEALPQTAKGRSGDLGEILATELVEEEVGLRVPVRRLRYKDGRNMAMRGDDFIGAGYNGVDEKLWLLKGEAKSNKVLGKATVTSARKVLNRDNGRCTPDSLLFVANRLLESNDPDDNVLGRSLRDEVGVKSLRADRIDHMLFTVSGNGPHASLKEDLDAAGTNRDHYVVNVHVADHQDFIAAMYQEAEDLGDD

SEQ ID NO: 54563 - protein, 1167 aa, Bordetella hinzii 1277
METIDELTTFLATATVDGILGRLLYRGAAWSLMREEGVLPANAPPLGATIETDLAEHGFALLRGAMALRAQAGASDLTSKAFERAANSFEALVRNGDPESPDRGFRLTIAAAAYHLAGFSAVAYSLFNEAMDDLNASPGETAIRHLILRDLGQLRGFVRDWLDDHAHGDEEIAKALMGEETDIDEALSTILNTTICRALAHFDFALETGEPEPIETARALLATAVSLADNGGNVPLWWICNLCRHLIDDLWQHSLHENLPTEPPEGTEEKYPDLRRLFISSLFARKTSEVELWPSQREAARRSTDVTDDLVVALPTSAGKTRVAEIAALMTLSSARRVLIVTPLRALSAQTERSFRKTFAPLGFSVSSLYGASGLSAGDEDALRMREIIIATPEKLDFALRSDPSLIDNVGLIVLDEGHMIGPSEREIRYETLVQRLLRRADAGERRIVCLSAILPSGDELEDLTAWIRSDEPGEPVRSDWRPTRQRFGALTWRGKDALLRLDLDDDGPFLDKFVVEKAARGKEKKPYPRKNSHLALFAAWEFAGQGKRTLIFSTQANWVESYGKQVVDLCKRGYLDSLLEDEASIARALEVGKEWLGEDHPAVACLKSGVAIHHGRLPSPFLRELEALLSEGILKVIVASPTLSQGLNLNAAVLLVPALYRASEKITGEEFANVAGRAGRAFVDVEGLIVHVMFDKADWRKKEWRKLVASAKARTLKSGLIQIVAEILERLAREGVLDRDDAWEYLANAREAWRSPKEEAEVAERLATGAEYDAEGDDDEGGGDDKEETIEEEPLSQIVERLDATVFGLIEALDSDRADLPKLLDEALKGSLWARQIAREDKDVAPLHKKVFEARADLIWKTTTAQARRGHFAMGVGLEAGLKIDAMADELAELLDRADHAALSGDVEALVDALGGLGERLLFMRPFIPDKANALPTNWKAILRSWVSGENVAKIGPQNMRVVEEAFTYRLVWALEAVRTRRMSLGWSPETVAGGAAAAVETGVPQFMMSMLIRAGLPSRRAAMAAIEDAMPVFVTPAEMRAWLESDEITAYTDAGDWPTPDTAALWARFRTDALSGGIQKWSVEHYKRLLDTAIAPPAGLYRIVTDEGDGRTWLTTPDYQRVGAFKKPAVDPKPSLFSGRVPGGTRLVEALRVGRGKLRWPPADA

SEQ ID NO: 54564 - protein, 277 aa, Bordetella hinzii 4161
MRGITLRTRQGWSIGGSVELYERWCEATKKKDKRKYYWTYVEREGGRDEIRADFAATIRSHYDRLERIAEDVKRLGYKAAAQILSEALPQTAKGRSGDLGEILATELVEEEVGLRVPVRRLRYKDGRNMAMRGDDFIGAGYNGVDEKLWLLKGEAKSNKVLGKATVTSARKVLNRDNGRCTPDSLLFVANRLLESNDPDDNVLGRSLRDEVGVKSLRADRIDHMLFTVSGNGPHASLKEDLDAAGTNRDHYVVNVHVADHQDFIAAMYQEAEDLGDD

SEQ ID NO: 54565 - protein, 1167 aa, Bordetella hinzii 4161
METIDELTTFLATATVDGILGRLLYRGAAWSLMREEGVLPANAPPLGATIETDLAEHGFALLRGAMALRAQAGASDLTSKAFERAAHSFEALVRNGDPESPDRGFRLTIAAAAYHLAGFSAVAYSLFNEAMDDLNASPGETAIRHLILRDLGQLRGFVRDWLDDHAHGDEEIAKALMGEETDIDEALSTILNTTICRALAHFDFALETGEPEPIETARALLATAVSLADNGGNVPLWWICNLCRHLIDDLWQHSLHENLPTEPPEGTEEKYPDLRRLFISSLFARKTSEVELWPSQREAARRSTDVTDDLVVALPTSAGKTRVAEIAALMTLSSARRVLIVTPLRALSAQTERSFRKTFAPLGFSVSSLYGASGLSAGDEDALRMREIIIATPEKLDFALRSDPSLIDNVGLIVLDEGHMIGPSEREIRYETLVQRLLRRADAGERRIVCLSAILPSGDELEDLTAWIRSDEPGEPVRSDWRPTRQRFGALTWRGKDALLRLDLDDDGPFLDKFVVEKAARGKEKKPYPRKNSHLALFAAWEFAGQGKRTLIFSTQANWVESYGKQVVDLCKRGYLDSLLEDEASIARVLEVGKEWLGEDHPAVACLKSGVAIHHGRLPSPFLRELEALLSEGILKVIVASPTLSQGLNLNAAVLLVPALYRASEKITGEEFANVAGRAGRAFVDVEGLIVHVMFDKADWRKKEWRKLVASAKARTLKSGLIQIVAEILERLAREGVLDRDDAWEYLANAREAWRSPKEEAEVAERLATGAEYDAEGDDDEGGGDDKEETIEEEPLSQIVERLDATVFGLIEALDSDRADLPKLLDEALKGSLWARQIAREDKDVAPLHKKVFEARADLIWKTTTAQARRGHFAMGVGLEAGLKIDAMADELAELLDRADHAALSGDVEALVDALGGLGERLLFMRPFIPDKANALPTNWKAILRSWVSGENVAKIGPQNMRVVEEAFTYRLVWALEAVRTRRMSLGWSPETVAGGAAAAVETGVPQFMMSMLIRAGLPSRRAAMAAIEDAMPVFVTPAEMRAWLESDEITAYTDAGDWPTPDSAALWARFRTDALSGGIQKWSVEHYKRLLDTAIAPPAGLYRIVTDEGDGRTWLTTPDYQRVGAFKKPAVDPKPSLFSGRLPGGTRLVEALRVGRGKLRWPPADA

SEQ ID NO: 54566 - protein, 260 aa, Bordetella hinzii LMG 13501
MELYERWCEATKKKDKRKYYWTYVEREGGRDEIRADFAATIRSHYDRLERIAEDVKRLGYKAAAQILSEALPQTAKGRSGDLGEILATELVEEEVGLRVPVRRLRYKDGRNMAMRGDDFIGAGYNGVDEKLWLLKGEAKSNKVLGKATVTSARKVLNRDNGRCTPDSLLFVANRLLESNDPDDNVLGRSLRDEVGVKSLRADRIDHMLFTVSGNGPHASLKEDLDAAGTNRDHYVVNVHVADHQDFIAAMYQEAEDLGDD

SEQ ID NO: 54567 - protein, 1167 aa, Bordetella hinzii LMG 13501; identical to SEQ ID NO: 54565

SEQ ID NO: 54568 - protein, 253 aa, Methylibium petroleiphilum PM1
MLDLSKWCIENEESVPKHKLLRLAVDATKQAQAVEAVAKAVPSYYVDPKRIAGLLRKLGKPAAAAHVEQKLPTQASIRSGDLGEILCNAYVHAATPFSLGIKRLRWKDHRNMSMRGEDVLAFKLDPKGGPLKILKAEVKSRAGMRTEVIDEARTALSANNGLPSPHALAFVADRANEAGDTALGDALDKAQLKEGIRPSQISHMLFTFSGNDPLKFLKVNLQAYAGPVPQHYVGLRVEGHQEFIKAVFVAVGK

SEQ ID NO: 54569 - protein, 1165 aa, Methylibium petroleiphilum PM1
MAATLDELRINIEAAVVPGYRARLLARGQARGMIWREGVLPEESPNFGAELSDELLSYGYSLLLHGLRYTDLGGDAATARKAFEIAAEALEAVVARGPAGAERGFHRLVAAAAYHLGRFSARAYSLLYKGLGEANLSTMETGLAKLMLRDLDGLARDLADWFAADRGSDDALVAGLSQRDAKVTSAGADDEETSDDRVDAVLIAVEDNFMAALAVAMLGLERGDETLLQSARERIQRGLDVAADLDLVAAWWCHRLAIHLLGGLWETSFHQVLPLGGPPGADVGDWVRLRKIFIASLYRRGRSEIELWPSQLQAARRVLDAEVNLVLSLPTSAGKTRIAELCILASLARGRRVVFVTPLRALSAQTEVGLRRTFAPVGKSVSSLYGSIGASGADIDALRSTDIVVATPEKLDFALRSDPTLLDDVGLIVLDEGHMIGLGEREVRYEAQIQRLLRRPDAAQRRIVCLSAILPDGDQLEDFAGWLTRDRPDGLIKDDWRPTRLRFGEVDWKGQHAQLNVNVGDEKPFIPRFVVAKKPTRGRARKLFPADQAQLCIATAWRLVEEGQTVLVFCPMRRSVLPLAATIIEMHKRGHIDSVLEQAPSALTRALAVGTEWFGPDHDILACLKLGVAVHHGALPTPYRKEVERLLREGVLRVTVSSPTLAQGLNLAATSLVFRGVRRGRDLLDVAEFRNVVGRAGRAYIDVEGLVVYPMFDNHRQRRNDWQDLVANHSGREMESGLLRLIFTLLSRMANKLGTRDVGALLEYVAGQAAWEFPVLPSETTEEATEARHRWDQHLASLDTAIFSLLGDTIVLDAEVETKLDEILVASLFQRRLARHKEGIRQALPKGLHARARYVWRNSTPTQRRGYFLAGVGLAAGKALDKHAPELEQLLLTANVSIDLGQHNEAVEAIVAFAEIAFDIAPFKPDKLIDGWESLLRRWLLGQPVADALSEDSDDEIQFIEQAFVYNLPWAMEAVRVRAEAHEDLFSDEIKLSDYPRAHAVAALETGTLSIAAATLIQAGFGSRLGAIRAVAETGATFDSMSGLMGWLASDEVGALSAAPNWPTPESNPLWVDFNGPGGAQATQPWAATEYTSGITWRGAPMPPGTALRLGGGPGKERSVFTADFREVGAIGWTPSAQGLIVAEATGDTGKFTLEHIGPGKVNRD

SEQ ID NO: 54570 - protein, 254 aa, Agreia bicolorata
MKTWVTITRENVGSHKVVRMVPADEVAIDAGVKWAAAAVPRHYVSADEIAAVLRELGKPEAAEVLSGKLPVSKRTRSGELGEILATQFVARELGYRMIARLRWKDGREMPMRGDDLLGVRMVDDDKLEFLKGEAKSRASLSTSTLNEAEAALLSEHGLPTPHALMFVAARLREMGETKLHMKILAAQLRGRIRSGDVLHLLFTFSGNDSLRLLRDHTEAYKGKIRRLGVGLQVPEHQAFIRRVFEKVIRDARAR

SEQ ID NO: 54571 - protein, 1161 aa, Agreia bicolorata
MPGRVEDLEAAIGRATAPGFRGRLLARGEARAMVWREGVLPEDAPPFDVLLSHDLLSYGYALLEHGLELSDLEGSAEASRRAFENAATAIESVIARGEVTPDLGFHRVVAAASFHLARFSARAYSLLAATRNDQNTSPTERCLVLLMLRDLDSLTTLVSGSRADERAADASLAEELRSVLAPDEDNDDEADVLDIVDAALTDAFMGAISVAMLGFERGEPPLLTEAIARLEVGMRGAAALSMVPQWWCHRLATHLLRGLWESSFHVVLPMGPEGGDAGDWDRLRATFIASLFRRRRSEIDLWPSQLEAASRVLNTQDNLVLSLPTSAGKTRIAELCILATLAEGKRVVFVTPLRALSAQTETALERTFVPLGKTISSLYGTTGVSDVDESILQGRDIVVSTPEKLDFALRNDPDLLNDVGLIVLDEGHMIGASEREVRYEVQIQRLLRRPDAKTRRIICLSAILPEGDEVKDFVDWLTDDEPNGLISSDWRPTVLRYGEVVWREDNARLNITVGGEEPYVPRFLTAEAVPSKQRKLPFPKDAQELTLATAWRLVDDGQTVLVFCPLKSSVNAFAKLIVKLVRQGALRSVFDGDPTVLNTALSIGQEWFGADHPLLACLRLGVAIHHGSLPGPYRKEVEKLLQQGALKITISSPTLAQGLNLSASSLVVHSLWRNRKIIDAAEFRNIVGRAGRAFVDSSGLVVHPMFEPSRRARQNWEWLVEDSQLRDMQSGLVRLLATMLQRMSDNLGETDWGDFTEYVTGLADWSFPVIATEDEEATNESMKSWPGQLASLDCAILGLLSDSSVAEDDLGAALDAVLVSSLWARTIARYQEPVRNALRTGLVARAEVIWRSTTPDQRRGYYLAGVGLATGRELDSNAEQLNRHIQIAEAAIQLGMNDEAIDAITRFARIALEIFPFTPKTRPDNWEEILVGWLRGRPVVELAADDSLETAEFIEETLAYRLPWALEAVRVRAAAHPTPDTFPWALSSPETGLSVAAVEAGTLNRAASTLMRAGFASRSGALAAVESTEAAFTTPAGLHEWMISEAAQIATRDASWPTPITRELWMSFATRTVVLRQRTWIHEVHEASVSWIPGYLPTPGEPYRAISHSDETTVLEAADARPVGVLTAHLNLRRQGLLKVTAIGAGDVVELDYLGPSDLLA

SEQ ID NO: 54572 - protein, 257 aa, endosymbiont of Bathymodiolus septemdierum str. Myojin knoll
MLNITDKSVVSEHTQDRHSFKKVELKGAEFQNLIEELIDILPDYYIDPLSMASTLERLGKPAAAEKLRIKLPKVTKIRSGDIGEILTTDYIDEKTVFSVPIKKLRWKDHRNMAMRGDDVIGVLINQENQTIKFLKAEAKSNQSLSRNVLSKARDELDLDEGLPAPHALEFVAERLRDTGNQTLANLIEKAQLSDGIGNSQVEHLLFTFTASKPEKLQKEAFDDYSGNIKQSSVGFQVSNHQELIGSVYQGVLDGLGD

SEQ ID NO: 54573 - protein, 1197 aa, endosymbiont of Bathymodiolus septemdierum str. Myojin knoll
MASAIEEIEKAIQQAIATGFRGRLLERGLARSMIWVDGELPDGSPNFAPRLSYDLLSYGYSLLSLAIRLTELNGNPEFARAAFEKAATAITDVIHNGNPDDPEKGFHKVLAASSYHLGRFSAKAFSLLNHNIENENLSRIEKMLSLLMLRQFAALETSVLAWKESGLGSDNSLAEKIDFEIDQLNGQLESEDRPEEYGIASIELPIIDLAITDNYYSAIYEFLFALEIGNIALLESAINRIENSLSITTELNMLPQWWVLRITKYLFRDLWESSFHTVLPVTPDQENSEDWALLRWLFIASLFKRNKAEIDLWPSQLEGARRAVNDVDDLVVSLPTSAGKTRIAELCILRCLSIGKRVLFITPLRALSAQTEASLRKTFLPLGKSVSSLYGSIGTSDFEQNVIKSKDIVVGTPEKLDFALRNDPSLIDDVGLVVLDEGHMIGLSEREISYEVQIQRLLKRDDAEQRRIVCLSAILPDGDQLEDFVGWLRRDKEGGAIQSLWRPTDLRFGEIVWQANTGRINFTIGEEKPFIPNYIHPFIPPVGRRSTPFPKNKKELTLAATWRLVQDNHTVLIYCPEKRSVNSFARDIIDLHKREALDSVLSVPLQQLDLAIVLGDEWLGDGHPIVECLKIGVAVHHGALPTPFRKEMEKLLREGILKVTVSSPTLAQGLNLSATAVIVYSLTRNKNIIDASEFKNVIGRAGRAFVDTHGLVLYPIFERHDWFRTQWRRLVEDTKARNMESGLALLVITLVSRIAQSIGNSDINGLLESDINGLLESDINGLLEYVLNNTQAWGFPNVANETTEQIKAQKIAWDKHIVSLDTALLSMLGEEDVSIIDIPNALDAILHSSLWQRSLNRHDEEKKGLKGLFDSVLAQRAKYIWNVTTTFQRKGYFLAGVGLDTGQRLDAISPQANVLLVNANGYISANEQQLAIARIIQLAELVFDIAPFTPRNLPDDWREILAVWLRGEILTEHEFNDINEALMFIEDGLIYRLPWGLEAIRVRAQANEDVIGDSATIDDYEVGLVVPAIENGTLNRSAALLMQAGFNSRKAAIHAVSSTNASFTTGVQLKAWLNSVEVFDLAIEPDWPTPETSNLWRDFIKEYDPKPETTWKLANSIISVVWINNYNPVAGRFVKLHNLKKGNTLILGSDGELIGSIANYRYKLLDGGIYRSSIHSDTSYIDVRYWGAEGSPFDYHV

SEQ ID NO: 54574 - protein, 257 aa, Pseudarthrobacter sulfonivorans
MNVVTMFDSWCSKGVLTSIAGQASSQIDSHDDATGVAVLAAKLPDAYAETTALALIAERHGKPGVAAFLRHRLPTKKSARSGDMGEILATAYLAEERGYVVGPSRLIDRDHQEWAMRGDDVLAARIDAGSELRIVKAEAKSRVTVGGATVKEAREGLARNAEMPSPHSLSQFATRLLKTSDREIGEAVLDLQLTDGVRPDRVRHLMFLLTAGDPSAHVGADLKAYAGTVPQLTVTLRVQQHQKFINDAYDKVVASVP

SEQ ID NO: 54575 - protein, 1182 aa, Pseudarthrobacter sulfonivorans
MSRDAQALVAGLSAATDARFRSRLLARGQAQSMIRRDGVLPNGSPEFSPFLDADLLNYGYALLADGMDLLEELEADDDGDGDGDATSQIEVARLAFIQSSYALEAATRNAADTPDKLFHRLIAGAASHLGGYAARAFSLMERSRESGQLTPMELTLADLTMRNLDAIEERTRLLRSSENVSDDVLLASLSGGDNDADNDAVNPLGPVALLLGENYLSAVSRGLFGIEVGERELLAEALEDLTLGERASMDVSAPGPWWVYRLTRRMLGDLFNTSIDANVPVDPPTGGDDVVPRWRYLRRTFIENLLARGRSEIDLWPSQLHVVDRIFADVRDLVVALPTSAGKTRIAELAILACLAQGRRTVYVTPLRALSAQTEQVLTRTFAPLGVRVSSLYGSMGISDVDDDTLRSSEIVVATPEKLDFALRSDPSVLDDVGLVVLDEGHMIGASEREVRYEAQIQRLLRRPDASTRRIVCLSAVFPSGTELEDFVAWITDDEPEGLHQETWRPTLQRFGLVEWLGDHARLAITLGSDQPFIPRYFEAKQPIGKRTRPFPADQRELVIATAWRLVDEGQTVLVFCPQRNSVEPYAREIIKMHRQGLITAVLPDHVDLSGALVVGAEWFGADHPILRCLELGVAIHHGALPGPFRREVEKLLHEGTLKITIASPTLAQGLNLSASAVLFHGLKRGRELLKGSDFSNVIGRAGRAFVDTEGLVLYPIFEPRAYQRQRLRQDWLQLTQGDGGKALDSGLIAVGLALLGRMHISRGAGPIEPFLDYLTGGPDWALPVLQQESAADHATAAAAWSSNLSLLDIGILSIMGDGAYDADPDAATQVITDALVDSLWERQLRRRDTGVATAVRELVTGRVRHLWRTSTPSQRRGWYLAGLGADAGSSLSAISGQVVDLMEQVEVGLVYEDYIAASDRLVEIAAVVFGLDTFAPEVSIDNWSEVLRQWVHGLRLADLTGDRVAIAQFIETDLVYRLVWGMEAARVFEAAQGNALAETLSGTAVTAVETGTFNWSASVLIRSGFDHRLAAQKAVVSTGAEFDSVADMRQWVNNLDPWFAHDEAWPSPESRQAWEMFASHARRPRLRQWGRSTKDIDDVTWYGVVPGPKTWLRITELDAKTVQIWTTGFDLLGEASIQLNPERLGILRAQRMSSSQGIRLLYRGPRDLFASTGSRSSTQPP

SEQ ID NO: 54576 - protein, 256 aa, Pannonibacter phragmitetus
MIEDWLNIEEAEHGERKRLFVLGERGGGRVAVQADLMERVRAHYDDPRHIADDIAELGFPGAAAILRERLPTDARTRSGEVGEILATEFVEHQTGFRIPVRRLRYKDGREMALRGDDFLGIEEVDGRLAYLKGEAKSGQAMAAGVINAARARLNDDDGRPTPISLLFVADRLLEGSEEDEALGRQIRNAVGRGTIRARDVTHGLFTLTGNDRRADLEADLAGAGGDHGHISVNLRINDHQEFIAWIYEEAESLGND

SEQ ID NO: 54577 - protein, 1137 aa, Pannonibacter phragmitetus
METIEELQEFIEVMAQPTVRGRLQARGDARAIIRRAGQLPEGAPAFAVSLDTDLSEYGFSLLRASLALRERGEGDPAIWREGFLKAGNAFEALVRNGSPELSQRGFWRVMGAASYHLAGYAAMAFSLMSQAEEEANLAPAERVIVRLLLSDLGTLRDEARSWLRNPEYGDDALQAALEVGDQEIDDILSIMLTTAVFRAFAFFEFALLTGDTAMHDGALSILRRALRVASNVGAVSHWWIIRVARNLIDDLWGNSLHHVLPQIGPAGTDGYAALREMFLASLYARKTAEVELWPSQIGAARRATDLTDDLVVALPTSAGKTRVAEICTLMSLSAEKRVLLVTPLRALSAQTERSFRKTFGPLGFSVSSLYGASGAMPGDQDALRSHDIVIATPEKLDFALRSNPQLLDDIGLIVLDEGHLIGPSERELRYEILVQRLLRRADAVDRRIVCLSAILPDGEQLEDLTAWVRSDAEGEAVKSSWRPTRQRFGTLAWGGQGARLTFDLDDDGPFIQNFVTEQPPIAPRRTPFPRDNPELTIAAAWQFADEGKRTLVFCTQRDHVESYATRIVDLARRGFIAPLLADEGAIERAKSVGAEWLGAEHPAVRCLELGVAIHHARLPNPFLREVERLLNEGVLTVTIASPTLAQGLNLNAAVLLVPTLYRAGTPLTGEEFANVAGRAGRAFVDLEGLVIHVMFEPLRWRRQAWRELVNASRARTLESGLIQIASEILNRLARSGTLSRDDAFEYLANNRDAWNIHVDEEDDEPFELLLEKLDHAILGLVEALDADDADLPRLIDESLNGSLWARQLARRGDDLRERQLELFRARSGLIWSQTNADQRRGHFAMGVGLESGLTLDAMADELAVLLDQADEAALPGDSEVLVASLTTLAERLLAIRPFVPDDPLPGNWREILAAWVSGTPVHEIGPDNMRFIEDVFTYRLVWALEALRTRRVALGWQPEIIAGTAAACLEAGLPRYTMAMLVRAGLPSRAAALAAINDQDPIFIDNDGLVVWLETNEVVAMTDAGDWPTPATNDIWKAFRAEMLNRISQRWTSRDWRINIEPATRQIVPVPASPYRVEVDETDNAVWVLTPDFKVVAMLGQSMVDAAPSVLTARFDEGSPQAIIRRHGRSHASWSEP

SEQ ID NO: 54578 - protein, 256 aa, Pannonibacter phragmitetus
MIEDWLNIEEAEHGERKRLFVLGERGGGRVAVQADLMERVRAHYDDPRHIADDIAELGFPGAAAILRERLPTDARTRSGEVGEILATEFVEHQTGFRIPVRRLRYKDGREMALRGDDFLGIEEVDGRLAYLKGEAKSGQAMAAGVINAARARLNDDDGRPTPISLLFVADRLLEGSEEDEALGRQIRNAVGRGTIRAGDVTHGLFTLTGNDRRADLEADLAGAGGDHGHISVNLRINDHQEFIAWIYEEAESLGND

SEQ ID NO: 54579 - protein, 1137 aa, Pannonibacter phragmitetus; identical to SEQ ID NO: 54577

SEQ ID NO: 54580 - protein, 258 aa, Stenotrophomonas acidaminiphila
MAQFNDWCLAIDVPVGNHFSRVMTGQAERLPVGIQATAAIVPTHYASEEQVARALARLGKPASAALIQGRLPTTKAIRSGDLGEIYATEWIDAHSGYRAPIKRLRWKDHRNMAMRGDDVIGILQDAQTQQLLFLKTEAKSRATLTAQVLTDARTALDKDGGLPSAHALSFISARLLELGNLPLADAIDDALLKHGIPAQNVRHLLFTFSGNPPDTLLTAALQTYPGAINQWGVGLRVEDHANFIGAVYDRVIADANNT

SEQ ID NO: 54581 - protein, 1173 aa, Stenotrophomonas acidaminiphila
MPTTPEAIAADIAEAATAGFRGSLIARGQARAIIWRDGALPPDAPGFAPQLSYDLHSYGYALLGLGLRLRELSGSDAQARTAFEQAATALEAVIAKGNPDEVDRDFHFVMAAASYHLAHLSARAYSLLAIVAADGNFAPTERVLSLLMRRDFRTLRTSVLDFRASGEGSDTEIAGRMRVRLDMVGTGINLAGDGEDILFEGLDKALTDTFMAGISLFLLALDRGERALLDQALERLRTGLAVCSEMNMLPQWWVHRIAIHLLSDLWSSTFHERIPFQPAGSEAADWPALRRLFIALMQSRPKAEIDLWPSQTEAANRAVDQSDDLVVSLPTSAGKTRIAELCILRCLAANKRVVFITPLRALSAQTEANLQRTFGPLGKTISALYGSIGVNGFDEDAIGERDIVVATPEKLDFALRNNPALLDDVGLLVFDEGHMIGLNEREVRYEVQIQRLLRRPDAHGRRIVCLSAILPDGDQLDDFAGWLRRDHPGGLIKNDWRPTRLRFGEVLWTSPTARLNLRVGDERPWVQRFLVGEAPPHWIPPKRRRTRLFPDDQRELCLATAWRLIEDGQTVLIFCPERRSVEPFADVIVDLHERGALRSLLQTDPAALNTAIALGEEWLGPDSAILKCLRIGVALHHGALPTAYRKEIERLLRDSVLKVTISSPTLAQGLNLSATAVVMHSLHRNGERIEISEFKNVIGRAGRAYVDVEGIVLFPMFDEIARKRRNWEALITDLGAREMESGLVRLVAALLMRMHAHTGGDLNQLVEYVVNNAVAWTFPELANEAPEDRERALADWERHIATLDTAILSLIGDNNIPEEGVEAALDDVLQFSLWYRRLLRQDEHTQHALKAGLLSRGRLIWSQSTAARRRGYFLAGVGLATGHALDAIAEDANSLLIQANGGILQGDAEAAIAAVTALAERVFTFYPFTPDPMPATWRDILRAWLLGEPLAAIAAGQESDTLQFIEGGLVYRLPWAMEAIRVRAIANGDTVDELSLDEYELRLAVAAVETGTLNRSATILIQAGFNSRLGAIKAVTDAGAIFQTAQELRHWLNSEAHAGLLARADWPTPETREMWMEFTRSFVPQENSIWADRRYWAGVEWLGVPPPPHTPVQLHQRNGQISVLAADGTPMGTLLNALNPKRAGLLIAEVAQDISRLDLIYLGPDDFVDIPSA

SEQ ID NO: 54582 - protein, 258 aa, Enterobacter hormaechei subsp. oharae; identical to SEQ ID NO: 52984

SEQ ID NO: 54583 - protein, 1166 aa, Enterobacter hormaechei subsp. oharae; identical to SEQ ID NO: 53011

SEQ ID NO: 54584 - protein, 259 aa, Enterobacter hormaechei subsp. oharae; identical to SEQ ID NO: 52946

SEQ ID NO: 54585 - protein, 1177 aa, Enterobacter hormaechei subsp. oharae; identical to SEQ ID NO: 52947

SEQ ID NO: 54586 - protein, 259 aa, Enterobacter hormaechei subsp. oharae; identical to SEQ ID NO: 52946

SEQ ID NO: 54587 - protein, 1177 aa, Enterobacter hormaechei subsp. oharae; identical to SEQ ID NO: 52947

SEQ ID NO: 54588 - protein, 259 aa, Enterobacter hormaechei subsp. oharae; identical to SEQ ID NO: 52946

SEQ ID NO: 54589 - protein, 1177 aa, Enterobacter hormaechei subsp. oharae
MPTTPDAIIAAITDAATVGFRGRLIARGQARAMIWRDGVLPPGAPDFSAQLSFDLHSYAYGLLGLGLRLLESDGDPNQARIAFEQAATALESVMANGNREEADRDFHFLLAAASYHLAHLSARAYSLLAIVADEANFSPIEHALTLLIRRDINSLRTRVYTFRLDGRGSDATITTFLQQHLTESIVADAAERDGKDFLFEGLNLALTDVFFGAFSMFLLALDRGEYTLLEKAIAQLRENLDIGGELNLIPQWWVHRIAIHLLKDFWSNTFHEKVPLLPAGGVAPSWPVLRELFIGLLARRPRAEVDLWPSQIEAASRAVNQTDNLVVSLPTSAGKTRIAELSILRCLAGGRRAIVVTPLRALSAQTEATLQRTFGPLGKTISALYGSIGVSGFDEDAIRGRDIVVATPEKLDFALRNDPSLLDDVGLLVFDEGHMIGSGEREVRYEVQIQRLLRRKDADQRRIVCLSAILPDGDQMEDFSAWLRRDQPGGPIKNDWRPTRLRFGEVTWNSPTARLNLRVGEERPFVPRFLTGAAPPLFVPPKKRRNRLFPDNQQELSLATAWRLVRDGQTVLIYCPERRSVEPFAKVIVDLHSRGALESLLTVELTTLQIAIALGEEWLGTDSYILKCLRLGVALHHGALPTAYRKEIERLLREGILKVTISSPTLAQGLNLSATAVVMHSLYRHGEMIKVSEFKNVIGRAGRAYIDVEGLVLYPIFEDVNNRKHNKWVNLIEDHGAREMESGLIQLIFSLLSRMHSHIGGDLDHLIDYVVNNAAAWVFPEVAGEKVDEREQALKEWDRHMATLDTAILSLIGEADVPDDQIETALDSILQSSLWQRRLLRVNDESRAAYRTALFTRSRYIWANSTAVTRRGYFLAGLGLEAGRALDAIAPEANNLLMQANAALVVSDHEAAITAITDIAERVFTFYPFEPDTLPANWREILRGWLLGHPLAMMIAGEEVDALQFIEGGLGYRLPWAMEALRVRAAANGDTVGMPALALEDYELGLAVPAVETGTMNRSASILIQAGFNSRQAAIKAVTDTAANFTNGAELRDWLRSPGLAVYSAQPNWPTAEARTIWLEFIQEFAPSDNLSWARRDYLGNVNWFDVPAPSGTPVGLFHWNGQPLVLAPDGHAIGLLQHPLNLNRRGLVRATVAMNNGQINLSYLGPDDLWVVAKPH

SEQ ID NO: 54590 - protein, 259 aa, Enterobacter hormaechei subsp. oharae; identical to SEQ ID NO: 52946

SEQ ID NO: 54591 - protein, 1177 aa, Enterobacter hormaechei subsp. oharae; identical to SEQ ID NO: 52947

SEQ ID NO: 54592 - protein, 231 aa, Corynebacterium casei LMG S-19264
MVAPSATIGSGVDWAASQIPNQYTDPDRVATILAKLGKPKAAKYLKGKLPTSKRTRSGDLGEIIGAQYATLELGFRVVERLRWKDHREMSMRGDDLIGVRASTNGTLELLKGEAKSRARLGTATVTDADDALKRDRGRPSPHALSFVADRLHELGEHTLAELIDDAQLISGISQRQVVQLLFTFTGNDPRALLRANTTAYRGRVKRLAVGLQVSKHQAFIAKVYSKAIADA

SEQ ID NO: 54593 - protein, 1166 aa, Corynebacterium casei LMG S-19264
MPETVDEIEAAIGQATAPGFREQLLARGEARSMIWRDGVLPEDAPEFDQLLSYDLLSYGYSLLSLGLRLVEANGSRSLAQRAFEGAATAIESVIARGPNSRERGFHRVVAAAAYHLGGYSARAYSLLQTALDSGEVTIGERSLIHIIRRELDTLAALILSHRYEDAAADANLVETLRGLLEPTSDEDQADDSGDTDVVDVVDLALTDAFVGAISMALLAFERGEQALLDEALSTLQVGLGAAGELNMVPQWWCHRLAIHLLRGLWEASFHRLLPDAPTDGGGGDWAQLRATFIASLFRRRRSEIDLWPSQLAAAERVLNTSENLVLSLPTSAGKTRIAELCILACLAEGRRVVFVTPLRALSAQTETALQRTFTPLGKTVSSLYGAIGASSADEDLLRERDIVVATPEKLDFALRNDPTLLDSVGLVVLDEGHMIGADEREVRYEVQIQRLLRRGDAATRRIICLSAILPDGDEVEDFVNWLTDDQPDGLIASSWRPTKLRYGEVIWQGDRARLSIIVGDEEPFVPRFLEPLVPPIGRRKTPFPKNQQELTLATAWRLVDDGQTVLIFCPLKLSVNAFARVIVDLHTREALRSVFEGDPGDLASAITIGEEWFGRDHPILACLRLGVAIHHGSLPAPYRREVERLLQRGALKVTVSSPTLAQGLNLSASALVMHSLWRNRELIKASEFRNIVGRAGRAFVDSVGLVVHPIFKDVSRGRRNWGQLVKDTALRDMESGLLQLVANLFARMQAKHGLRDLDSLLEYVAGAAAWDYPEVAAESEEEAERSRFAWRSQLASLDNALLSLLNDSAIAEDGIEGALDDVLASSLWTRSLARRQEPVQTALRAGLTARARFLWSQSTPAQRRGYFLAGVGLETGRQLDEHASILEQHLRDADEGIRISDPGAAIDALTSFAGIAFDIYPFAPRTLPPQWEGILAAWLRGEDATQIAGEEVTDTLEFIEDSLAYRLPWALEAVRVRATAHEEPVNGLWAFLADEHGLAVASLETGTLNRSAALLMQAGFSSRAGALAAIAAGRGTFTTVSELHQWLNSEEVRQHANDPHWPTVSSHDLWVDFISRGAAAPERTWINTVEDAAVTWLPDHQPSSGTPYRAVSLANGETILQAADGRRAGSLEEPLNPKRRGLLIVTGTNAANSVELRYRGPSDLHA

SEQ ID NO: 54594 - protein, 260 aa, Brevundimonas nasdae
MGFYEKWCEATKEKDKRKHYWTYVEKGGGRDEISADLAKTIRSHYDRLERIAEDVERLGYKIAAKILSEAMPHTDKGRSGDLGEILATELVEEEIGLRVPVRRLRYKDGRNMAMRGDDFIGAGYGGQDEKLWLLKGEAKSNKKLGKSTVTSARKVLDRDNGRCTPDSLLFVANRLLESNDPDENALGRDLRDEVGLKSLRADRIDHMLFTVSGNGPHASLKEDLEAAGTNRDHYVVNIHVEDHQDFIAAMYEGAQDLGDA

SEQ ID NO: 54595 - protein, 1174 aa, Brevundimonas nasdae
METPDELTAFLATATVDGILGRLLYRGAAWSLMREAGVLPQTAPPLGATIETDLAEHGFALLRGAMALRAQTGASDLTNKAFERAANAFEALVRNGDPEAPDRGFRRTIAAAAYHLAGFSAVAYSLFKETDEDLNASPGETAIRHLILRDLDQLRAFVRDWLSDEAHGDEQMGEALGGDEPDIDDVLSTILNTTICRALAYFDFALETGEEEPIDAARDLLATAVSLAGNAGNVPLWWISNLCRHLIDDLWQHSLHGNLPTEPPAGTEEKYPDLRRLFIGSLYARKTSEVELWPSQREAARRSTDVTDDLVVALPTSAGKTRVAEIAALMTLSSARRVLIVTPLRALSAQTERSFRKTFAPLGFSVSSLYGASGLSAGDEDALRTREIIIATPEKLDFALRSDSSLIDDVGLIVLDEGHMIGPSEREIRYETLVQRLLRRADAADRRIVCLSAILPSGDELDDLTAWIRSDEPGEPVRSDWRPTRQRFGALTWRGKDALLRLDLDDGGPFLDKFVEEKPARGREKNPYPRKNSHLALFAAWEFAGQGKRTLIFSTQANWVESYGKQVVDLCKRGYLDSLLEDEGSVARALEVGKEWLGENHPAVASLKAGVAIHHGRLPSPFLRELEVLLSEGVLKVIVASPTLSQGLNLNAAVLLVPALYRAGEKIKGEEFANVAGRAGRAFVDVEGLIVHVMFDKTDWRKKEWRKLVASAKARTLKSGLIQIVAEILERLSREGVLDRDDAWEYLANSREAWRSPDEEAEVAERLAAAVEYDAGGDENDDEDESEDDQEETIDEEPLSQIVERLDATVFGLIEALDADRADLPKLLDEALKGSLWARQIAREEEDVAPLHKRVFEARADLIWKTTSEQARRGHFAMGVGLEAGLSIDTMADELAQLLDRADDAALSGDVDELADALGGLGERLLFMRPFIPDKKNALPANWKVILRAWISGDAVEKIGPQNMRAVEEAFTYRLVWALEAVRTRRMSLGWSPETVAGGAAAAVETGVPQFMMAMLIRAGLPSRRAAIAAIQDAEPIFVTPAEMRAWLESDEITAYTDAGDWPTPDTAALWARFRTEALSGGIHKWSVERYKRLLDIAAAPPAGLYRIVTDEGDGRTWLETPDYRRVAPFKKPAVDPKPSLFSGRLPGNTRLVEALRVGRGKLRWPPADARGEN

SEQ ID NO: 54596 - protein, 252 aa, Acinetobacter tjernbergiae DSM 14971 = CIP 107465
MIESLCTLAEIQLDQHNFKVLELKDENFDALKNILVSEFPETYLSKSSFERTMSLLGQQAAYSKLKSKFPKGKKLRSGDVGEVISRTYIEKHLDYVVPIKKLQWRDHREMAMRGDDVIAIKIDGDDINFIKCEAKSVQSLNKKTLLEARKELDQHDGKPSPHSLDFIIERLYEIKNDELAEKLETHKYHKRIRKQDFSHLLFVFTKSNPNSLQKDAFEAYKGDFCQISVGLKTAKHQELVTSVFEELNSQYE

SEQ ID NO: 54597 - protein, 1135 aa, Acinetobacter tjernbergiae DSM 14971 = CIP 107465
MNKELIEELIKNHLKPEFRGRLIDRGLSRSMIWDNGILPENSSDFSDELTYDLLSYGYSLLSLAIKSIDNDVNETLKNQAFEKAATALMTVIYNGSTNYSKYSFHTLMCAGAYHLAHFSAKSYSLLNRVEEHLSNNILEKSLSLLLTRDFDRLLDIIPVWKFDLKNDLDSLVNKDIHNELDETSVHLTYLNSVLVNRYLEVIYEYLDLLKVGNSSRLESINKILNENISISLKYNFIEDWWIYRITLYLLNDLWDRTYHNILPIEKNNPEWNGYRTKFIEHLMNKDNAEIDLWPSQIEGANRAIYDLENLVISLPTSAGKTRIAELCILRALSKKKKVIFITPLRALSIQTEITLMNTFTYLGNTVSSLYGGMSLYGYQREQFSDSDILIGTPEKLDFLIKHDPELLNDVGLIIMDEGHMIGPAEREVKFEVLIQCLLNREDSDSRRIVCLSAILPSGQELDNFVSWISYDRQGQAITSSWRPTDLRFGIIYPNNSDTGFRLDYVIGAQKPFIPNFIPKIVNNRSKYPNSQQELCLSIAEKFVHDGQNVLIYCPMQKSVNALAKKLVQMTRSRKLDFKNLNIDSEYFHNAVRVADELFGSNHYIVECLKLGIVVHHGKLPKEYRTALELLIKNCKVGLIISSPTLAQGLNLQVNVVLFQSIYRMRDTIPQTEFKNVIGRAGRSFVDLQGIVLYANYDNSSYKAQTWEKLTKGEEQLPLVSGLKDIVLNLLITLIKSQTEKDIEKIYEHIVNSSFKFDFSLDNSKNQLSEKELEKWSERLNLLDYSIINLVGDKDFDILELAEQIDIALQHSLFYKQIQEYSTDEQLMFKKFVQKRAEYLWNKTTESTRKQLYLSGVSFDTIENHDPIIEEIFEIIKNIESILTGSNIDKDKIILNINELADKLFSINEFSPNDLPEKHADILTNWLSGKKYLMNDDIDKIVGFIENDVSYKLVWALEFLKSRHNICAKTEIEVETFDYISQALEYGLIDKCAMTLMQLGIGSRLQVQELTDYLDFIDPKHVIKWLSELNLDDIQNQFSTGLINSLRKLRTKINPFDKKKIITTLTEEPVIWLIDDPESYMFSNLKLININLETFILSNKAEAIGKLKEFIELSSMKILHIYIEDSTVDIKYEYFE

SEQ ID NO: 54598 - protein, 264 aa, Clostridium bolteae 90B3
MEYINGYREEQSLLTKDGKEIQVRCLEVSENDAVLDEWAAHFREQYRYLDALDMEREGTGISREEFLRDYVFPGQAKPGPATRVGDFCEILVADYIEYIQSYYVPRIRYRSKFNRNTSPQGSDVLGFKLGTTPSPRDEAIIFEVKGTSDPKGKKKGYERLQEAIDHSNKDVARYAESLNAAKMRLIELNRPEEASIVARFQNMTDRPYVIKYGASAVLTNQKYNAIDMNKVTTVGHKATVELLVIHTQDLKGLINELYRRAALC

SEQ ID NO: 54599 - protein, 1048 aa, Clostridium bolteae 90B3
MLIENRSQYLLKKVRAKAKMYEYHIPSELHGKTESDANYLLILAIATIGDFSKDVIESYQTKEIDYTEHKKNLQFASVFFDAYLEAKMYEGDQKYYLLLGAVVYYLCDYNGSSKVLADKISDDINLDANGIDFVLSQILQGKLCIECFSEMLYLNEVVNAYNEFWSTGIVFDYKKLWQLKKFIYKYGTDRELLFTDALIATIFLKIEHSSYRLMPIYTQIDPEIWGDILRKKTLISELWQSQRQLGEAGVFAGKSATIQMPTSSGKTKSVALIILSAFLRKNSSYALVVAPFRSLCREITDELQRAFSYTSKIHVNEISDVMQMDMLDIILGNVPETEEKYVYIVTPEKLLFVLRQEIMFLSNIDLIIFDEGHLFDDNNRGITYELLISTIKSYMKDKVQKILISAVIPNAEQVNGWLTDERGVVIKNNIIQTTEKVVAMADMKKNTTSGERYAYLYFVNPAEPDEEDFFVPRVIKQTMLYLRPRERKVRVFPEVNDNKYKNDVAIAFGIKLCHNGSIAIFCGKKDTAEKILSRILEIKERGINVSNLLESADKTEIDKLCCLIDKGLGNDNDYYKAAKVGAFVHHGGMPMGIRCAVEYAMQTGKISFLACTSTLAQGVNLPIRYLIVSNIYQGKDRIRVRDFQNLIGRAGRAGIYTEGTIILSETNVYNTRNNPYYNWRWNNYKRLLDSDQAEACTSTLFAWLRADEGMEVYLEKMIEIFMESYANGDFNEKMEQYLKEQQFEEENHKKAEFMMYQMKQNIEAIESFLLFYLMEDTYEESREDIHNIMKETLAFYLAGNKERIRLLRIVDLIGEFLVHAVDTVDKRSRYSKSLLGVRKEIEIEQWVSSNYSIILEAENEKSIMQVVFPLLLRTENQIVRNCINSELLNGLAEEWIAGKTYSDLTEYVTEHRIMVYKRKHPKIMSLQDVITFCDNFLGYDCTLILAAIIENVMYLGDDNRINNILKMLSKRMRYGLAGQTSILLYEMGFNDRGIAMKVGNMLEEVYQPGNRKELIRLIRKNKGLNEKIRLELEKYPSYFCDKWEELHR

SEQ ID NO: 54600 - protein, 264 aa, Clostridium bolteae 90A9; identical to SEQ ID NO: 54598

SEQ ID NO: 54601 - protein, 1048 aa, Clostridium bolteae 90A9; identical to SEQ ID NO: 54599

SEQ ID NO: 54602 - protein, 278 aa, Lactobacillus spicheri DSM 15429
MNSYAHFDPIQNIEENNIEIILVQAPFDNIKVIADWARSFRHKYISDEDLLEGMEDIGENEPIDFLKEMVYPENKKFQSGDFGEILVAEYLMYTENFWVPTLFLRYSEKSNKEESTKGSDIVAIRFYQDSDHESDQDLLCIGEIKTGSTRTVRERLQAAINDSDKDSIDLLSAKRGSVGLNAVKLKIKHRERQENQDGYSYREIARFENPIERPYQIQYVAAAVVDQKQLNQNTVKKVVTKESQHVDSLRMIAFGVSEIQKLINALYSELGVSNLDNE

SEQ ID NO: 54603 - protein, 966 aa, Lactobacillus spicheri DSM 15429
MWNKLLYYALSSVTDYLCEDNLAVNQHFRSQLEFAGKFFETLPQINLDVNKLFGDEELILFSATAYVFAGYPGASAVVLKGLTGDKLSSTERVLAEVIRYGDVNFPWENSKIGLTTSLVFSGREDISILYKQVDSLLEDAYRRDHDIDIIAAECVQKIIRQCWENATINLMPSFSDTDPQKWVLPLTARKVHPVLWSAQRELGKHNVFRGNSAVVQLPTGSGKTASFSLILRASLYRDSFHIAVIVAPFKSIRDEIYLDLKLQFHDEEVDINRISTELKFDFSDFSLIERPAILIVTPEKLLFMIRYDPNFLSETGLFIFDEAHQLDNSDRGITFELLLSTINFFVTDEIQKIFVSAVIGNPNEVSEWFNSGNNNVVNKLTPRKLEKVLGYSYWNDKTMHGELYIWNKLQEAKALVKFPYFFDPVKIKENKIQPDFTIKNRTKGIRWATALTTRQFMKGGMVAVYVPRKDTIKGLAQVFMELQEKSPILIDGNESVVALCKLFELNFGEDSVLVRAYRNGIFVHDGDIPDGIRGSLEFEARNGNIPLLLCTNTLAQGVNLPIKTIIITSIGNGEMELNNRDTINLIGRVGRTGVINEGNIIFMQNISSFSDERVKHALNSLAIDAPAEPLGSSLAALFMPTAINSYSRSEDIRASEWCVPEFLDNPMEWISNRVKGDSPSKAKAYRRLFLKKANGIWQIENYLMSIWNVIQEGVQEENIENVVKKMFASTCIRDDEFDLMLWTFKYLGERISRLVVDRHDVLTMSKMMVGINEALTIKSFVDSNDEVIITSDDMEQIITDIWPILRTSVSIKNQSEDSLYRFLLNKWIKGSSYIEILESWKLEYPDIRLSNRKPTVEKVYIICSQAFQFDMQLKLTALMEVITDPVKYARLEKLQVAMKLGLPKKTEQVMYGAGISDRVLARLFCEEMGVDTADYKEVLHWLRMNKGKIIEKFGNIIPEYFRSRIW

SEQ ID NO: 54604 - protein, 253 aa, Polaromonas naphthalenivorans CJ2
MTRFVEWCAHTDIPVAHHKLQILTADPAKLAAAVDIVAEVVPDHYVMPGRLAQLLTRLGRKEVAVYVAEKLPTTKQIKSGDLGEILCTTFIHESTPFKLGIKRLRWKDHRNMSMRGDDVLAFHIGAGAAGLQVLKAEAKSGGKMQAGTVSTARDALSAYGELPSPHAMSFVADRLEAAVDKPLRDMLDDAQLKRNLKPAHVTHMLFTFSGNDTTAMLSKNLASYVGGSAQHYVGIRVEDHQAFIKSVFAAAEV

SEQ ID NO: 54605 - protein, 1166 aa, Polaromonas naphthalenivorans CJ2
MATTLEELQANIEAAVTPGYRQKLLARGQARGMIWRAGLLPIDAPHFSPELSEDLLSFGYSLLLHGLRYVDLGGNFSLARVAFEVAAESIEAVVARGEVNENRDFHRLIAGAAYHLGHYSARAYSMLFEGLGQSNLSVVERCLAQLMLRDLEGVNVAVSNWVESGVGSDSNLIEAFDTGIDAEVEDEDAGESGVIEAMTLALEGNFLSAMSQTLLALERGEHSLILQAQARLEEGLSVAGELNLVTQWWAHRLAIHIVGGLWANSFHSLLPSQGPAGADVGDWVHLRKLLIASLMRRRRAEIELWPSQIDAAKRVLEFEANLVLSLPTSAGKTRIAELCILACLARGKRVVFVTPLRALSAQTEVSLRRTFGPLGKTVSSLYGSIGTSSSDVDALKSLDIVVSTPEKLDFALRSDPQLLDDIGLVVLDEGHMIGLGEREVRYEAQIQRLLRRADAASRRIICLSAILPDGDQLIDFTAWLTSDRENGLIKNDWRPTRLRFGEVDWNPVSKLAQLKIVVGDEHPFVSKFVVGKTLNANKNAKVYPASQTDLCILSAWRLIEEGQSVLVFCPLRVSVVPFAKRIIEMIQQGLIVPMLTPPAEVLASALAVGVEWFGPDHEILKCLRMGVAVHHGELPASFRKEVERLLRDGVLKLTVSSPTLAQGLNLAATSLVFHGHARKGAPIDVSEFRNVVGRAGRAYIDIEGLVLYPMFDKHEKRRTAWANLIASTKGREMESGILQLLYSLLVRIARKLDAPDVSTVLDYVAGQGGWDFPFLRSETGWRAANAAEEWPRHLTSLDTAIFSLLGDAQVPDEEIEATLDEVLTSSLFMRRMARRDGLIQNLLIGGLKARVNFIWSNSSALQRRGYFLAGLGLASGQALDSKAKELESLLLQANVAVGEGEVEMAIQAIIGFAHIAFEIPPFAPNGLPGNWKYILELWLRGVPVPHIGSNDPDGTVSLIEGAFVYNLPWAMEAVRVRAEAHLDLFSNDVSVANYGRAHAVAAIETGTLSVAASTLIKAGFASRLGAIHAVTVTAADFDSSAGMRAWLLSAEVKARRDNPSWPTVESHELWVDFTAPHGSGYTKPWLATAYTGPVTWHGLPMPPGTPLRLGGGPGKENAIYTADFKEVGKIGYAFNQAAVGLSIATATGAANEIAFEYIGPNDLVVL

SEQ ID NO: 54606 - protein, 259 aa, Rhodanobacter fulvus Jip2
MAQFDDWCISVDTPMGNHYRRVMTGQVANLGVGIQATAAIVPSHYASEEHVARALARLGKPAAAALIESKLPTTKQIRSGDLGEIYATEWIDAHSGGYRAPIKRLRWKDHRNMAMRGEDVIGILQDPQTQRLQFLKTEAKSRATLSAQVLTEARAGLDKDGGLPSAHALHFISARLLEFGNLPLADAIDDALLKHGVSPQSVQHLLFTFSGNAPDALLAASLRAYPGLINQWGIGLHVEGHGAFIGAVYDRVIADANKP

SEQ ID NO: 54607 - protein, 1173 aa, Rhodanobacter fulvus Jip2
MPTNPEAITADIAEATAAGFRGRLIARGQARAIIWRDGTLPPDAPDFAPQLSYDLHSYAYALFGLGLRCREVGGDPTEARTAFEQAATALEAVMAKGNRQEADRDFHFVMAAAAYHLAHLSARAYSLLAIVEADENFSLVERALALLMRRNFSALRSSVLDYRASGQGSDARIAAAIQARLDQVEGAAATPDGGGDDFLFDGLDTALTDAFMAAMSLYLLALERGERALVDQALERLRASLAICGEMNMLPQWWAHRVAIHLLSDLWSSTFHERVPLQPAGGVAAVWPRLRELFIALLQRRAKAEIDLWPSQTEAAARAVDQSDDLVVSLPTSAGKTRIAELCILRCLAGGKRVVFVTPLRALSAQTETTLQRTFGPLGKTISALYGSIGVSGFDEDAIRERDIVVATPEKLDFALRNDPSLLDDVGLLVFDEGHMIGLNEREVRYEVQIQRLLRRADAQERRIVCLSAILPDGDQLDDFAGWLRRDHPGGLIKSDWRPTRLRFGEVVWMSPTARLNLRVGDERPWVQRFLTGAAPPNWIPPKRRRTRLFPDDQRELCLATAWRLVDDGQTVLVFCPERRSVEPFADVIVDLHERGALRSLLEADPNTLNTAIALGEEWLGPENAILKCLRLGVALHHGALPTSYRKEVERLLRENVLKVTISSPTLAQGLNLSATAVVMHSLHRAGERIEISEFKNVIGRAGRAYVDVEGVVLFPMFEDIAKKRRNWEALITDLGARNMESGLVLLVVELLTRMHARIGGDINQLVDYVVNNAAAWTFPEIGNEEPKDRNRALADWERHVATLDTAILSLIGENGISDEGIEAALDDILQSSLWQRRLERLDAQSQQLLKAGLSSRSRLIWNQSTAAQRRGYFLAGVGLTTGHALDAIASEVNLLLIQANGAILEGDAEAAITSITGLAERVFAFYPFIPDPLPANWQAILRVWLLGQPLAALGGDQPSEVLQFVEGGLIYRLPWAMEAIRVRASANGDEVDADGRGLEDYELGLAVPAVVTGTLNRPASILIQAGFNSRLGAIRAVTDTGAIFATGKELQQWLNADVVAAWSAQADWPTRETRPIWMEFVQSFTPSEKHTWAARHYWAGITWLAAPPPPGTAVQIHQWAGQSWVLSPDGTPLGTVQAALNSHRSGLLRAQVALDVSKIDILYLGPDDLAGA

SEQ ID NO: 54608 - protein, 265 aa, Thalassospira xiamenensis M-5 = DSM 17429
MGRLTKVGQHKKSACGRDIEIWELNLKDKEAILSEWATHFRKHYISDADLPEMVAGTGKTNAEYLRDVLFPDAKVAPGPSLRSGDFGEILVADYIEYLLGYWCPRELRYQERWNRNDSTKGCDVIGFRFVADGQNSPGDELFIFEAKSGMSKSDKNRLQDAVTDSDKDKLREAMSLNAIKQKFLGREEMDKVARVKRFQNMADRPFRRISGAAAILDDDVFAETDLSAVDASNHYNSDNIQLIVIKGPSLMQMVHSLYERAADEA

SEQ ID NO: 54609 - protein, 1044 aa, Thalassospira xiamenensis M-5 = DSM 17429
MRPEANAQNVLSTTRARAKMHEFRVPEGDFNELPRDPAILFGLAIAILGEIASAIADQIGDGFAHGEEVLPTPAGWREDGAEPQVSLRFASTFFDSYINAELDVELTPELSLLCATTYYISGSVGSAAVIVRQMEAPSLEIAGGLAFLLYSILQNQFQPIDVEHNHHEKTNTLLGSLVEFFNLQGDPAVVATATEQLRRYFQTNGSPRELLFADLIGAVCALKLKNAARTILPIASRLDIQLWRSALEKPRFPLELWPAQKRIAEAGVLEGRSVVIQMPTSAGKTRATELIIRSAFLSQRARLAVIVAPYRSLCHDIRGDLVVAFSGENIRLDEASDSYQFDLSLDALFAAESVLVLTPEKLLYMLRRAPELADQIGLMIYDEGHQFDGMARGPTYELLLTSLRMALRPETQIILISAVIGNAGDVAEWLIGDREAVLDGVGLLPTSKSIAFSSWQDQRGRLEYVDPQDPDEREFYVPRVIEETVLQARGKETAERRFPTRTGSDVGLFLGLHVVRNGSVAVFCGRKDSVTTVAKRAVDLAERNLEMEWPIAYSDSEEVESIRALAEYQLGANAPVTRAASLGIFSHSADTPHGLRLSIEHAMKFDRAKFVVCTSTLAQGVNFPLKYLIVTSTRQGGEDMLVRDFHNLMGRAGRAGMHTEGSVIFSAPATYDQRNRWGRGRHNWGEAVRLLDPANSEPSSSAILGLFEPYTERGAQFEVEMQLDWLDLVFADTEKVELVVASAIELEPEINSVNFRKFINRRARVVQNIGAFLTANMTFGEGEDADEKIAELATSTLAYHLADENTKPLLLLLFRVIGESIAANTDAGERSLIRRSPLPPRTITALREWLVENLKVLKEAASEGRLLEQITPTVLAFVSSSKIAAISDQTVIPRVLDEWVSGHSFARILTTLLEVNARVGGRRLKPKVEDVVALCEGGFGYDAAMIVASIADLAEDMDETLHNAASLLQRQIKTGLTDAAALAFHEAGFADRHVATFLGQVWPHAVDRGAVHAICQNEEIVRYVLPLFPSYFTAVAAEVGGWEP

SEQ ID NO: 54610 - protein, 239 aa, Rhodococcus sp. ADH
MNGHTSGVLVSKNDDDGISAVAATLAEKYTNTNTLAAIAQSLGKPGVARFLQNLFPGDAGSRSGDMGEILATSYLEEDLNYTVGPSRLEHRDHPTWAMRGDDVLGARIDPTSGLQLAKGEAKSRTRIYEKTVEEARKGLLRESGLPSQHSLTQFATRLIADGNRTLGLAVMDHQLTSGIRPDMVLHLMFLFTQNDPTKHVTTDLTGYSGPIRQLALILRVTAHQRFITAAYEQAPSYAP

SEQ ID NO: 54611 - protein, 1186 aa, Rhodococcus sp. ADH
MLRETEELVTSLQAALASQENMLAQGQAQASIRREGALPADSPRFEPFLDNDLLNYSYALISTSIDLLDAPSTEIEEPTRTEQLGLARRGFIQASYALEAATRNAAPSEDLSFHRLIAGAASHLGDFAARAYSLVDASIQSGRMTPMEATLADLILRNPRRIEERTRLLKTSASFSDDALLQALRGNLPDTDTHTADPTQPAGAEIENAVSEVGPIVALLSEHYMSAVSSALFAIAYGQGPLLQAAIADLASGEQAASDINAPGPWWIYRLTRRLIGDLRETSIRRNIPISRPPAATADTKARQRDWKQLRKTFVASLFVRKRSEIDLWPSQLHVVEQIFSGTQDLVISLPTSAGKTRIAELSILACLAQGRRAVYITPLRALSAQTERIFERTFIPLGVRVSSLYGSMGTNDIDEDALRMSDIVVATPEKLDFALRSDPSVLDDVGVVILDEGHMIGPSEREIRYEAQVQRLLRRDDADNRRIVCLSAVFPSGEDLDDFVAWMTDDDPTGLHREKWRPTEQKFGLVQWNQNHARLTMTIGSGGLTAFIPRYVEAKAPTGRRRNAFPSNNRELVIATAWRLVEEGQSVLVFCPQRNGVGPYADHILKLHQQGFIHAVLPDGVDLADARAVGAEWFGADHPILKCLELGVAIHHAALPGPFRQKVERLLHDGVIKVTIASPTLAQGLNLSASVVLFHGLHREGKLLSGSDFSNVIGRAGRAFVDTEGLVLYPMFVRRPSHLRQWRQLTNGQAGKTLRSGMISAGEALIKRVLHAFGSAQVQPFIDYVTGGSNWSLPVRQDETTAQRQEAQQSWTDNLALLDTSILSIVGEDESDPDQVTQLLIDMLRDSLWERQLQRLTPEMAAAQRAAVTNRTLFIWNNSTPSQRRGWYLAGLGAATGFDLGLIAADVIDKILLSEDAIAQRNSASAIALLTDIASLLFTVEIFKPETSLELEPVLAHWLSGRPLGELADDRDSVVLFVQADLVYRLVWGMEAARVYETAQANPIAEMLTGTATAAIETGTLNQQAAILIRSGFDHRSAAIKAVEAIESTFDSSTTMRQWIRDLPSALVSSPDWPTTETHSAWLQFAKTRSDSNNIPWEFHIELVEDVQWDEERPHPEAWLRVTDLGPGVVELWSTGFTYLGEARVEINPDRMGVLYARRNANDSSIKLYYRGPHDLLLSMLDQNQ

SEQ ID NO: 54612 - protein, 259 aa, Pseudomonas psychrotolerans
MAQFNNWCDSLDQPVGGHFRRVMTGQPANLHTGVEVTAAIVPGHYASEEHVARALARLGKPAAAALIQGKLPTTKTIRSGDLGEIFATEWIDACSGGYRAPIKRLRWKDHRNMAMRGDDVIGIRQDARTQQLHFLKTEAKSRAKLTAQVFTEARAGLDKDGGLPSAHALTFISERLLELNELPLADAIDDALLKHGIPAQNVQHLLFTFSGNAPEALLTASLQTYAGTIIQWGIGLHVDDHAAFIAAVYDRVIDNVNNA

SEQ ID NO: 54613 - protein, 1172 aa, Pseudomonas psychrotolerans
MSTTPEAIAADIVDAATAGFRGRLIARGQARAIIWRDGELPPDAPAFAPQLSYDLHSYGYALLGLGLRLREIGGDPAQARIAFEQAGTALEAVITKGNRQEVDRDFHFIMAAASYHLAHLSARAYSLLAIVEADENFSLTERVLAFLMRRNLNAFRSGVLDYRASEQGGDARIAAEIKENLDQGEAAEDFDNGGNDFLYNGLDTALTDAFMAAMSMFLLALEHGERALLNQALERLRISHSICSELNMLPQWWGHRVAIHLLTDFWSNTFHEKVPLQPTGGEAADWPQLRELFIALLQRRPKAEVDLWPSQIEAAARAVDQTDDLVVSLPTSAGKTRIAELCILRCLASGKRVAFITPLRALSAQTEATLQRTFGPLGKTISALYGSIGVSGFDEDAIRERDIVVATPEKLDFALRNDPSLLDDVGLLVFDEGHMIGSNEREVRYEVQIQRLLRRPDAHGRRIVCLSAILPDGDQLNDFAGWLRRDHPGGLIKHDWRPTRLRFGEVTWSSATSTARLDLRIGDERPWVQRFLTGAVPPNWVPPKRRRTKLFPCDQRELCIATAWRLVEDGQTVLIFCPERRSVEPYADVIVDLHERGALRSLLEADPVVLSVAIALGEEWLGPDSTILKCLRIGVALHHGALPTAYRKEVERLLRDNILKVTVSSPTLAQGLNLSATAVVMHSLHRAGERIEISEFKNVIGRAGRAYVDVEGIVLFPIFDSIAKKRRNWVELISDLGARDMESGLVQLVGALLSRMHAHIGGDLNQLTEYVVNNAVAWTFPEVTNEKPADREIALANWERHVATLDTAILSLIGENDIPDDDIEVALDNILQSSLWHRRLLRQNEPVQYALKAALLSRTRLIWNQSTAEQRRGYFLAGVGLATGHALDAIAADANLLLVRANGAILLDELEEAIAAITGIAERVFAFYPFTPDPIPMNWRDILRAWLLGQPVADIVTGQASETLQFIEGGLVYRLPWAMEAIRVRAVANGDAIGDVLLDDFDLGLAASAVETGTLSRSASILIQAGFNSRLAAIKVVSDTGAAFRTGQELRLWLNSADVTVWGAQNDWPTVETREMWMEFVQSFTPLENRTWTERRCQASVQWLGEPPHPGTPIHIHDWLGQPRVLAADGAPLGTVQARLNIARTGLVRAQVAWDVSKIDVVYLGPDDLAGA

SEQ ID NO: 54614 - protein, 259 aa, Pseudomonas psychrotolerans; identical to SEQ ID NO: 54612

SEQ ID NO: 54615 - protein, 1172 aa, Pseudomonas psychrotolerans
MSTTPEAIAADIVDAATAGFRGRLIARGQARAIIWRDGELPPDAPAFAPQLSYDLHSYGYVLLGLGLRLREIGGDPAQARIAFEQAGTALEAVITKGNRQEVDRDFHFIMAAASYHLAHLSARAYSLLAIVEADENFSLTERVLAFLMRRNLNAFRSGVLDYRASEQGGDARIAAEIKENLDQGEAAEDFDNGGNDFLYNGLDTALTDAFMAAMSMFLLALEHGERALLNQALERLRISHSICSELNMLPQWWGHRVAIHLLTDFWSNTFHEKVPLQPTGGEAADWPQLRELFIALLQRRPKAEVDLWPSQIEAAARAVDQTDDLVVSLPTSAGKTRIAELCILRCLASGKRVAFITPLRALSAQTEATLQRTFGPLGKTISALYGSIGVSGFDEDAIRERDIVVATPEKLDFALRNDPSLLDDVGLLVFDEGHMIGSNEREVRYEVQIQRLLRRPDAHGRRIVCLSAILPDGDQLNDFAGWLRRDHPGGLIKHDWRPTRLRFGEVTWSSATSTARLDLRIGDERPWVQRFLTGAVPPNWVPPKRRRTKLFPCDQRELCIATAWRLVEDGQTVLIFCPERRSVEPYADVIVDLHERGALRSLLEADPVVLSVAIALGEEWLGPDSTILKCLRIGVALHHGALPTAYRKEVERLLRDNILKVTVSSPTLAQGLNLSATAVVMHSLHRAGERIEISEFKNVIGRAGRAYVDVEGIVLFPIFDSIAKKRRNWVELISDLGARDMESGLVQLVGALLSRMHAHIGGDLNQLTEYVVNNAVAWTFPEVTNEKPADREIALANWERHVATLDTAILSLIGENDIPDDDIEVALDNILQSSLWHRRLLRQNEPVQYALKAALLSRTRLIWNQSTAEQRRGYFLAGVGLATGHALDAIAADANLLLVRANGAILLDELEEAIAAITGIAERVFAFYPFTPDPIPMNWRDILRAWLLGQPVADIVTGQASETLQFIEGGLVYRLPWAMEAIRVRAVANGDAIGDVLLDDFDLGLAASAVETGTLSRSASILIQAGFNSRLAAIKVVSDTGAAFRTGQELRLWLNSADVTVWGAQNDWPTVETREMWMEFVQSFTPLENRTWTERRCQASVQWLGEPPHPGTPIHIHDWLGQPRVLAADGAPLGTVQARLNIARTGLVRAQVAWDVSKIDVVYLGPDDLAGA

SEQ ID NO: 54616 - protein, 271 aa, Vibrio crassostreae
MPWTKEHIQWLYHTGEVISISTGEKVPVFDFAYDVDDEEVMSLWARHFRNHYCADDAIEVLKPQEMTNKDYLLNLKFPHKTKSPGPSIRAGDFAEILVADYLVFLRDYYVPRTRYDRKIIGNESSKGSDVLGFKQMNQAPSSKDELLIYEVKARLSEKSAKNTLQAAIDDSSKDEARLAESLNGAKQRLYDQRNFAEMSVISRFQQNVDHPYKTKFGAAAVLTDSSCCVETLAEASTKEHSFPTHLEMIVISGPCLMSLVHELYERAANEA

SEQ ID NO: 54617 - protein, 1035 aa, Vibrio crassostreae
MKLEQSSKKMLAIAKSKAKMYEFAIDEASHIELPVDPRKLLVTTIGILGDLSAIEARGDLQFGETGEHEELKSELISVGQYFDALIQSHLADEMTTYLKIIGSAAYYLANMPGSSIVLTKSLVYKTELLTDTNLEGILIWILKSNFNENWYRVEKTYLTQAIDGVGYATQRFFGLNLDTQSFKQAIQVLRNEVYEKGSDRELLFADIISSILLRKIENSSIVCLPKYTQIPLEQWVNVITKPTFVQEFWPAQRLLGEQGVLSGVSAVVQMPTSAGKTKSTELIIRSSFLSGRSDVAVIVAPFRALCREITATFERAFEGEDVNINELQDVLNISDSDDELIRFLTGETDQDGIATKSIVVTTPEKLVYLLRHDPALADSIGLLIFDEGHQFDTGKRGVTYELLMAYLKSRVGDDVQKVLISAVMANANSIGEWLNGEAGIEIQGAGCLPTVRSTAFASWQTAMGQLQYIDQDREADRDFFVPRVIEQINLGKRGRERNARLFPAKNDNPSVAAYLGVKLCHQGPVAIFCGVKSTVTSICELLVDYYERGLALPPPSISSDQSELDKIAYLSSLHFGDESIFTRSVSLGILPHSSNIPNGIRVSVEWAMESNKSALVVCTSTLAQGVNLPIRYLVVSSTFQAGQEISTRDFHNLIGRAGRAGYHTEGSVIFADTDVFDKRNNFHERWRWQRAMHLLDFTNTEDCASSLLDLISPFDFTELNVDAIQFIANPAGYRQSCIDVGNQNAIDISSLLDQMGYKEALIEAIESYFLSYLKDNPNAPQTFFDDLAQGTLAYFLSDYDQKQKLRAAFSFIASRVLSVPEDKRQFFGKSLLGLKNLFLIENWLDENWGEVAQAQSSNELLVICWPLLFQLNNNKMLLKIKPENVILDFTKLWISGSSYTDLRSYLDQSGAYYQAGSQRRNIKMDHVVDLADGALSFDSMLYVGAIADVAEGKGLDGDLLELLRSLQTRLKLGLSNSLEIWLYSQGYVDREVCKTLGSVLNGQGVNSDVFDYDILKTYHQVVSECISKFPSYFSG

SEQ ID NO: 54618 - protein, 271 aa, Vibrio crassostreae; identical to SEQ ID NO: 54616

SEQ ID NO: 54619 - protein, 1035 aa, Vibrio crassostreae; identical to SEQ ID NO: 54617

SEQ ID NO: 54620 - protein, 265 aa, Streptococcus pseudopneumoniae
MEATHRYMNYLISENPIYTNEGKKIEVFHLDIQDDPEIFEEWAKQFRRNYCSDDMLLHMTLVTGLSASEYLSGNKLPSKPSTKSGDFGEILVSDYLQYFKNYFVPRTRFNSRINKDMPTPGSDALGYSFDPHNPDKDEVIVIEVKSSASEKCDEKAQKKLQEAIDNSQKDFIRFSTSIVASYEKLYSLNPGEAEILTRFLNFSDNPFKVTYGAIAVHSNDSYDLETIKQVITEKHRDSEKIQMIVIHSEKLMDFINKLYLKASEV

SEQ ID NO: 54621 - protein, 1027 aa, Streptococcus pseudopneumoniae
MIEFGKRSLYYSKLIRSKAKMIEFDIPLENHISISEDSHKSFLVALAIVADSARKYFEDYINHNHFDPHLKNQLHHAAEFFDALILSELGNADEYRDYIAMLGATAYYLGDYNGSSSVMLSYISDATRFPEDSSNLIKVLIDILTNRVFENYELITDIYSAELNTLVERYRNYILEGRDIATEVFRNLQDKVYINGSDFSVIIVNCLLAVVCKKINCSSTKLLPEFSELDFSVWQDYIQSEGSMKELWPSQIELGKQGIFIGRSGIIQMPTSSGKTASINLILRSAFYSNRIDNVLIVAPFRALCREIYRDINAHFINNEDVIISEIFDLPEIPQDFSIFNDSIKRVFVLTPEKLLFLLRNNQSFIDRIGLCIFDEAHLFDDPNRGSNFELLMSTVKQTLQKEVQKILISAVIPNSEAINKWFNEDGVVVSNNSIKTTEKRIAFSDLNGSNEQLYFIDPITFEEEFFVPRTVNVSKLELLGKERKPKVFPELKNANDISIYYGIKLIKNGGVAIFCGRKDTVNIVLRRFIDLNNRKYDLSDFLENSDRFEVEKIGNLIGKNIGYDSVEYTCSQLGIFSHHSGIPMGLRIAIEYAFSKSKINNVVCTSTLAQGVNLPIKYLIVSSMYQAGDAIKVRDFQNLIGRAGRAGKYTEGTIILTESGIYKTEQKSWKKKQYKKLLNPINSEGCKSNILNIIKFDSVDSTDYRYGSMKFDFWNLILERFINNVEYLERVNSVSSNLRAQASPYLQDFNYKINQIESTLIAIENYLASIFTDEMEIDGLAENTFGYFLGDENERERIKELFDLVRDKIITSSVSTEILSKNSIGLYQSEHLKAWVQGNQGSILSCEIEKDLLSVLIEIIREFSNNKVMRKLSTEDLNYITQLWINGISYFNILESCTEKLIRIEKRGKLKSIDLSDIISLCDNGLGYETSMILNSINNILEELVGEKIDVITKLTRRLKYGLSLDKEINIYELGFSDRIVVQLIGQEIKSQSKNQIRNEIKRDSARLKDKLSDFPSYYIQLINEI

SEQ ID NO: 54622 - protein, 259 aa, Lysobacter concretionis Ko07 = DSM 16239
MAQFDDWCISVDAPMGNHFRRVMTGQAANLGVGIQATAAIVPSHYASEEQVARALARLGKPAAAALIESKLPTTKQIRSGDLGEIYATEWIDAHSGGYRAPIKRLRWKDHRNMAMRGEDVIGILQDPQSQRLQFLKTEAKSRATLSAQVLTEARAGLDKDGGLPSAHALHFISARLLELGNLPLADAIDDALLKHGVPPQSVRHLLFTFSGNAPDALLAASLQAYPGLINQWGIGLRVEGHGAFVGAVYDRVMADACNP

SEQ ID NO: 54623 - protein, 1172 aa, Lysobacter concretionis Ko07 = DSM 16239
MPATPEAITADIAEATAAGFRGRLIARGQARAIIWRDGTLPPDAPDFAPQLSYDLHSYAYALLGLGLRLREVGGDPAEARTAFEQAATALEAVMAKGNSQEADRDFHFVMAAAAYHLAHLSARAYSLLAIVEADENFSPIERALAQLMRRNFDALRSSVLDYRTSGQGSDERIATDMQSHLEQAEGAAVPPDADGDDFLFDGLNTAVTDTFMAAMSLYLLALERGERELVDHALERLRVSLAICGEMNMLPQWWAHRVAIHLLSDLWSSTFHKRVPLQSAGGLAADWPRLRELFIALLQRRARAEVDLWPSQIEAAARAVDQSDDLVVSLPTSAGKTRIAELCILRCLAGGKRVVFVTPLRALSAQTEATLQRTFSPLGKTISALYGSIGVTGFDEDAIRERDIVVATPEKLDFALRNDPSLLDDVDLLVFDEGHMIGLNEREVRYEVQIQRLLRRADALERRIVCLSAILPNGDQLDDFAAWLRRDHPGGLIKNDWRPTRLRFGEVVWTSPTARLNLRVGDERPWVQRFLTGVAPPNWIPPKRRRTQLFPKNQRELCLATAWRLVDDGQTVLVFCPERRSVEPFAAVIVDLHERGALRSLLEADPNALNTAIALGEEWLGADNAILKCLRLGVALHHGALPTSYRKEVERLLRENVLKVTISSPTLAQGLNLSATAVVMHSLHRAGERIEISEFKNVIGRAGRAFVDVEGVVLFPMFEDIPRKRRNWETLITDLGARNMESGLVLLVVELLKRMQARIGGDINQLVDYVINNAAAWTFPEIGNEEPEDRNRALADWERHVATLDTAILSLIGENEIPDEGIEAALDDILQSSLWQRRLERLDAQFQHLLKAGLSSRSRLIWNQSTAAQRRGYFLAGVGLTTGHALDAIASEVNLLLIQANGAILEGDAEAAITSITGLAERVFAFYPFIPDPLPANWRDILRVWLQGQPLAALGGDQPSEVLQFVEGGLIYRLPWAMEAIRVRASANGDEVDDGLGLEDHELGLAVPAVVTGTLNRSASILIQAGFNSRLAAIKAVTDTGATFTSGKELRQWLNADVVAAWSAQADWPTRETRPIWMEFVQSFTPNEEHTWADRHYWSRITWLAAPPPPGTVVQIHQWSGRPWVLSPDGTPLGTVQAALNSHRSGLLRAQVAQDVSKIDVVYLGPDDLAGT

SEQ ID NO: 54624 - protein, 259 aa, Salipiger mucosus DSM 16094
MVQFNDWCDSADTPLGNHHVRVMTGRPADVATGIQVTATAVPAHYAAEERIAAALARLGKAAAAQMISDLLPQSPQIRSGDLGEIYATEWIDAHSGYRAPIKRLRWKDHRNMAMRGDDVIGMIIDPATQRLRFLKAEAKSRINLRAQTLQEARTGLDKDGGLPSSHALSFISARLMELGTDAPLVDAIDEALYRHGIPPESVKHLLFTFSGNSPKALLTQALQAYAGPIGQWGVGLHVNGHAAFVGAIYDKVIIDANQR

SEQ ID NO: 54625 - protein, 1055 aa, Salipiger mucosus DSM 16094
MPTSVEAITAAITEAATAGFRGRLIARGQARAMIWRDGVLPPESPAFSPQLSFDLFSYAYGLLGLGLRLRELDGDPSQARVAFEQAATALESVMAKGNRDEADRDFHFVIAAASYHLAHLSARAYSLLSIVTAEENFSPIEQALALLMRRDINELRTLVYAFRLDGRGSDATITALFQQRLAEAAPPDAPERDGQDFLFEGLDLALTDAFFGAFATFLLALDRGERALLDRAIAQLRENLNICGELNLLPQWWVHRLAIHLLSDLWSNTFHEKVPTLPAGDAAAAWGNLRDLFIALLARRARAEVDLWPSQTEAASRAVDQTDNLVVSLPTSAGKTRIAEMTILRCLASGRRVIFVTPLRALSAQTEATLQHTFGPLGKTISSLYGSIGVSSFDEDAIRGRDIVVATPEKLDFALRNDPSLLDDVGLLVFDEGHMIGPGEREVRYEVQIQRLLRRQDADQRRIVCLSAILPDGDQMEDFSAWLRRDQPGDPIKNDWRPTRLRFGEVIWKSPTARLNLRVGEERPFVPRFLTGAAPPLFVPPKRLRTRLFPDSQQELSLATAWRLVGDGQTVLIYCPERRSVEPFAKVIIDLHARGALASLLTVDPATLQTAIALGEEWLGPNSDILNCLRIGVALHHGALPTAYRKEIERLLREGVLKVTISSPTLAQGLNLSATAVVMHSLYRHGEKIKVSEFKNVIGRAGRAYIDVEGLVLYPIFEAAKNKKHGEWVELIEDLGAREMESGLIQLIWSLLNRMHARLGGNFDQLIDYVVNNATAWTFPEVAGEKPEKRERAHKEWERHMATLDTAILSLLGEADVPDDQIEAALDDTLQSSLWQRRLLRMSDAARAACRTTLLTRSRFIWANSTATRRRGYFLAGLGLEAGHALDAIAPEANDLLIQANAALAAADHEAAIAAITGIAERVFAFYPFEPDSFPANWRDILRCWLLGQPLAAIVAGQEAEALQFIEGGLVYRLPWAMESLRVRAAANGDVVGIFELPLDTFVSAVPRSPSAMFRRMREHPYRELGSAVRNVRYKCVSQIARCGDLRVRTPALAG

SEQ ID NO: 54626 - protein, 260 aa, Sphingopyxis granuli
MGLYERWCESTKEKDKRKHYWTYVEKDGGRDEISGDLAETIRSHYDRLERIAEDVERLGYTVAAKILSEAMPQTAKGRSGDLGEILATELVEEEIGLRVPVRRLRYKDGRNMAMRGDDFIGAGYGGQDEKLWLLKGEAKSNMKLGKSTVTSARKVLDRDNGRCTPDSLLFVANRLLESNDPDENALGRDLRDEVGLRSLRADRIDHMLFTVSGNGPHASLKEDLETAGTNRDHYVVNIHVEDHQDFIAAMYEGAHDLGDA

SEQ ID NO: 54627 - protein, 1172 aa, Sphingopyxis granuli
METPDELTAFLATATVDGILGRLLYRGAAWSLMREAGVLPQTSPPLGATIETDLAEHGFALLRGAMALRAQTGASDLTNKAFERAANAFEALVRNGDPEAPDRGFRRTIAAAAYHLAGFSAVAYSLFNETVEDLNASPGETAIRHLILRDLDQLRGFVRDWLGDEAHGDEQMGEALGGDEPDIDDVLSTILNTTICRALAYFDFALETGEEEPIDAARDLLATAVSLAGNAGNVPLWWISNLCRHLIDDLWQHSLHRSLPTEPPAGTEERYPDLRRLFIGSLYARKTSEVELWPSQREAAQRSTDVTDDLVVALPTSAGKTRVAEIAALMTLSSARRVLIVTPLRALSAQTERSFRKTFAPLGFSVSSLYGASGLSAGDEDALRTREIIIATPEKLDFALRSDASLIDDVGLIVLDEGHMIGPSEREIRYETLVQRLLRRPDAANRRIVCLSAILPSGDELDDLTAWIRSDEPGEPVRSDWRPTRQRFGALTWRGKDALLRLDLDDGGPFLDKFVEEKPARGREKKPYPRKNSHLALFAAWEFAGQGKRTLIFSTQANWVESYGKQVVDLCKRGYLSSLLDDEAPIARALEVGKEWLGEDHPAVASLKAGVAIHHGRLPSPFLRELEVLLSEGVLKVIVASPTLSQGLNLNAAVLLVPALYRAGEKIKGEEFANVAGRAGRAFVDVEGLIVHVMFDKTDWRKKEWRKLVASAKARTLKSGLIQIVAEILERLSREGVLDRDDAWEYLANSREAWRSPDEEAEVAERLAAAVEYDADGDENDDEDESEADEEETIDEEPLSQIVERLDATVFGLIEALDADRADLPKLLDEALKGSLWARQIAREEEDVAPLHKKVFEARADLIWKTTTEQARRGHFAMGVGLEAGLSIDAMADVLAELVDRADGAALSGDVDELADALGGLGERLLFMRPFIPDKKNALPANWKAILRAWISGEEVSKIGPQNMRAVEEAFTYRLVWALEAIRTRRMSLGWSPETVAGGAAAVVETGVPQFMMAMLIRAGLPSRTAAMASINETKPMFVTPAEMRAWLESDEITAFTDLGDWPTPETAALWARFRTEALSGGIQKWSIYRNRRLLDVPVESAPRAGLYRIITDEGDGRTWLATPDYQRLAAFRKHAVDPKPSLLSGRLPEGVNLVDVLRVGRGKMRWPPANA

SEQ ID NO: 54628 - protein, 257 aa, Alteromonas mediterranea 615
MLKIADKSEVTEHVAGQNRFKKIVLKPEEFESLVEELVTLVPDYYVDPLSLASTLDRLGKPAAAKKLRLKLPEVKKIRSGDVGEIITSDYIEEYTSFDVPIRKLRWKDHRNMAMRGDDVIGLLVDQQRNKVFFLKAEAKSNQTLGTAVLDKAREELDLDEGLPAPHALEFIAERLRETGKQDLADLIEQAQLIDGIRPEQVEHLLFTFTASNPDNLQKSAFDAYSGTIKQSSVGFQVGNHQELISCTYQGVVDGLDD

SEQ ID NO: 54629 - protein, 1178 aa, Alteromonas mediterranea 615
MASTIEEIERAIKQAVSTGFRGRLLERGLARSMIWKNGKLPEGAPNFAERLSYDLLSYGYSLLSLGLRLTELRGNSDIARLAFEKSAIAISEVVNNGRKDDPEKGFHTVLAGSAYHLGRFSAKAFSLITHSFQNANLSRIERLLSLLLLRRFGDLESEISEWQLSGMGEDTSLEEKLEADIDNARQGQEERTSSGAQAVEIPVVDLAVTDNYYSAIFEFLFALESGNAALLENSISRIETSLQVCSELSLLPQWWILRITKYLLRDLWDASFHCIIPVTPDHPQAQEWLQMRWLFIASLLKRNKAEIDLWPSQMEGARRAVNDWDDLVVSLPTSAGKTRIAELCILRCLAIGKRVLFITPLRALSAQTEVSLRKTFLPLGKSVSSLYGSIGTSNFEQDMIRSQDIVVGTPEKLDFALRNNPSLIDDVGLVVLDEGHMIGLNEREISYEVQIQRLLKRQDADQRRIVCLSAILPDSDQLDDFVGWLRRDKDGDALRSNWRPTDLRFGEIVWQRDRAQINFTIGEAQPFIPDYIQHTVPPIGRRTTPFPRDKKELTLATAWKLAKDKHTVLIYCPERRSVNSFARDIIDLHNRGALESVLSVPINKLELAIVLGEEWLGESNPIVECLKIGVAVHHGALPTPFRKEMEKLLRDGVLKVTVSSPTLAQGLNLSATAVIVFSLTRNRNSIDVAEFKNVIGRAGRAFVDTHGLVLYPIFDRHEWFRAQWRQLVEDTNARNMESGLALLVNELIVRMANSVGNTAIDTLLEYVLNNAGGWNFPAITGEEQDQSEIQKASWNKHIVSLDTALLSMLGSEDIPTEEIPEALDRLLESSLWQRRLNRYEQTNEGMKNLFDTVLSQRAKHIWERTTAEQRRGYFLAGVGLETGLKLDAISEQANALLVNANAFLLAGDHQQVIATTKQLAELVFNIEPFVPRNLPEGWRDILDLWLSGDVISEHEFADINESLMFIEDALIYRLPWGLEAIKVRAQANGDDIGDGLTIDDYETDLLVPAIESGTLNRSAALLMQAGFNSRKAAIRAVETTNASFINSRQLKDWLHSEQVFNLAITFNWPTPETSNLWWEFVSEFEPSSESVWKPSVAELPVQWMDSYEPQYGQLVKLSNAREEATLVLASNGETIGELRSRLKLQEKGIYLAKVHQDTSLLDVTYWGTGTKPFAVEQQ

SEQ ID NO: 54630 - protein, 258 aa, Marinomonas sp. MED121
MDFIKELNERPEGSLDVACHILADNSAKLLEDYLVGKLASCYISQEKLEERANQTGLAYSELIANKIPDKGSVMSGDFGEIFTLYFLDRQYKDDLKLIKKWRYKQDRKKAAPHSDVVLFNIGDLNNPSEDDFVICAESKQKATASAFDPISSAISGYESDRTGRLAKTLVWLKEKAIDEGNQDDLTLASRFADELNIRYSKIYRAVAIVDRAFLNDEITKDINLPEKTHSFEIIVIGIDDLKERYESVFRRACEEANL

SEQ ID NO: 54631 - protein, 973 aa, Marinomonas sp. MED121
MSQLLIKMIAEFESWEAAAEFNIPQQSWTDYTVKDRVDDLYIATFSHIFSTLREESEDMKSNLLSCAKTLLVFSKSAASKYISGVEKNRNLLYSAALYYLADQPPTSFLITKDIDSDIFEIEQEKLLYSFLSRILDEENELSVEIFDAVNKGEHQRFHLILDKLSEQVAIGLKHDPLLYVSSKFAYECIARFITVNVWGLLEKYSNCDDMSVWNDLLSSNGGHPIWELLPSQVKAVESGILTGGKPAYSMQMPTSAGKTSLCEIIIFNEVKVRGNKVLFLVPFRALAAEIKAGMYSRLSNVGIEVSASYGGNIPTRSESTTVENADVVISTPEKFEALCQVIPDFIDRFDVLICDEGHLIDDGNRGLQYELLLTKFKRRESPVDKIVFISAILPNVSDINDWLGGDEGSLINSDYKPVVTDYSFLRSVNYNWFLDFNPHLDQPYSYFLSDFIQKDELKFINQGTGNSNLLPGWNSLLTLACASAFKASTSGSVILFTTEKGQSGVRGLANKCLDMLERNAFITQQYQKENHPVDLVNYISTLLGERHLLTRLVQRKIGCHHGDLPQELRREMEQAINEQKINILICTSTLAEGVNLPIRTIVLHTVKRFNGRIKGFIEKRNIKNIIGRAGRAGKETRGRVIFANESERDYALEVINDVQLESAHGFLFSLIKDLKNYLEEMNLTLNQEFFDSDVAKDISYIFESIDMSLLQSLPEDTPEEELDTFLDQMLSETLASKFCDEEGLTDLLKMVFSLRTERIYNETDSTKRAIMRNTGSSLNFLNYVNESQILDQDIWRSLSAPQEPNWFNHIIKPVLEHIGYENSADLIIDVLNGWVSGSFYVEMAEDLEQDVDDVVRYICTTIGFELQQILSQLTRFAIELYEDEVPDHVVNWPQYMQYGVNRQIHLRLINSGVTDRLAVFGVARFLDFLELSEDIPNIRRLLMVNREALNNFLEKDPRVPALSISRFFDDYNI

SEQ ID NO: 54632 - protein, 276 aa, Photobacterium ganghwense
MSAKKQTTAQSKLIGEHPKSGLFFDWFECEDTPATANKKHRKLTNKGISSDTLVEHLSQWVIKHHATEARIARIERKKQILAKHGFAQYMEGKVPFPIKSATTQKGNLGEIILAEYLTETSGLEILVYKLRYNPNVEQSMKGDDLLLFEKQNIQNRVIMGEAKFRSTKNKKALDDIVQSLSNKNLPISLTFVSDRLEEMGDELLANEIDDLITNLHAQKTPVTYVGFYHSESSAYQTIEKHLNSNNKNLVIVSYGEDNPAKLIKSSFDKALKMVME

SEQ ID NO: 54633 - protein, 1107 aa, Photobacterium ganghwense
MDTVKARKLFDKLENDEFAQNLIAQSNAKNILLAVKEDEANFPNFTEGLTDRVNSIAFAYLSIGCAITEKSKIDDVALQAFEKAGDIIHYIHAPNTELSKKSSFYLVVSSLSFYLASQYSKSFIAIKNVKAGTPLIGLFSSFLRKDLQALIHEINNIQFDDEYDKVSEDELEQNNKHYAIILSKSLNLVLEYIYSGKDEYLYLGKESLADLKELASIDDEPAIWWLSRLLIILLDVFKQYSFWNVIPKLIESNITNDYVAQLALRTPPITELFFAQYNALQAMQDKNDIVLSLPTSSGKTRIAEIAILEALIDNPFSKVLYLAPFRSLSYEVEASMEKTLAPLGFSTTFLYGGGQFSKLDKALIENSNVIIATPEKAKAIVRADEDIANGISLLIIDEGHLLGAEERLIKIELFIEELKHHVRKNDGKIMLLSAVLPNTNDIAQWIAEDGSSVYQTDKTIADKRFGIIKWTHAKNVTIEWFGEPTSFNKNFVDKFLPARARTKYFPNDKNEGIAATALKLSQLGTVLMFIAQARYVVSSANRVLRAMGGTPELHNYNNEVLFESFRLACDEAGVSDIYDLARYGILCHFGKLPTDVRILTEQLMRTENVKVIVSTTSLGQGVNIGISTVIFADVFMNHQDEVKIDSKDFWNIAGRAGRAFTDIEGKVLYCIDETNWSYKRDLGFCREYFDSSKMEHAKSGLLDLVKYLKNISTRCNVSFELLLDLVASNDFTQFKSDNKDYSNIFPQVFDWVDDTLLALDYKNKAYELQDPSNWIDTVFRNSLAYIQAGEDEMVSQEDIINFLKSRNRAVINMAGDYVNWEGMVKSGIPLSSSKALDDYIDQITESIKLYKESEGCATDLAEFSKSIEKLVQQLPTVTFKHGYEEAELDEVRLKWFSAKPLSEIAIHENGQEICVSYLSMTLPWAINAITRKLFDLELDDEAKLLEELALYCEIGVPNMDSVKIYLAGLKSRVAAFELSNVLLGKLTSLNKLKLVKLLKDNSVNIELLCDERTKQWVELFTREQDGKVEDELTKISNFVLKNTEPESDQLNVRSFNGSLYLCNADLTEKILISSSKKFPFKSIADNPKVYFEKEASHWAMRVRASRN

SEQ ID NO: 54634 - protein, 260 aa, Sphingobium japonicum UT26S
MGLYERWCESTKAKDKRKRYWTYVEKDGGRDEIRDGLAETIRSHYDRLERIAEDVDRLGYKVAAEILSEAMPQTAKGRSGDLGEILATELVEEEIGLRVPVRRLRYKDGRNMAMRGDDFIGAGYDVAGEKLWLLKGEAKSNKVLGKATVTSARKVLNRDNGRCTPDSLLFVANRLLESNDPGDNELGRSLRDEVGLKSLRADRIDHMLFTVSGNGPHASLKEDLDATGTNRDHYVVNIHVEDHQDFIAAMYQEAEDLGDD

SEQ ID NO: 54635 - protein, 1169 aa, Sphingobium japonicum UT26S
METIDELTAFLATATADGILGRLLYRGAAWSLMREDGVLPPNAPPLGVTIETDLAEHGFALLRAAMALRAQAGASDLTSKAFERAANAFEALVRNGDPEAPDRGFRRTIGAAAYHLAGFSAVAYSLFNETADDLNASPGETAVRHLILRDLGQLRGFVRDWLDDDAHGDVQIAAALTGEEPDVDEVLSTILNTTICRALAHFDFALETGEPEPIESARTLLSTAVSLADNAENVPLWWISNLCRHLIDDLWQHSLHQNLPTEPPEGTEEKYPDLRRLFISSLYARKTSEVELWPSQREAAQRSTDVTDDLVVALPTSAGKTRVAEIAALMTLSSARRVLIVTPLRALSAQTERSFRKTFAPLGFSVSSLYGASGLSAGDEDALRTREIIIATPEKLDFALRSDPTLIDDVGMIVLDEGHMIGPSEREIRYETLVQRLLRRADAGDRRIVCLSAILPSGDELDDLTAWIRSDEPGEPVRSDWRPTRQRFGALTWRGKDALLRLDLDDDGPFLDKFVLEKPALGREKKPYPRKNSHLALFAAWEFARQGKRTLIFSTQANWVESYGKQVVDLCKRGYLDSLLEDEASIARALEVGKEWLGEDHPAVACLKQGVAIHHGRLPSPFLRELETLLSEGVLKVIVASPTLSQGLNLNAAVLLVPALYRAAEKIKGEEFANVAGRAGRAFVDVEGLIVHVMFDNIDWRKKEWRKLVASAKARTLKSGLIQIVAEILERLSREGVLDRDDAWEYLANAREAWRSPEEEAAVAARLAAAVDYDDDDDGGDDEDGGDDEEESIDEEPLSQIVERLDATVFGLIEALDADRADLPKLLDEALKGSLWARQIAREDEDIAPLHRKVFEARADLIWKTTTAQARRGHFAMGVGLEAGLTIDAMADELAELLDRADEAALSGDIDELVDALCGLGERLLFMRPFIPDKANALPANWKTILRAWVSGEEVAKIGPHNMRAVEEAFTYRLVWALEAVRTRRMSLGWSPETVAGGGAAAVETGVPQFMMAMLIRAGLPSRRAAMAAIDDAKPVFVTPAEMRAWLESDEITAYTDAGDWPTPDTAALWARFRTEALSGGIQKWSVEHYKRLLDFAAAPPAGLYRIFTDEGDGRTWLATPDYRRVAAFKKPAVDPKPSLFSGRLPGNTRLVEALRVGRGKLRWPPADA

SEQ ID NO: 54636 - protein, 228 aa, Sphingobium japonicum BiD32
MSTGVASVAAVVPGHYAAPDRIGDILRRLGKSAVADYIQTKLPQGAKSRSGDLGEILAASYVSEFTGYSVGVFKLRWSDHREMAMRGDDILGIRLDPGVTVKFLKGEVKSRAALGKKTVDEARTALASSNGRPTPHALAFVADRLFETGETALAEVIDQFQIKARIEINQLSHLMFMFTGNNPSKLLTANLNAYSGKIPQFAVGLRVSTHQAFIKQVFEKVIADGNKP

SEQ ID NO: 54637 - protein, 1164 aa, Sphingobium japonicum BiD32
MATSPEAIAQLIAQATAAGFRDDLLAKGQARAMVWRDGVVPPEAPQFSTMLTYDLLSYAYSLMNQGLRLLDQQAESSAARSAFEHAASAIEAATARGRITNDRDFHRLMAGACYHLARYAARAFSLLHEGLNEANLSVPERAVALLMLRDLMTLETLIREERDNALEDAMIAHLAGEVAGDAPALDDSEDESVHEPLLQVVDRALSDNFTAALAIALLAFERGDEALIGSAIERLKTGLSSAAELNIVPSWWCHRLTIHLLDDLWSSSFHVRLPKAPDDGTAVDWAAYRELFIASLLRRGRSEIDLWPSQIDAATRALDLNDNMVISLPTSAGKTRVAELCILACLAAGRRVVFVTPLRALSAQTEVTLQRTFQPLGKTVSSLYGAIGVSEVDEDFLRESDIIVATPEKLDFALRNDPDLLDSVGLVVLDEGHMIGLTEREVRYEVQIQRLLRRSDAKTRRIVCLSAILPDGDQLQDFTAWLTGDQDDGLIKMDWRPTRLRYGEVEWRGDHAKLEISVGAEKPYVPRFLTASLPKGRKTRFFPCDQRELCIATAWALVADRHSVLIFCPQRRSVEPFAKAIVDLAKRGSIVPVLDHDPTVLDNAIAIGTEWLGVDSPVLACLRLGVAIHHGALPTPYRKEVERLLRDGVLRVTVSSPTLAQGLNLSATTLIFHGLKRGSEPIDIAEFRNVVGRAGRAYVDVEGLVIMPMFDRLTSRRAEWKGMVDSAKGKEMESGLLRLLLSLMGRIVRKTKAKSMATVLEYLAGMTAWEFPVLPTESSDVNEQERGRWSGYLTTLDTALLSMLGEQEVPDDQIEAMLDDVLTSSLWTRRLQHRKAAVQQLLKTGLVARAKFIWGRTTATQRRGYFLAGVGLATGEALDADAAELNELLVRANGAILVDDADEAIAALTAFAKKVFAIAPFVPDDLPDDWPTVLKAWLEGRALAPLAAGREDEVLKFVEQALVYKLPWAMEAVRVRGLAHGDVLEGGLSMEDIELGVAVGAVETGSLNVSAVMLMHAGFSSRLAAISAVSQTQADFTTMSELRAWLREDAVAGGCDNPDWPTTASHGLWLQFIENMAPERRRTWASTSHEIDVKWDKFGPPVGTALRFVDGGGETLVYAADFTRLGRLDKPLNSERLGLALASVGWLGDTVDVRYLGPGDLLCR

SEQ ID NO: 54638 - protein, 275 aa, Herbaspirillum hiltneri N3
MVRSLSPKPEYLQNFKQIGTLSLGSGEKCDVWELAIAADAACLSEWAKRFRQTYCSDEDLDILREGTGKSRAEYLLELVFPDKSEKPGPAVRSGDFAELLVADYVEFVLGYWVPRGKYAEKGSRDESVKGVDIIGFQCDDPEQPKPTDEMLTFEAKAQLGGGKYKDRLQVAVDDSGKDYLRAGETLAAMKRRMHMAGENISMRVVQRFQNAVDRPYRLLSGAAAILSDEAFDPGAISGTNVAKHNNAANLKLISIKGNALMTLAHTLYQRAADEA

SEQ ID NO: 54639 - protein, 1044 aa, Herbaspirillum hiltneri N3
MKPEINSRRYFGITRSKGKMYELGLPEESHIAVPDGVEPAALFPLAIGTLMDAAAALNDAVDVESGLGQDLRDEIGFAASFFDAYLDSRFDTNVSREVTLLASASYFLGQRPGSSLVLSRRLLAEGVNAVEHLTMWVLQADWRRPPNLAEHWLTELLYELSFRLMGHFNDGASPELVLELLNKIRRLTYASGTSREVLLAEVTAAVIKLRMAGSAWTLLPDFSGLDSSAWAEAIRRPGFPKELWPSQKLLGRAELFAGKSGLVQMPTSAGKTRSVEIILRSAFLSDRTRVAVLVAPFRALCHEIATSLRHAFKGEDVKVNELSDALQLDFSEQLAELFGQAAPTTRHLMVLTPEKFLYVLRQEPSLVAHIGLVVYDEGHQFDTGPRGITYELLLTEIKGLLQESAQTVLISAVIRNAQAVGTWLIGNEPNVVDGSGLLSTARSVAFATWSERLGQLLFFESDNYMHPDYFVPRSIEAEELESRPRERTKRVFPQKGTDAWKDVSLYLGIRLAPSGAVAVFCGRKDTASGLAERAVEIYERGFKLPAPALASDASETQRLTHLATQNFGPDSMVAKAAALGVFVHHGTTPQGLRLSIEHAMQSELIKLVICTSTLAQGVNLPIRYLIVSGVNQGAERIKTRDFQNLIGRAGRAGMHTEGLVLFADPKVIDNKGERWRLEAAVGLLKAENSEETSSSLLNLLAPIEAPDGNNVLPISTENMLQAYFKRGNELQAWAAEIAEANKQLGFNYRSLIKEISSRQRQLSALESYLMANRGVDSFEIMLSKVRDLAASTLAYSLADAAARESLMRLFELSATYIEELVPDTAEQATYAKTLLSAFDGRKVEAWVQEHEATLRALQTSDAWLEAVWPLLNSLVDDTLLTGMEPAGISIQLAREWMRGASYRELITLAQDVKASKPWGESKRRKLNEADVLQYLEGCLGFDCPLVAAAIGQFLFGIAGLDSQEAGPLNEFQKSLAYGLPNKLAVSAYEAGMADRCIAQNIALELFLDGYDGFSFRAALPEYRDLVAAVLEDYPSYFGTVLESI

SEQ ID NO: 54640 - protein, 263 aa, Lysobacter daejeonensis GH1-9
MDELGIDFVDAVPWFAHAQDQPYVLIHVSPASVTQLVESIGVPLRRCYITDADLDSAAQRPGVTRAEIIRSKLPDAGATMSGDFGEVLGYFYQAARELPATAIGPKKWRLKQDRTKPAPKSDVVHFVMPNRPHPSAADAILCAEVKAKATAGTSTPIADAIADCKKDRTSRLASTLVWLRERALTTDLGDVDLPLLDRFIQAVDSPPVAKRFRAVAVICNALLTNELVAAPSVADPEFTLVVIGVPNLQQTYTAAFAAAQASA

SEQ ID NO: 54641 - protein, 992 aa, Lysobacter daejeonensis GH1-9
MRASLQRWINNADTARHLRHFQFAQLPIELGAIDHRLDDYYISLVGELFANLHQPQVAPADWAQLGNAFLQFSVEIADDQLGDRGISREDATLFAAAAFYFGDFPASACLAMRRSARPANPASLRAACYDFLARPGTLQSDFSRAVQDELKAGDLDRIALRSAALREREVRALEEGPEVWIVARLLRGLLERFQQTNLRAVLPQGASPFWTPLVRSLVDRQPSSWEFFPSQIQAIRGGLLTNANSYAMQMPTGAGKTTLCETLLYWHLGVHPDDVAVLLVPFRSLASELKGTLVTRLNAMGLPARCAYGGTVPSGEEVHGLDQIRAMVATPESLSGILSAEPTFAQRISLVICDEGHLLDSDARGIGLELLLARMKSRAGAAPRFVFVSAIVPNIEEINAWLGGTDQTVIRSDYRPATAEFAVLQPLGTGAAATIRLAMHPHEAPERRFTLDRFLDRNSFTFTNPVTRRPNTYGFASVKTQAIAAARKLLPMGTTAIFAANKRGDQGAEGLARELVNQLRQPMPLPAPMDYAQPGALPPCIAYLEAEYGAAWIGTQAVRHGAVLHHGDIPQETREVLEALIRDNAVRLVICTSTLAEGVNLPIRSLVLYSVQRRRPGRQQPEAMLARDIKNLVGRAGRAGVNTKGLVICANPGQWGLVLPVAAQGAGEPVRGSLVSLVRQLSNFLARQGMSLSNEFLEGVDAVYPVVDGVDSTLIDLISEEVGEDLFVARARELAEQTFAARQLEPAQAELLRDVFELRARRLIGLRPTGQLAWVRETGAKVRMLASVSAGLWPARPNWQDPVDVLDDGLRTVILEWAWTHAELQHAVLQGFRVEADQVEVAKPRFFEIVRRWMFGESFVEIGQQLQIDMGDLLALHTRAIAYTLQTLVEQGLSLLARRLQADGLELAAGVSNFTQQLRFGAPNVAARLLAELGVRHRRAYVALGNAITQPGPPPDLTNIKANARDGLRQHEAEWRAYLGDLVYANTLKDLA

SEQ ID NO: 54642 - protein, 258 aa, Chelatococcus sambhunathii
MFDDWCDIDETARGERKKLCGLTEKAGGRAAIKDELIERVRSHYDKLEQIADDVERLGFPGASAILRERLPRTARERSGELGEIIASEFIEHHTGFRIPVRRLRYKDGREMALRGDDYVGIDEDDEQRLLFLKGEAKSGRTVPQGVVADARERLSENDGRPTTISLLFVADRLLESDDENDKALGRRIRDEVALRAVPPQRITHGLFALSGNNTDAVLEADLEEADGAHNHLSAGFHVEGHQAFIAEIYEEAGNLGDD

SEQ ID NO: 54643 - protein, 132 aa, Chelatococcus sambhunathii
METIDELQAFISTATRDNVRGRLLYRGEARAIIRREGELPAGAPQFAETLDTDLSEYGFSLLRASLALREQGADTGVWRPGFLKAGNAFEALVRNGSPETLQRGFWRVMGAASYHLAGYSAMAYSLISQREE

SEQ ID NO: 54644 - protein, 269 aa, Labrenzia alexandrii
MAAPDHVAWLEDTGDVIETTDGLEAEIWVLQHADDPAILSAWAIHYRQHYCRDEDLPDLVADTGLSNADFLTNIKFPDAAAAPGPSTRSGDFGEILVADFIEYVLGYWCPRHGRFEDRENRNVPSNGTDVIGFKFTGDEQSPDDELLVIESKAGFRPTTANRLQQAIDHSGKDRAREAMSLSAIKQRLLKINRDEALKVGRFQNQADRPFMRTNAAVAVLDDEVFDEMTLDESDASDHPNRDNLRLIIIRGISMMDLVHALYERAANEA

SEQ ID NO: 54645 - protein, 971 aa, Labrenzia alexandrii
MPSAWEADDGSIEQMVRFSASFFDAFLESQLNAELTPEFSLLCAASYYLADSVGSAVVVARRSEAPPIELGHGLARVAWHILRGDTGPINGGSQHTGFGNRLLNALTRHFSLEADAEEEIRAMCAELRASVYDNGSAREVVYADIVTALCSRKLENAARTILPPSSDLPLASWTEAMRKPRFPKELWPAQRKIAEAGLLRGGSGVVQMPTSAGKTRATELIIRSVFLSGRSNLAVIVAPFRSLCHDIRSDLAGAFADENIALDEVSDSFLLDIDIEGVLAQRSVLIVTPEKMLYMLRRAPELAERIGLIIYDEGHQFEGFARGPTYELLLSSLRMTLAPAAQVVLISAVIGNAPVIAEWLIGDENAVISGEGLLPTTKSIAFASWQRERGLLQYVSPDDPEQQEFFVPRIVTQTNLALKPSERTARVFPERGGAGESGEVGLFLGLHLVERGSVALFRGTKEGVISLCGRAAEIFDRAVALPRPLDVSDAAEIARLTHLASLNLGADQDVTQASALGILAHHGNTPEGLRLAVEHAMKEGHAKFVICTSTLAQGVNFPIRYLIVSATQQGKEKIKVRDFQNLIGRAGRAGMHTEGSVIFSAPSIYDQRGNWAGRWRWVSAKNLLDPARAEPSHSSILDLFEEYEQPPTRKLPLPIDWLDLAFATHADIDAVVASVKERFGWVDVDMFKTFVAGRARAIQSIAAYLAAYVDFTSDQAGERIDELAHNTLAWHLADDATRGNLLEVFRMTARAIEAAGDDALRALIRKSPLPPADVFSLRDWTNANIQTLVDAAERGELVDTVYAEVHQYVTSKALSKLTDQNHILPTLKAWLAGQSFNEIGQALRAADVRSGNRHITANHVVAICEGGFGFELAMVVASMADLVEPLDEDLYGELVLLQRQIKNGLSNAAALAFYEAGFKDRVVAQALAAVFEGVADRAGVRMMCRAKQDELVKVLGAFPAYFQTVAEELRH

SEQ ID NO: 54646 - protein, 259 aa, Sphingomonas sanxanigenens DSM 19645 = NX02
MVQFNDWCDAADTPLGNHHVRVMTGRTADAAMGIQLTATAVPAHYAAEERLAAALARLGKPAAAKMVTDLLPQTPQIRSGDLGEIYATEWIDAHSGYRAPIKRLRWKDHRDMAMRGDDVIGMILDPATQRLRFLKTEAKSRIDLRAQTLQEARAGLDKDGGLPSSHALSFISARLMDLGTDAPLVDAIDEALYRLGIPPDHVRHLLFTFSGNAPEALLTQALLAYPGPIGQWGVGLHVDGHAAFVGAVYAQVIANANQP

SEQ ID NO: 54647 - protein, 1174 aa, Sphingomonas sanxanigenens DSM 19645 = NX02
MPTSPEAISAAITDAAATGFRGRLIARGQARAMIWRQGVLPAGAPAFSAQLSFDLHSYGYGLLGLGLRLLELGGDPAQARVAFEQAATALEAVMAKGNRAEADRDFHFVMAAASYHLAHLSARAYSLLAVVAEEENFSLIEQALALLMRRDINELRARVYAFRLDGRGSDEAITALFQQRLADPLVGDAAERDGHDFLFEGLDLALTDAFFGAVSMFLLALDRGERALIDRAIAQLRENLAICAELNLVPQWWAHRVAIHLLSDLWSNTFHERVPLIPAGGEAPPWRGLRDLFIGLLARRPRAEVDLWPSQIEAAARAVDQADNLVVSLPTSAGKTRVAELSILRCLAAGRRVMFVTPLRALSAQTETTLQRTFGPLGKTISALYGSIGVSAFDEDAIRERDIVVATPEKLDFALRNDPSLLDDVGLLVFDEGHMIGPGEREVRYEVQIQRLLRRPDAEQRRIVCLSAILPDGPQLEDFSAWLRRDQPGDPIKDDWRPTRLRFGEVVWSSPRARLNLRVGEEQPFVPGFLTGVAPPLFIPPKKLRTRLFPDNQQELSLATAWRLVDDGQTVLIYCPERRSVEPFAKVIVDLHTRGALASLLTVDPVRLQTAIALGEEWLGADSDILKCLRLGVALHHGALPTAYRKEVERLLRDGVLKVTISSPTLAQGLNLSATAVVMHSLYRHGEKIQVSEFKNVIGRAGRAYVDVEGLVLFPIFSDTQNKRHDEWVGLIGDLGAREMESGLVQLIFALLKRMHGRIGGNLEQLVDYVVNNAAAWTFPEVAGEIPEKRERALKQWERSMATLDTAILSLIGEDDVPDDQIEAALDTVLQSSLWNRRLERLDAGSRAAYRATLLTRSRYIWANSTAVSRRGYFLAGLGLEAGHALDAVAPVANDLLVQANAALLVGDHEAAITAITGIAERVFSFYPFEPDPFPGNWRDILRCWLLGQPLASAVAGQEGDALQFIEGGLVYRLPWAMEALRVRAAANGDVVGVFGLALADHELGLAVPAVETGTMNRSASILIQAGFNSRLAAIKAVVDTGATFTSGAELRTWLRSPVLAAWSAQPDWPSPETRAMWLEFAQEAAPAANRTWARRDYVGNVEWFAAPAPPGSPVSLHNWNGQPLVLSADGRGIGRLQHPLNHNRRGLLRATVALNPAQLELSYLGPDDLWAVA

SEQ ID NO: 54648 - protein, 259 aa, Agrobacterium sp. C13; identical to SEQ ID NO: 52926

SEQ ID NO: 54649 - protein, 1172 aa, Agrobacterium sp. C13; identical to SEQ ID NO: 52927

SEQ ID NO: 54650 - protein, 275 aa, Bacteroides sp. 1_1_30; identical to SEQ ID NO: 53160

SEQ ID NO: 54651 - protein, 1116 aa, Bacteroides sp. 1_1_30; identical to SEQ ID NO: 54493

SEQ ID NO: 54652 - protein, 263 aa, Lachnoanaerobaculum saburreum F0468
MSIINQFSDEKEPFATCLLSTDCTTTSGIEHRVLEDNGNSDILLRYMEDALQRYHISPEALQRHMDLIATLKIKNLPILRSPYPQTSTTQKGNFAEVFLAEYLVSTTDMELPIYRLRYNTNPDQSMKGDDVLLFDLDSDPVRIIVGESKFRGIPDKQSVIDIVDGLVRSYKAGLPISLMFVAERLFQENKPELGRKVQNCAIMFATNKLHIDYVGFLMSNQNSKVHVNRHTTNNFHNLLMISLGIQNPETMVKKAFEELESRL

SEQ ID NO: 54653 - protein, 1116 aa, Lachnoanaerobaculum saburreum F0468
MSIPTDYISNLVNELSQGRLENLIKQADARRILQEVKEIPENYPDFAPLLTEKATHIAYALLSCGCSLMEKSNSDFTVMEKTNSNFTAIEILSILEKAGKLLSDIYKYNDDEFDGKDYNLLISGMALYAAKQYSRAFIVLNNVNLDFVVGQIVIQFINKDFNSLLQNVNQVFFEPPNELSDIQSLDEWVISHEIARIFLMVVDFVQTGNKSNFVSIDNIFDKLLSIATESNLISYWLIVRLLKIILSTFREASLWTILPPLLPVQHRTENYIRLLSGFKPAITELWPSQTIAIPLAVGENSGGVINLRTSGGKTRVAEIAILNTLSKHIMSKTLYLAPFRSLAFEVEQSLSKTFSPLGITVSQLYGGSTANVTDFELIKQSQVIVATPEKAKALIRCGSGLETELKLIVIDEGHLLGAEERYIKNEIFLTHVNEFASRNQIKMLLLSAVLPNANELADWVAADTSLVAKSEWKPALERLGLLLWDGERVRLEWGREWKTFNPNFVQKAPLGFGRRRKMFPNNKKEAIAATAVRLAKTGTVMIYSARANSIEGLAESVLSALGEHQENFLWDCSLWNVFESVCKEELSENDIILIAARKGVICHNNRLPTLVRIAMERLMRSKPPLIIIASSTLGQGVNVGISSIIVSTPYYDQNCISNRDFWNICGRAGRAFSDVEGKILYAIDTTEEAWKVRKNHNLARNYFDNRQMERVQSGLLIALKAIYENAMKTNTDFNLLVEAIANDFIYSDINEKFVEWINRLFDYLDDELLAMHENFCLDENDVTWVDGVFRKSLAIIQADSSRENEYIRLLRARTKALLKKVPDKRSRQKIIASGIPLSVSQRMLDSVEDFRALALLFASQSTSDEYIAQIDRIVREIEIWSNLNAKYLVGDIPEQECLERIRHDWISGMPLSEIIKNEPTAEKITKDYYGFTLPWIIHGISQLFDPVLEETIVQTYSSIAMFIELGLPNITSSNIYMAGVRSRSAALELASIDIFNGKSVPEIKQILTSVEVSKENISNIAQVWIDLFSNTAKSQSPKRVSFPSFTWNRDDLPDRLYLREQKNQYYLLSSDGYFCEKVESTKDLPFSKIANIVGLYFECREGTWYLQSYNPRIIIG

SEQ ID NO: 54654 - protein, 259 aa, Enterobacteriaceae bacterium 9_2_54FAA
MVPFYDWCDSADMPLGNHHVRVMTGRPGDIATGIQMTARAIPAHYTTEERIAAALAKLGKTAAAHMLNDLLPQTAQIRSGDLGEIYATEWIDAYSGYRAPIKRLRWKDHRNMAMRGDDVIGMLLDAETQRLSFLKTEAKSRINLRAQTLEEARSGLDKDSGLPSSHALSFISARLMEIGTDAPLVDAIDEALYRHGIPHESVKHLLFTFSGNPPQTLLTQALQAYPGPIGQWGVGLHIDNHAAFVGAVYDRVIADANNP

SEQ ID NO: 54655 - protein, 1177 aa, Enterobacteriaceae bacterium 9_2_54FAA
MPTTPDAIIAAITDAATVGFRGRLIARGQARAMIWRDGVLPPGAPDFSAQLSFDLHSYAYGLLGLGLRLLESDGDPNQARIAFEQAATALESVMANGNRDEADRDFHFLLAAASYHLAHLSARAYSLLAIVADEANFSPIEHALTLLIRRDINSLRTRVYTFRLDGRGSDATITTFLQQHLTESIVADAAERDGKDFLFEGLNLALTDVFFGAFSMFLLALDRGEYILLERAIAQLRENLDICGELNLIPQWWVHRIAIHLLNDFWSNTFHEKVPLLPAGGVAPSWPVLRELFIGLLARRPRAEVDLWPSQIEAASRAVNQTDNLVVSLPTSAGKTRIAELSILRCLAGGRRAIVVTPLRALSAQTEATLQRTFGPLGKTISALYGSIGVSGFDEDAIRGRDIVVATPEKLDFALRNDPSLLDDVGLLVFDEGHMIGSGEREVRYEVQIQRLLRRQDADQRRIVCLSAILPDGDQMEDFSAWLRRDQPGGPIKNDWRPTRLRFGEVTWNSPTARLNLRVGEERPFVPRFLTGAAPPLFVPPKKRRNRLFPDNQQELSLATAWRLVRDGQTVLIYCPERRSVEPFAKVIVDLHSRGALESLLTVELTTLQIAIALGEEWLGTDSYILKCLRLGVALHHGALPTAYRKEIERLLREGILKVTISSPTLAQGLNLSATAVVMHSLYRHGEMIKVSEFKNVIGRAGRAYIDVEGLVLYPIFEDVNNRKHNKWVNLIEDHGAREMESGLIQLIFSLLSRMHSHIGGNLDHLIDYVVNNAAAWVFPEVAGEKVDEREQALKEWDRHMATLDTAILSLIGEADVPDDQIETALDSILQSSLWQRRLLRVNDESRAAYRTALFTRSRYIWANSTAVTRRGYFLAGLGLEAGRALDVIAPEANNLLMQANAALVVSDHEAAITAITDIAERVFTFYPFEPDTLPANWREILRGWLLGHPLAMMIAGEEVDALQFIEGGLGYRLPWAMEALRVRAAANGDTVGMPALALEDYELGLAVPAVETGTMNCSASILIQAGFNSRLAAIKAVTDTAANFTNGVELRDWLRSPGLAVYSAQPNWPTAEARTIWLEFIQEFAPSDNLSWARRDYLGNVNWFDVPAPSGTPVGLFHWNGQPLVLAPDGHAIGLLQHPLNLNRRGLVRATVAMNNGQINLSYLGPDDLWVVAKPH

SEQ ID NO: 54656 - protein, 259 aa, Agrobacterium sp. LY4; identical to SEQ ID NO: 52926

SEQ ID NO: 54657 - protein, 1172 aa, Agrobacterium sp. LY4; identical to SEQ ID NO: 52927

SEQ ID NO: 54658 - protein, 259 aa, Agrobacterium sp. TS43; identical to SEQ ID NO: 52926

SEQ ID NO: 54659 - protein, 1172 aa, Agrobacterium sp. TS43; identical to SEQ ID NO: 52927

SEQ ID NO: 54660 - protein, 259 aa, Agrobacterium sp. TS45; identical to SEQ ID NO: 52926

SEQ ID NO: 54661 - protein, 1172 aa, Agrobacterium sp. TS45; identical to SEQ ID NO: 52927

SEQ ID NO: 54662 - protein, 260 aa, Sphingobium lactosutens DS20
MGLYKNWCDATREKDKRKRYWTYVEKDGGRDEIRDDLAETIRSHYDRLQRIAEDVERLGYNVAAKILSEAMPQTPKGRSGDLGEILATELVEEEIGLRVPVRRLRYKDGRNMAMRGDDFIGAGYDGAGEKLWLLKGEAKSNKVLGKTTVTSARKVLNRDNGRCTPDSLLFVANRLLESNDPDDNELGRSLRDEVGLKTLRADRIDHMLFTVSGNGPHASLKDDLDATGTNRDHYVVNIHVEDHQDFIAAMYQEAEDLGDD

SEQ ID NO: 54663 - protein, 1171 aa, Sphingobium lactosutens DS20
METIDELTAFLATATVDGILGRLLYRGAAWSLMREDGVLPANAPPLGATIETDLAEHGFALLRGAMALRAQAGASELTSKAFERAANAFEALVRNGDLESPDRGFRRTLAAAAYHLAGFSAVAYSLFNETADDLNASPGETAIRHLILRDLGQLRGFVRVWLDDEAHGDEQIAGTLTGEDPDIDEALSTILNTTICRALAHFDFALETGESEPIETARALLATAVSLADNAENVPLWWISNLCRHLIDDLWRHSLHENLPTEPPEGTEEKYPDLRRLFISSLYARKTSEVELWPSQREAAQRSTDVTDDLVVALPTSAGKTRVAEIAALMTLSSARRVLIVTPLRALSAQTERSFRKTFAPLGFSVSSLYGASGLSAGDEDALRTREIIIATPEKLDFALRSDPSLIDDVGLIVLDEGHMIGPSEREIRYETLVQRLLRRGDAGDRRIVCLSAILPSGDELDDLTAWIRSDEPGEPVRSDWRPTRQRFGALTWRGKDALLRLDLDEDGPFLDKFVVEKPALGREKKPYPRKNSHLALFAAWEFASQGKRTLIFSTQANWVESYGKKVVDLCKRGYLESLLEDKASIARALEVGNEWLGEDHPAVACLKQGVAIHHGRLPSPFLRELEALLSEGVLKVIVASPTLSQGLNLNAAVLLVPALYRAGEKIKGEEFANVAGRAGRAFVDVEGLIVHVMFDNINWRKKEWGKLVASAKARTLKSGLIQIVAEILERLSREGVLDRDDAWEYLANAREAWRSSEEEASLAERLAAARQNDGDVAHDDEEEDDDDDDAEETIEEEPLSQIVERLDATVFGLIEALDSDRADLPKLLDEALRGSLWARQIAREDEDVAPLHKRVIEARADLIWKTTTAPARRGHFAMGVGLEAGLAIDAMADVLAELLDRADVAALSGDIDELVETLGGLGERLLFMRPFIPSKNNALPANWKAILHSWVSGEDVAKIGPQNMRAVEEAFTYRLVWALEAVRTRRMSLGWSPDTVAGGAAAAVETGVPQFMMSMLIRAGLPSRRAAMAAIEDAKPVFVTPAEMRAWLESDDITAYTDAGGWPTPDTAALWARFRTEALSGGIQKWSVENYKRLLDVAAAPPAGLYRIVTDEGDGRTWLTTPDYQQVAVFKKPAVDPKPSLFSGRLPGDTRLVETLRVGRGKLRWPTADA

SEQ ID NO: 54664 - protein, 258 aa, Mesorhizobium australicum WSM2073
MTKITDWCTIKSEKVGKHHLTVLELESGKFDVASDTVAAVVPSHYASDERTAKLLKRLGKTKAAAHLKEKLPKSPQVRSGDLGEILGATYVQESTPFGTSINKLRWKDHRNMAMRGDDLVGIQPAAGAGNIRFLKGEVKSAANITAKVLDTARTALKKSHSRPSAHALGFIADRLHEEGNDELADLIDDALWRDGIRLSQVSHMIFAFTGNDASNLLGANVQTYTGQVAQSVVGLRVKDHQKFIRSVFRKVIKNADGK

SEQ ID NO: 54665 - protein, 1172 aa, Mesorhizobium australicum WSM2073
MPTGNEAIESAVRTATEGGFRGRLLARGQARSLIWRDGQLPPDAPNFAAQLSYDLLSYGYSLLDMGLRLLDGDGNPDVARSAFEQAGEALESLVAHGAPNPDRDFHRFVAAAAYHLGRYSARAYSMLRATIDDANLSRGERCVALLMLRDLDRAQQEILEWRREGSAEDGHLTEMLAAIPTGDEITDDGGDDDEDVGADVIDLALTDNLLGALAMAFLALERGDAELMGQAVDRVDIGREEAAGVSMVPQWWCHRLTAHLLRDLWDTSFHQRLPLSPNNLDNAEGWKQLRELFVASAIRRSRAEIELWPSQLDAVEQAISSNGNMVVSLPTSAGKTRVAELCILRALAKGERVVFVTPLRALSAQTEVSLQKTLAPLGKTVSSLYGSIGVSETDSSFFEDRDVIVATPEKLDFALRNDPSLLDDVGLVVLDEGHMIGLGEREIRYEVQIQRLLRRSDAGSRRIVCLSAVLPDGDQLDDFCNWLTGDAKDGLIRKNWRPTRLRYGEVTWRGTHARLDARIGDEAPWVENYISGFVPKGRRTQFPRDQRELCLATAWRSVEEGQSALIFCPLRRSVQPFAEAVVTLHRQGALRSLFKGDKAVLADALAIGAEWLSPNHDLLKCLELGVAVHHGALPTPYRKEVERLLREGILPVTISSPTLAQGLNLSASAVIFHGLKRNRKELASSEFRNIVGRAGRAYVDVEGLVLFPMYDNQMTGKAEWNALIANQAGHEMESGLLRLIFTLLARLALRTGDKSVKGLSEYVLNNTSAWDFVRLRAETAEAAAAGQVQWNSHLASLDTAILSLLSDGDVAEADLEDALDDVLNSSLFQRRLARRRANQHEVYRAVLLGRAKLIWANSTPKQRKGYFLSGVGLTTGKALDANSPKLNQLLVEANGAILSKDDIKAIKAITDFAKIVFAIVPFVPDNLPKNWKAILDAWLRGQALQSFVAEDQDSVLRFVEQGFVYMLPWAMESVRVRGMANGDILAPTKGLPDTTLEDMELGVAVAAVETGSLDVRAALIMRTGFASRSAAIKIIADMDPNFDSTQSLRRWLRIPEVRKATEDEAFPTPETHRLWLEYIQSVIRTSSARWSAEQEVCDVTWTDDAPSEGTPLRLIEDEEDSQTIVTDAEFRPLGTVARILSPGRCGLLRTTVMKGGKVALRYLGPDDLWAEV

SEQ ID NO: 54666 - protein, 274 aa, Dehalogenimonas lykanthroporepellens BL-DC-9
MPPRKILGDHPVPEVFGCYTVAEDGSTNSGVPHRSLAQDVDCRPETISQLRDALVKHHVSAAMIAQDRRKIKNLRALGYPIEDTNIRRFPTSDTTRKGNLAEVFLAEYICAASGANLPVYRLRYNPNVDQAMKGDDVLAFDFTSRRARIIIGEAKFRGTPSKKAIQDIVSGLVRSHQAGLPASLQFVADRLYEQNNIELADRVEDCSVKMAQGRLDLSYVGFLLSTDNSKSKVNQHTSAALRTLVMISLGIDSPGNLVEDCFNGIEELAHADPD

SEQ ID NO: 54667 - protein, 868 aa, Dehalogenimonas lykanthroporepellens BL-DC-9
MPIPTEKAREILQQHQAGHIENLFAQSSARYVLYEVGESEDNFPSFDAALTDKVTLSAYSILAAGVSLAEARLTDEAITAMEEAAALLINVHAPYAETELTSSFHVLIASMAFHASGQYSRAFVYIRKAELLTPLARIVASLIRKRPADVILEANQYLLADLSTMTDAWSLCDHAVTLSISRSTSLVLEYFATGNQQLLAASIENLNIAMELASDYDSPSHWWIARLLRLMISGNGQASLWHALPPYFPGDSSLLSRYIRLHAFASKSVTELWRSQLDAIPITLGQGRTGAVVNMRTSSGKTRVAELAILQTLHENPDAKILYLAPFRSLALEIEQTLGQIFDRCGFLVSHLYGGFRLSSADRQIAKDSTITIATPEKIRAILRSSPELLNDIRLIIIDEGHLIGADKRYVKNEIFIDHLRVLARSSACRILLLSAVLPNPDELAVWLTGDVGNVARSGWKPSSERFGILRWQGSSVRIDWKGDFASFNRQFIIASKCKRQYDHKLTRWKNRRSLFPQNKNEAVAASAVRLCSVGPVMIFSARANSIPGLAACVLTAIGENAEDHNWPKNEWNAFLATCQEELQDSAVELTAARKGIICHSNKLPSQVRMATERLMRSTSPKIIIASSTLAQGVNIGISSVIVATPYQTDQPIDHRDFWNICGRAGRAFVDGEGKVLYAIDETREDWQIRQDRELAAGYFNVSQSKPVESGLLFALGIIHQAAERAGIDFEDLMTMVAENDFSNLSEQVAAGCLEIMDLIDDGLLALHEDPEVNPNLENPEVWADTVFRSSLAAIQAPNSTFSIDADELIRFLAARAKKIVEMTPEPSQRKAYVASGLPVSVASNVYRDREQFLQYAQFLSDADKNLQ

SEQ ID NO: 54668 - protein, 237 aa, Microbacterium azadirachtae
MVHMVAPPATIGSGVDWAASQIPNQYTGPDRVAAILADLGKPAAAEYLEGKLPTSKRTRSGDLGEIIGAQYAALELGFRVVERLRWKDHREMSMRGDDLVGVRAATNGSLELLKGEAKSRATLGAATVTDADLALRRDRGRPSPHALSFVADRLHELGEHALANLVDDAQLTTGISQRQVVQLLFTFTGNDPRNLLRTNTTAYRGGVERLAVGLQVSEHQAFIANVYSKAIANARDN

SEQ ID NO: 54669 - protein, 1166 aa, Microbacterium azadirachtae
MPETIEDIEAAIEEATTPGFREQLLARGEARSMIWRDGVLPEDAPAFDQLLSYDLLSYGYSLLGLGLHLVEANGSQSLAQRAFEGAATAIESVIARGPNSRERGFHRVVAAAAYHLGSYSARAYSLLQTALDSGEVTTGERSLIHIIRRELDTLAALILSHRDEDAAADANLVETLRGLFEPTSDEDQDDESGDTDVIDVVDLALTDAFVGAISMALLAFERGEQALLDEALSTLQVGLGAASELNMVPQWWCHRLAIHLLRGLWEASFHRLLPDGPIDGDGGDWARLRATFIASLFRRRRSEIDLWPSQVAAAERVLNTSENLVLSLPTSAGKTRIAELCILACLAEGRRVVFVTPLRALSAQTETALQRTFTPLGKTVTSLYGAIGASSADEDLLRERDIIVATPEKLDFALRNDPTLLDDVGLVVLDEGHMIGADEREVRYEVQVQRLLRRGDAATRRIICLSAILPDGDEVEDFVNWLTDDQPDGLIASSWRPTKLRYGEVIWQGDRARLSVIVGDEEPFVPRFLEPVVPPIGRRTTPFPKDPQELTLATAWRLVDDGQTVLIFCPLKSSVNAFAKVIVDLHARGALRSVFEGDLGDLALAITIGEEWFGRDHPILACLRLGVAIHHGSLPAPYRREVERLLQRGALKVTVSSPTLAQGLNLSASALVMHSLWRNRELIKASEFRNIVGRAGRAFVDSVGLVVHPIFKDVSRGRRNWRQLVEDTALRDMESGLLQLVVNLFARMQAKHGLRDLDALLEYVAGTAAWDYPEVAAESDEEAAHSRTAWRSQLASLDNALLSLLNDSAVAEDGVEGALDDVLASSLWNRSLARRQEPVQTALRAGLTARARYLWSQSTAAQRRGYFLAGVGLETGRQLDEHASILEQYLRDADEGIRLGDPGAAIDALTSFARIAFGIHPFAPRALPPHWEGVLAGWLRGEDPSQIAGEEVTDTLEFIEDSLAYRLPWALEAVRVRATAHEEPVGDLWALLTDEHGLAVAAVETGTLNRSAALLMQAGFSSRAGALAAVTAGGGTFTTVSELHQWMNSEEVRRRAGDTHWPTVSSHDLWVGFIGRSTAAPERTWINTVEDTAVTWLPDHQPSSGTPYRAVSLANGETILQAADGRRAGLLEEPLNPNRRGLLTVTGASDANVVELRYRGPSDLHA

SEQ ID NO: 54670 - protein, 268 aa, Lachnospiraceae bacterium 1_1_57FAA
MEKPQYIDWIVEETGIVIKDDIPLKCYKIDYKDDESILDDWALHIRRNYIEDTELKEDADDNAMTVEQYLHDYVIPQKGEELGATVRSADITEILISDLLEFVHQYSVPRYKLKNRSGKNNSQQGTDVIAYKYKNEDKTPNDKDELVAAEVKATLSNMEYTPIKNAIIDSRKDEHRLARSVNYCRKRLKELGKIEEAEEVKRFLFKPDNNYRITYVAAGVSSRENVDDAIELGFSGEELEIRKNELIFYVHGQKLMELAHNIYQRCCK

SEQ ID NO: 54671 - protein, 1016 aa, Lachnospiraceae bacterium 1_1_57FAA
MIFGKNAGLMLKYQKAKAKMVEYDVSKQEYPHFPLNSNELSYPTTYVLSRYSECIIENNHDELKELELLLITTAEYYDSAFKSKDRPEYDWDFLLSGASAYFLRKDFGSAKVLAARVVDLIDEERSPQKLLTNIYNYLLGGVYLPYLRVIDTYERINNFFLDYFGKGKSLEALKSNLWVYRNEIYENGDPDSIFYVDILVAVIIVACENSSWSLLPSSSGILDEEWESYLQSKMSIKMLWPAQRLIAEKGLLRGESSIVQLPTGVGKTRSIELIIRAAFLSERANIAIIVAPLRALCNEITMDMYKAFGNDVTINQFSDVLQNDFWNLFSEDIKRQILICTPEKLSYVLHHDPFFLSAIDLFVFDEGHMFDDGGRGATYELLVTHIRQNITSEQQLVLLSAVLPNSGDIAQWLFEDRGCLATDDSIVSTPKSIGFSSTQRDIHFFSDDKSNEDYYIPRILRVEQLKKLPRERSNKYFPDLSLSTDVAIYNAIKLCHNGGVAIYLGQQRSMKTVFERIINLDKRNYDLKALKDNTNQAELSKIKGFIESYYGSEHYYTKAAELGVLPHSSNLQNGVKLVVEHALKNKYVSCVVCTSTLAQGVNIPIKYLLVTSIRNGLKLVKARDFQNLMGRTARAGIYTEGSIIITDCKIYDNRTNWKNGGRYLWNDCVKLFDTKLTEPCGSSILSLVQDFNIDYDVTVSGEKFIDIVIDHLDERDFLLDYAKKLEKAYLKVNPKRTQNLIVQEILLRQDIISNIENYLCLVRSAETLVNDSKKSAVDICTNTLAYAMATEKEKELLIKVFQKIEENIQQYSVEKLSRYSNAMSGIGLSSLIEEWIVQNELTEKIYTETELLYVITELYLQICGDFRYQEHIQSICKKWIDGQTPMEINNKETIGIAEVESLCNKRISYEMNFLIGNICDLIEVDGENEEQVDQRNILTLLQKKVKYGVPNMTAISICESVFNDRLLAIELAQILSDANIGTDKILNMLKAHSEEIFSCLDSYPEYFKDRLSVLMK

SEQ ID NO: 54672 - protein, 269 aa, Erysipelotrichaceae bacterium 3_1_53
MNRPKYIDWLVEETGITLEDGVPINCYRIDYQINNDILNEWALHLRKHYISDSELKDSTAGLEICVEEYLEKYVIPQKYDTGGPTARSNDITEILFSDLFEFILGYTVPRCKQENRSGKCLSEHGTDFLGYKFKVSADKPNKNDELVVAEVKAELTGEKCDSVINKAITDSKKDEHRCAHTLDFYRKRLKLLGNTKQASEIARFQMKSEDNYVITLIGASINSREKIENDIILGVKGSDLKILSNQKLFYIHGRKLMELAHNIYERCKI

SEQ ID NO: 54673 - protein, 984 aa, Erysipelotrichaceae bacterium 3_1_53
MRITNTSELMLKYQKAKAKLVEYGVKQEDYPNFQLNSNDLSFSTIYIISNYVEAIIDDDSEKIELFSEQLKLVSEYYDASIKSRDRNYYNEDFLMIGISAYLLSNDFGSATVLCSMLDDCKRRCGSQYILMSIYKYILLNKPLEKSESDFEEQIISDLRKYYKCKDINIEILMQKLSHYRIDVYNKGNALDVFYVDILIAVVMSIVDNSSRRLLPKYSGISLSIWKNYLEKNTSAKVLWPAQQMMGKNGLFYGKNAIVQLPTGVGKTKSIELIIRSAFLSQRASKVIIVAPLRSLCNEITNDMIDAFGDDVKVNQFSDVLQEDYEILSDDLFESSMNEIIISTPEKLRFVLCHDDEILDSMDLFIFDEAHMFDDNVRGVSYEFLMMEIRKRLNNDNQLILLSAVLSNSNEIKEWLLGNDGIVASNSEIKSTPKSIGFSSKDKTTYYYSETPNEYDYYIPKSISVEPLTLLPRERKPRFFPELDNPTDVAIYHAIRLCKNGGVAIYVNTTRSVRSVLKKFICIEQRGYDISNIQQVTDSEESIKLQKLMKIYYGEDHEFYKCAKYGVFPHYSNLPNGIKLCIEYAIRNKLISCLVCTTTLAQGVNLPIKYLFLTSVRTSQVTMQARNFQNLIGRTARAGMYTEGSIIFTDTKLYDKKDDNKQGGNYKWSECFDLFEASNSEPCNSSILRLVGNINANYQQHLKGKNFVEYICDNYLFDNYMEKIEMEIKESATKKEIKLMNFFFSELALRKELLESLESWLIYAFIADDNFNDNYYEKARQLAVDTLAYHLATEEERKLLLSVFEIVTTKIIENLNETELKLATKTNLSVDMYVRINKWIEENELLSNAISEDDLIILICNFLYKIKDINISIEQFIEVVESWVNGKSFYYINGETNISIDILETLCNSKISYDMSFLIGNIIDVLCEKEDSDDIIEILTQLQKKIKYGVNSQSAISICEIIFNDRLISLKIVEILNDINIKKIK

SEQ ID NO: 54674 - protein, 264 aa, Clostridium sp. 7_3_54FAA
MEYINGYREEQSLLTKDGKEIQVRCLEVSENDAVLDEWAAHFREQYRYLDALDMEREGTGLSREEFLRDYVFPGQAKPGPATRVGDFCEILVADYIEYIQSYYVPRIRYRSKFNRNTSPQGSDVLGFKLGTTPSPRDEAIIIEVKGTSDPKGKKEGYERLQEAIDHSNKDVARYAESLNAAKMRLIEINRPEEASIVARFQNMTDRPYVIKYGASAVLTNQKYNAIDMNKVTTVGHRETVELLVIHTQDLKGLINELYRRAALC

SEQ ID NO: 54675 - protein, 1048 aa, Clostridium sp. 7_3_54FAA
MLIENRSQYLLKKVRAKAKMYEYHIPSELHGKTESDANYLLILAIATIGDFSNDVIESYQTKEIDYTEHKKNLQFASVFFDAYLEAKMYEGDQKYYLLLGAVVYYLCDYNGSSKVLADKISDDINLEANGIDFVLSQILQGKLCIECFSEMLYLNEIVNAYNEFWSTGIVFDYKKLWQLKKFIYRYGTDRELLFTDALIATIFLKIEHSSYHLMPIYTQTDSDVWGDILRKKTLISELWQSQRQLGEAGVFSGKSATIQMPTSSGKTKSVALIILSAFLRKNSSYALVVAPFRSLCREITDELQKAFSYTSKIHVNEISDVMQMDMLDIILGNVPETEEKYVYVVTPEKLLFVLRQELMFLSNIDLIIFDEGHLFDDSNRGITYELLISTIKSYMKDKVQKILISAVIPNAEQVNGWLTDERGVVIKNNIIQTTEKVVAMADMKRNATSGERYANLYFVNPAEPDKEDFFVPKVIKQTMLFLRPRERKVRVFPEVNDNKYKNDVAIAFGIKLCPNGSIAIFCGKKDTAEKILNRILEIKERGIDVSNLLESADKAEIDKLCYLIDKGLGNDNDYYKAAKVGAFVHHGGIPMGIRCAVEYAMQTGKISFLACTSTLAQGVNLPIRYLIVSNIYQGKDRIRVRDFQNLIGRAGRAGIYTEGTIILSETNVYNTRNNPYHNWRWNNYKRILDSDQAEACTSTLFAWLRADEGMEVYLEKMIEIFMESYANGDFNEKMEQYLKEQQFEEENHKKAEFMMYQMKQNIEAIESFLLFYLMEDTYEESREDIHNIMKETLAFYLAGNKERIRLLRIVDLIGEFLVHAVDTVDKRSRYSKSLLGVRKEIEIEQWVSSNYSIILEAENEESIMQVVFPLLLRTENQIVRNCINSELLNGLAEEWIAGKTYSDLTEYVTEHRIMVYKRKHPKIMSLQDVITFCDNFLGYDCTLILAAVIENVMYLGGDNKINNILKMLSKRMRYGLAGQTNILLYEMGFNDRGIAMKVGNMLEEVYQPGNRKELIRLIRKNKELNEKIRLELEKYPSYFCDKWEELHR

SEQ ID NO: 54676 - protein, 268 aa, Lachnospiraceae bacterium 8_1_57FAA; identical to SEQ ID NO: 54670

SEQ ID NO: 54677 - protein, 1016 aa, Lachnospiraceae bacterium 8_1_57FAA; identical to SEQ ID NO: 54671

SEQ ID NO: 54678 - protein, 282 aa, Bilophila sp. 4_1_30
MPWTSEHTKWLVDTGERMKTADGKEVEVWEFHHKNDEAVLSAWAKHFRNHYCLDTEIDFLRGKRPRSDYLTNIKFPCRTSKLGPGIRAGDFGEILVSDYLQWILGYWVPRIRWSSKVVRDESPKGSDVIGFRFHKKDGEVSTKDVLVVFEAKTKFSGSKINRLQDAINDSAKDHIRIDESLNFIKQKLFEKKEIEQAQRIERFQSPVDIPYKEIYGAAAIISDECFDAEELASADCRKITNSSTSQEIFPHPNGDSLVLLVIKGPSMMALVHELYRRAADEA

SEQ ID NO: 54679 - protein, 1039 aa, Bilophila sp. 4_1_30
MRPEQKSQLLLGVTRAKSKMLEYSVPRDYHIKITQDPAKLFTISIALLGDLAAAINRNEPDPDSLSEMRTSLLFSARFFDSYLQSKLNEILDPYLVLLGSASYYLCDLPGSASVLAKRIDGDCRDLGGNGLENLLLWLLQANLGASFDGSEGPFGGFIDGISNWLLQFFKDGNGEKNLLDLTTKLRNAVYEFGTPRQLLFGDVIAAVLRKKLENSTWKALPSYSGLPRDKWLHALQKDSFIKELWPAQHLLGQANVLKGESAIVQMPTSAGKTKATELILRSAFLAERVSLAIIIAPFRALCHEIKNSLVEAFHNEPIKVDELSDALQTDFEIAELVEHQQILVVTPEKLLYVLRHTPELAAHVGLLVFDEGHQFDSGTRGITYELLLTSLRSMIPEGTQKVLISAVISNAEAVGEWLNGEPNVVEGTTLIPTFRSVGFASWLDQLGRIEYVDSRDAEQGEFFVPRVIERFNLGKKKRERTDRFFPEKTDGQAIALYLGLKLVPNGSIAVFCGKKSTAASVCEKAVDIIERGAPLALPSDFSDAQEVARLTHLHVKNLGAGAPASKSAAQGIFSHHGNTPHGIRLAVEHAMRDDLVRFVVCTSTLAQGVNLPIRYLIVTSIYQGTKRIKVRDFHNLIGRAGRAGMHTEGSILFADPVIFDKRKARNDKWRWDQVKELLEPRNSEPCISNLLSIFDPIKSDDEKYTITMEALDFANAYIDAPDQIADLAARIAARHGDKGFSRDGVERQIAWRISLICAVESFLLSHWDESEDGLSEADVTSLADGTLAFFLADDQKKEYLRALFQLLAGNISANITDPARRKIYGRTLYGIQDAQAIEGWVQTNADSLLSIVDETDALDLTWPLLIRHINSGVFTKFDKPEMLKETAHGWISGKPFSELLKIIRKRKAKMIWGTRRREFKIDHVVDVCEGALAYDGALVVGAVCEFIETIDQDGTGDLLNRLQLFQKRLKYGLPTETTIALYELGFSDRVIAQDLASSLSLDATQKKDLVKALKKDQDGARAIIKKYPSYFQKRMNELL

SEQ ID NO: 54680 - protein, 260 aa, Serpens flexibilis
MGLYKKWCKSTKKKDKRKHYWTYVEKDGGRDEIRDDLAETIRSHYDRLELIAEDVKRLGYKVASEILSAEMPQTAKGRSGDLGEILATELVEEEIGLRVPVRRLRYKDGRNMAMRGDDFIGAGYDGAGEKLWLLKGEAKSNKVLGKATVTSARKVLNRDNGRCTPDSLLFVANRLLESNDPDDNVLGRSLRDEVGLKSLRADRIDHMLFTVSGNGPHASLKEDLDATGTNRDHYVVNIHVEDHQDFIAAMYLEAEDLGDD

SEQ ID NO: 54681 - protein, 716 aa, Serpens flexibilis
METIDELTAFLTTATVDGILGRLLYRGAAWSLMRDEGVLPPNAPPLGATIETDLAEHGFALLRGAMALRAQAGASELTSKAFERAANAFEALVRNGDPEAPERGFRRTIAAAAYHLAGFSAVAYSLFNETADDLNTSPGETAIRHLILRDLDQLRGFAREWLGDAAHGGEQIAEALRGEDPDVDEVLSTILNTTICRALAFFDFALETGEPEPIESARALLATAVSLAGNAENVPLWWISNLCHHLIDDLWQHSLHQNLPTEPPEGTEEKYPDLRRLFISSLYARKTSEVELWPSQREAAQRSTDVMDDLVVALPTSAGKTRVAEIATLMTLSSARRVLIVTPLRALSAQTERSFRKTFAPLGFSVSSLYGASGLSAGDEDALRTREIIIATPEKLDFALRSDPSLIDDVGLIVLDEGHMIGPSEREIRYETLVQRLLRRADAAERRIVCLSAILPSGDELDDLTAWIRSDEPGEPVRSDWRPTRQRFGALSWRGKDALLRLDLDDDGPFLDKFVVEKPARGRENKPYPRKNSHLALFAAWEFASQGKRTLIFSTQANWVESYGKQVVDLCKRGYLDSLLDDEASIARALEVGKEWLGEDHPAVASLKTGVAIHHGRLPSPFLRELEILLSEGVLKVIVASPTLSQGLNLNAAVLLVPALYRAGEKIKGEEFANVAGRAGRAFVDVEGLIVHVMFDRIDWRKREWRRLVASAKPEP

SEQ ID NO: 54682 - protein, 278 aa, Selenomonas sp. oral taxon 478
MCYSSHHIKWLVDTGERLSTVDEKEIEIWEFKHEDDDVILSAWATHFRNHYCLDTEIETRRGKETRSEFLRNACFPSETESFGSAIRAGDFGEILVADYLAYRLGYHVPRVRWMLKPTPNESTKGSDVIGFQFADDTGCSPNDELFIIEVKTRFSQSGGNSLQNAIDDSSKDDIRLAESLNLIRQKSIDHKHIDDANQVIRFQNPVDQEYQIKYGASFLVDIEYFDKANIPSSNCERIRTSKGIISHPHRDSLALLVIRGDNMMKLVHELYRRAADEA

SEQ ID NO: 54683 - protein, 1039 aa, Selenomonas sp. oral taxon 478
MRPEQKSVGLLGVTRSKGKMYEYGLPEKQHININEDPTRLFHISIALLGELAAAINRGAESPFSESELKKNLIFSAYFFDAYLQSKLNSAYDAYVLLLGAASYYLCDLPGSSSVLTQKLQNGEINLDAGGLENLLLFLLGGDWQIDIDENSTYGERIAAVIRGVRQFFQNGTGEKKLLEFAVNLRREVYESGTPRQLLFADVAIAVLQSKIERSTWKTLPAYSGLTLDTWRSILQKDSFIKELWPAQHLLGKKGVLQGASAVVQMPTSAGKTKSTELILRSAFLANRISLAVIIAPFRALCNEISGSLTAAFDGEAITVNELSDVLQIDYDNNDVTAKKTIMVATPEKMLYILRHEPALAQQIGLLIFDEGHLFDDETRGATYELLLTELLSLTSKDTQKVLISAVLNNAETIGEWLNGEANVVEGANLFPTSKSVGYVSWIGTLGQIQYFGNHRFGQYDYFVPLVICQVSLNKKERERKEQLFPDQKDNASDVALYLGLKLVSSGAVAVFSGRKDSIYKLCDRFIDIIERGFSLPSGISEESETVEVQRLERLHRENLGSDAPAVKCAKYGIFTHHGNMPHGIRSAIEYAMQHNMIRFVICTSTLAQGVNLPIRYLIAANMHQGKEIMRKPDFLNLIGRVGRAGMHTEGSIIFANPQIYDGRRNRHQKWRWEEVQTLLREGSSEPCSSNIMMLFSPIVSQDQKYELSTYGLDFVQRYIDAESQDAFVDETLLPYSNIENFPVSDMKYLLLKRIGILHVLESFLLSHSYNMEKGAGEEDVLRLVEGTLVYFLADDEEKENIRKVFQLLFRNIVKEVPQPERRAVYGKSLFGLREVQQIEQWVQLHEKDLRAAEQSSEILDILWSLFSQYIHANEFKTFDPSNLLKEVGQRWIQGGSFGTILSFVQKYDVRIGRRKITINHVVGLCENILSYEGMLIVSAVCEFLEMMNPTQNNEAIQRMRLFQKQLKYGLPKQTMIVLYELGFSDRVITQHIVEELQLTGITKHALMRELKEKSKSATDLMNKYPHYFQEQLKQHLEMV

SEQ ID NO: 54684 - protein, 272 aa, Amantichitinum ursilacus
MTSIPKHCSLLVKQQENLKTSDGKDIEIWCLEQPVDPLLLTEWARHFREHYCLDDEIDVMRDGTGLSRRDYLLELVFPDAKKSPGPSIRSGDFAEILVADYLEYFCQMWVPRFRYRNKSSPNESVKGADVLAFKINAEHTQEIDRLLVYEVKAQLSSTKYNARLQTAIDDSSKDCIRMGYTLNATKQRLKDMKDYAGVAKVARFQNKTDHPYVLESGAVALLSGISYCPEEIQKATQTGEHENQANLSLIVIRGTELMQLVHSLYELAANEA

SEQ ID NO: 54685 - protein, 1054 aa, Amantichitinum ursilacus
MKHSQASQDLYGITRSTGKKQELGIQDPEKLKAPAETKPEELFILTIGTLGDCANWICNNLEQGKGLEEKNLSELQFSARFFDAYLASNYNPLISHEVSLLASAAYYLASRPGSSLVLARRLSGHVFDSPLENFLLWILTSNWASVSNYLEGEYSEYLKEISLCVAKHFFFGENSSDALEALHELKSYIYQFGSAKEIFLIDVCLAITYMRLQYSSWNNLEDFTDLAIDAWRPIIGESGFPTELWPSQMMLGQAGIFRGSSGIVQMPTSAGKTRSIEIIIRSALLANRTKLVVVVAPFKALCHEITHSLRTAFLRDQISVNDVNDVFQMDYMEDISDWLQDESVEVEGIANSNILVLTPEKFLYILRQSPKIVDSVGLVIYDEGHQFDTGKRGVTYELLLTEISSILPISAQTVLISAVIENAEDILNWLIGEGGKIVRGNGLLPTSRSIAFARWAEEAGELLFYEGDRFSSPDYSLEQIIEPHRLTRGKGEKKDRQFPEKATPIDIGLFLGIRLVGHGAVAIFCGRPETAEKILNRAVEVYSRGLTLDAPASASDSSEISRLCHLISGHFGEGSDIYKAARLGFFSHHGNTPQGIRLSVEHAMQRGYIQYVVCTSTLAQGVNLPIRYLIVSGLYQAGEKIKPRDFQNLMGRAGRAGMHTEGLVIFSDPDVHESRYEKYQRWRFLTALELLNSDSKDTTGSSILSIVQPLKIRGGLLIPINPVELIDVILYERNRWREWVDQLISRLPIKNKNFNTKNLLGILSHRRNLISALESYMMANRGDGSFEEFQGDIAELAARSLAYSIASEEERVGIVGLFFAVAKYIENKEPDTGRQRLFSKTLMPIVDILQVEAWLNSNWDILLNCHDSATFLECLWPIFVSFGNNKLISNSNSGPFFFDVAKMWVSGEPYKKIFQLAKNVRPTKPWGEHGTRQVTEHDIIEFCEGTLGFDCPLVLAAVTELLFGENSSDLETAKPILFFHKALKYGLPDPLSISCFERGFSDRVLAQDLTMALRENGYALDFLISPLGKYEELITQLLSKYPRYFQNLLLAMNS

SEQ ID NO: 54686 - protein, 260 aa, Celeribacter baekdonensis B30
MSLYERWCDATREKDKRKYYWTYVEKHGGRDEIQGDLAETIRSHYDRLERIAEDVDRLGYKVAAEILSEAIPQTSKGRSGDLGEILATELVEEEIGLRVPVRRLRYKDGRNMAMRGDDFIGAGYDSKGEKLWLLKGEAKSNKVLGKATVTSARKVLNRDSGRCTPDSLLFVANRLLESNDPDDNALGRSLRDEVGLKSLRADRIDHMLFTVSGNGPHASLKQDLEATGANRDQYVVNIHVEDHQDFIAAMYQEAEDLGDD

SEQ ID NO: 54687 - protein, 1166 aa, Celeribacter baekdonensis B30
METIDELTAFLTDATVDGILGRLLYRGAAWSLMRENGVLPPNAPPLGATIETDLAEHGFALLRGAMALRAQAGTSDLTSKAFERSANAFEALVRNGDPESPDRGFRRTIAAAAYHLAGFSAVAYSLFNETAGDLNTSPGETAIQHLILRDLGQLRGFVREWLDNDDHKDEQIAEVLRGEEPDVDEALSTILNTTICRALAYFDFALETGETEPIETARAILDAAVSLADNAENVPLWWISNLCRHLIDDLWQHSLHENLPTEPPEGTEEKYPDLRRLFISSLYARKTSEVELWPSQREAARRSTDVTDDLVVALPTSAGKTRVAEIAALMTLSSARRVLIVTPLRALSAQTERSFRRTFAPLGFSVSSLYGASGLSAGDEDALRTREIIIATPEKLDFALRSDPSLIDDVGLIVLDEGHMIGPSEREIRYETLVQRLLRRSDAESRRIVCLSAILPSGEELDDLTAWIRSDEPGAPVLSDWRPTRQRFGTLTWRGQDALLRLDLNRNGPFIDKFVVQRPARGKEKLPYPRKTSHLTLFAAWEFAGQGKRTLIFSTQANWVEGFGKQVVDLCKRGYLGSLLEDEAPIARALEVGKEWLGESHPAVASLKVGVAIHHGRLPSPFLRELETLLSEGVLKVIVASPTLSQGLNLNAAVMLVPYLVRRGEKIKGEEFANVAGRAGRAFVDVEGLIVHVMFDKIKWREREWRELVASAKARTLKSGLIQIVAEILERLAREGVLERDDAWEYLANAREAWRSPAEEAAVAERLAAGAEYDADDGEDEGGDDEGETIDEEPLSQIVERLDATVFGLIEALDSDRADLPTLLDEALKGSLWARQIAREDEDIAPWHKKVFEARAELIWKSTTTEARRGHFAMGVGLEAGLAIDAMADELADLLDQADAAALSGDVGELVDALSGLGERLLFMRPFIPDKTNALPANWKDILRRWVSGDDVANIGPQNMRAVEEAFTYRLVWALEAVRTRRMSLGWSPETVVGGAAAAVETGVPQFMMSMLIRAGLPSRRAAMAAIEDAEPAFVTPAEMRAWLESDEITAYTDAGDWPTPDTAALWARFRTEALSGGIQKWSVEHYKRLLDTATAPPAGLYRIVTDDGDGRTWMATPDYQRVAAFKKSALDPKPSLFSGRLPGNTRLVEALRVGRGKLRWPRANT

SEQ ID NO: 54688 - protein, 148 aa, Pusillimonas sp. T7-7
MAMRGDDVIGMLLDPATQRLCFLKTEAKSRINLRAQTLEEARSGLDKDGGLPSSHALSFISARLMELGIDAPLVDAIDEALYRHGIPPESVKHLLFTFSGNSPQALLTQALQAYPGPIGQFGIGLYVDGHAAFVGAVYERVIADANHP

SEQ ID NO: 54689 - protein, 1026 aa, Pusillimonas sp. T7-7
MRRDINALRGRVYAFRLDGRGSDAAIKALFQQRLTEPVAVDAPEQDGKDFLFEGLDLALTDAFFGAFSMFLLALDRGEHALLDRAIAQLRENLDICGELNLLPQWWVHRIAIHLLSDLWSNTFHEKIPLLPAGGAAPSWPSLRELFIALLARRPRAEVDLWPSQTEAASRAVDQTDNLVVSLPTSAGKTRIAELSILRCLAGGRRVIFVTPLRALSAQTENTLQRTFGPLGKTISALYGSIGVSGFDEDAIRERDIVVATPEKLDFALRSDPSLLDDVGLLVFDEGHMIGPGEREVRYEVQIQRLLRRQDADQRRIVCLSAILPDGDQMEDFSAWLRRDQLGSPIKNDWRPTRLRFGEVTWNAPTARLNLRVGEERPFVPRFLTGTAPPLFVPPKRLRTRLFPDNQQELSLATAWRLVSDGQTVLIYCPERRSVEPFAKVIVDLHSRGALVSLLTVDPATLQTAVALGEEWLGPDSDILKCLQLGVALHHGALPTAYRKEVERLLRDGVLKITISSPTLAQGLNLSATAVVMHSLYRHGEKIKVSEFKNVIGRAGRAYVDVEGLVLYPIFEDARNRKHDNWVELIQDLGAREMESGLIQLIFSLLSRMHARLGGNLDQLIDYVVNNAAAWTFPEVAGEEADKRERALKEWERNMATLDTAILSLIGEADVPDDQIEAALDNILQSSLWQRRLLRVDDALRAAYRTTLLTRSRHIWMNSTAATRRGYFLAGLGLEAGHALDAIAPEANDLLIQANAALMASDHESAIAAITGIAERVFAFYPFEPDPLPANWRQVLRCWLLGQPLAAIIAGEEADALQFIEGGLVYRLPWAMEALRVRAAANGDVVGMFAQALDDYELGLAVQAVETGTMNRSASILIQAGFNSRLAAIKAVTDTAATFRTGAELRDWLRSPGLAAWSAQPNWPTAETRAIWLAFIQEFAPSDNLTWARRDYLGNVQWFAVPAPPGTPVSLFHWNGQPLVLAPDGHAIGLLQHPLNPNWRGVVRATVAMNNGQLDLSYLGPDDLWGG

SEQ ID NO: 54690 - protein, 259 aa, Paraburkholderia grimmiae
MAQFNDWCISVDQPVGNHHRRVMTGQAANLAVGIQATAAIVPGHYASEEQVARALARLGKPAAAALIESKLPTTKQIRSGDLGEIYATEWIDAHSGGYRAPIKRLRWKDHRNMAMRGDDVIGILQDPQSQRLQFLKTEAKSRSALTAQVLTEARAGLDKDGGLPSAHALHFISARLLELDNLPLADAIDDALLKHGIPPQSVRHLLFTFSGNAPDALLAASLQAYPGPINQWGIGLRVDGHGAFIGAVYDRVIADANNP

SEQ ID NO: 54691 - protein, 1173 aa, Paraburkholderia grimmiae
MPTTPEAIAADIAEAATAGFRGRLIARGQARAIIWRDGALPADAPAFAPQLSYDLHSYAYSLLGLGLRLRELGGDPTQARTAFEQAATALEAVMAKGNRQEIDRDFHFVMAAAAYHLAHLSARAYSLLAIVEADENFSPIERVLAQLMRRNFGVLRSSVLDYRVSGQGSDARIAADIQARLDQAEGVAAPPEAGGDDFLFDGLDTALTDAFMAAMSLYLVALDRGEQAFVEQALERLRVSLAICREMNMLPQWWAHRVAIHLLSDLWSSTFHERVPLQPAGGLAADWQRLRELFIALLQRRARAEIDLWPSQTEAAARAVDQSDDLVVSLPTSAGKTRIAELCILRCVAGGKRVVFVTPLRALSAQTETTLQRTFGPLGKTISALYGSIGVSGFDDDAIRERDIVVATPEKLDFALRNDPSLLDDVGLLVFDEGHMIGLNEREVRYEVQIQRLLRRADAQQRRIVCLSAILPDGEQLDDFAAWLRRDHPGGLIKNDWRPTRLRFGEVVWGSPTARLNLRVGEERPWVQRFLTGAAPPNWIPPKRRRTRLFPDDQRELCLATAWRLVDDGQTVLVFCPERRSVEPFADVIVDLHERGALRSLLDADPNVLRTAIALGEEWLGADSAILKCLRLGVALHHGALPTAYRKEVERLLRENVLKVTISSPTLAQGLNLSATAVVMYSLHRAGERIEISEFKNVIGRAGRAYVDVEGIVLFPMFDDIPKKRRNWEALITDLGAREMESGLVRLVAVLLTRMRARIGGDLNQLVDYVVNNAAAWTFPEIANEKPEDRERALADWERHVATLDTAILSLIGENDIPDEGIEAALDDILQSSLWHRRLQRQDAHVQQVLKAGLVSRSRLIWSQSTAARRRGYFLAGVGLTTGRALDAIAVDANLLLIQANGAILEGDAEAAITAITGLAERVFAFYPFTPDPLPANWRDILRAWLLGQPLAALGGAQPSETLQFVEGGLVYRLPWAMEAIRVRAAANGDTVGVFDLPLEDHELGLAVPAVETGTLNRSASILIQAGFNSRLAAIKAVADTGATFTTGQKLRQWLNSEPVAAWSALPDWPTLETKPIWAEFAQSFTPAEKRTWSDRRYWANVAWLGAPPLSGTAVQVHNWAGQPRVLSTDGTPLGTVQAALYPLRAGLLRAQVAQDVSKIDIAYLGPDDLAGP

SEQ ID NO: 54692 - protein, 260 aa, Paenirhodobacter enshiensis
MSLYERWCDATREKDKRKYYWTYVEKHGGRDEIQGDLAETIRSHYDRLERIAEDVDRLGYKVAAEILSEAMPQTSKGRSGDLGEILATELVEEEIGLRVPVRRLRYKDGRNMAMRGDDFIGAGYDSKGEKLWLLKGEAKSNKVLGKATVTSARKVLNRDSGRCTPDSLLFVANRLLESNDPDDNALGRSLRDEVGLKSLRADRIDHMLFTISGNGPHASLKQDLEATGTNRDQYVVNIHVKDHQDFIAAMYQEAEDLGDD

SEQ ID NO: 54693 - protein, 1166 aa, Paenirhodobacter enshiensis
METIDELTTFLTDATVDGILGRLLYRGAAWSLMRENGVLPPNAPPLGATIETDLAEHGFALLRGAMALRAQAGTSDLTSKAFERSANAFEALVRNGDPESHDRGFRRTIAAAAYHLAGFSAVAYSLFNETAGDLNTSPGETAIQHLILRDLGQLRGFVRDWLDNDDHKDEQIAEALRGEEPDVDEALSTILNTTICRALAYFDFALETGETEPIETARALLDVAVSLADNAENVPLWWISNLCRHLIDDLWQHSLHENLPTEPPEGTEEKYPDLRRLFISSLYARKTSEVELWPSQREAARRSTDVTDDLVVALPTSAGKTRVAEIAALMTLSSARRVLIVTPLRALSAQTERSFRKTFAPLGFSVSSLYGASGLSAGDEDALRTREIIIATPEKLDFALRSDPSLIDDVGLIVLDEGHMIGPSEREIRYETLVQRLLRRTDAESRRIVCLSAILPSGEELDDLTAWIRSDEPGAPVLSDWRPTRQRFGTLTWRGQDALLRLDLNRNGPFIDKFVVQKPARGKEKLPYPRKTSHLTLFAAWEFAGQGKRTLIFSTQANWVEGFGKQVVDLCKRGYLGSLLEDEAPIARALEVGKEWLGEDHPAVASLKVGVAIHHGRLPSPFLRELETLLSEGVLKVIVASPTLSQGLNLNAAVMLVPYLVRRGEKIKGEEFANVAGRAGRAFVDVEGLIVHVMFDKIRWREREWRELVASAKARTLKSGLIQIVAEILERLAREGVLERDDAWEYLANAREAWRSPAEEAAVAERLAAGAEYDADGGEDEGGDDEGETIDEEPLSQIVERLDATVFGLIEALDADRADLPTLLDEALKGSLWARQIAREDEDIAPLHKKVFEARAELIWKSTTTDARRGHFAMGVGLEAGLAIDAMADELADLLDQADAAALSGDVDELVDALCGLGERLLFMRPFIPDKTNALPTNWKDILRRWVSGDDVANIGPQNMRAVEEAFTYRLVWALEAVRTRRMSLGWSPETVVGGAAAAVETGVPQFMMSMLIRAGLPSRRAAMAAIEDAEPAFVTPAEMRAWLESDEITAYTDAGDWPPPDTAALWARFRTEALSGGIQKWSVEHYKRLLDTATAPPAGLYRIVTDDGDGRTWMATPDYQRVAAFKKSALDPKPSLFSGRLTGNTRLVEALRVGRGKLRWPRANT

SEQ ID NO: 54694 - protein, 274 aa, Coriobacteriaceae bacterium BV3Ac1
MANTAINQSNIRKLPRPCFVDWLVREDEVSIEGCSVECFRLEGAIDDAALVEWARHIRRHYIRDDELREYSEFFEIGENKYLRENVIPDVPQIMAGDFAEIVISDLVQFVEGYEVPRYKQHGRSDKNSSEHGTDIVAFKMENPSNPSKFDELLAIEVKSQSSSTDLKGAISDAAKDSPKDRSRIAMTLAYYGKRSLDAGDILTSSELKRFMNASEHPFKEAFAIGAIAGIGNAERHLEGLSASDLYVAEGGTVFVIHRSHLMDLIREIYDRCTS

SEQ ID NO: 54695 - protein, 1007 aa, Coriobacteriaceae bacterium BV3Ac1
MIYGERSDRELKYAKAQAKATEFFVDSSAIPDFGMNSDELHYSSILTLSSYVDARLSGNNGEGFLLDLKKTGAFYDAASNDGRNALFSDGYWTLAMATYFLLGNYGSSKVAAGKVKNADYYGTRAGTLHGFVSYLLNPGNPIPEELHILGQYLEGGDVDEADVIEEAASLLTDANPEDLFFGGVLYVSILDSLSFSTRSLLPAYTKIGLEEWKPYLAQASFPKLLWQAQQQIGRAGVFSGGNAFVQLPTGTGKTKSIELLLRSSILAGRSTLSVVVAPLRALCSEISRDLSIALRGIADVRQTSDVMEVDSWLEQSPSGPKVLVFTPEKLGYAIHHSAPLLDDAGLFVFDEAHLLDSVSRGPGYELLLTEIFRAKPDAQKVLISAVVSNADEIANWAFGDSSLLAVSENIQVTDKSVGFIQQKGKKVSYVEADDISNEDFFVRVDLTSQPLKRLGRETRQRYFPEMGNKNADYARDLAIYYANRLLPNGACAIYVPKKISIQPLFKRLDDLLHREANLPNLKSSASEEELERLSNLVCLHYGNDNGLSSGISAGVLPHYGDLQGAIRQSVEFAVERGLAKCIACTSTLAEGVNLPIKYLIVTGARRGNETPRTRDFQNLIGRTARSGKYSEGSILVAEDTGRASSNRMYSELMKESNTERCESAILNLFTDVFDREKNPRRALSGQSVLNTILEHIGDPQLEYELTNAFEINLECDRARARALSAMKVRPLEAIESYISGIMSSDGSEDDVMSICVSTFAYVSSDDEMKERLLKLFQAIYESLDAVNTDQASLCHLMQSGIRSAASLSGWIESKEGAEFLGGGCSDIDTVANAFLLPNPDAAHPLDSNMLAATTTLWIDGSDVSQITSYLNDTFRPSRKFRLTKVEGIVSGVIRFSLSHFISCLIDAIKQHPAFATEENLDNLCLLQRKVKYGVSNARAAMFCENVLDDRMIAKEVISILGESGSSDVDILRFEAIAHKADIAEYASCLPAYCAQRISKWIDPSVRD

SEQ ID NO: 54696 - protein, 122 aa, Rhizobium sp. CCGE 510
KSNKKLGKSTVTSARKVLDRDNGRCTPNSLLFVANRLLESADPADNALGRDLRDEVGLKSLRADRIDHMLLTVSGNGPHASLKEDFEAAGTNRDHYVVNIHIEDHQEFIAAIYEEAEDVGDA

SEQ ID NO: 54697 - protein, 89 aa, Rhizobium sp. CCGE 510
MATPEELTAFLTVATEDGILGRLLYRGAAWSLMRQAGILPDNAPPLGATIETDLAEHGFALLRGAMALRTQTGANELTSKAFERAANAF

SEQ ID NO: 54698 - protein, 276 aa, Pontibacter sp. BAB1700
MINEWLEYEELNPCPYKFKLINVSERKDIDEDVKSFLGKEIIESYRHLDFLKFMYEESSEQELIDYINKQVFSTDQHQLGKNVTQGDFGEILAYLIVTYFQGLTVPLRKMRWKFNKDKSVFSTDMVAHNSVAPLTDFYYYEIKTKLQLAKEYPVSGEPGQYITVIAHNSLLKEEQSPTYGIADFLLRLNYEKHDFEEATKWKDVVKNPNKYNRNYELFFVIEREKFLSNIITDLEDLPPSISPLNVTVVLIKNLGRLIVEMKKKAIDEAVNFVFEK

SEQ ID NO: 54699 - protein, 1134 aa, Pontibacter sp. BAB1700
MRKEEFIASIEANLEEVLNDYFYKNYKNQILARRLSVEFTKTYNEEFLWNRALFLSTSSCILLSENANRRLASRGLKESAEIYEYLGLISEEYDRDFSKILSSLSYDLAGYQANAQCLIRDILNYSLTSKEQHNLLQEDNYILSHITLILNKNIAKAKTLINRSESNKVGIKYFDEAISKWYNNILYFDENDFLSSINKSYQFFLDTRNIHISHLLFLLKARLEIYLERSIWENLRQDEGIRNSLIWKKYVKLLTHDLYTSSGIKEIDKRTSKFEFWISQLRAVQQQVLSDDNFVIQMPTSAGKTFIAEITILNSLIKHPDKKCIYIAPFRALTNEKEIELSNYLSKLGYSISSLSGSYEIDEFQQIILEDTDVLIATPEKIDLLFRLNPDYFDNVSLLVIDEGHIVGEISTRASLVEFLLIKIRIKVPEIKTLFISAVMPPTNADEYSLWLSNKKENVIRSLNDYDTPQDEQWEPTRKLIGSFTWEGDNGRITFADIETEDERTRVKRGAFVPAIIKKKQYASSFPNGTNKAQTSASLALELSKDGLCLVFCAQVANTKQVGEAFISILDKLEESGQQVPTSFVKNKERESYFFAAKWFPEDSYIPKCLERGIGIHFGDLPEQVRQSVETDYNSGNLKVLISTNTIGQGLNFPIKHLIIHSTLISHKIPLKVRDFWNIVGRAGRACKETEGQIIFVINSPTDRRAYNKYINKRNLEEAHSIFYKVLDERSKRLIDFDTLLHNIQILSEPYLLNLLIEESVETETELLVERIIDNSLFKIQAAERGTNIEPLQRSFRETITKIRDEVPAELLPVFGETGFSVESNKAIAGYIDANIEELKTKVQADDYLGLLESITKLFSEGKIYEVYIDKLKKAGLDAFKVIDTLKSWINGNDIKTVQEEWQKISDDQLLLNILLSQGFYYRYTWGITSFNTILTFKLGVSRDELPEGINNLQTFVKYGLNNSTACLARSLGIKNRDIALLLAEKSDGLSGRAFIKWLSNLTTEDVLSFQINQYDSKNVLYTAMTLSSNRGGNIPETFDFEIRGTAYEVDRRVSSLSVKVGENLTYSRDHSNSYDTYAITILKDNIQIGFVPREFSKLIAVEIDINEEEYNLLVTSVTSKTTYNSISVRMSKI

SEQ ID NO: 54700 - protein, 269 aa, Pantoea sp. GM01
MLPDHLKGLNLSPSGVMTVEGRTINVWDFIPPTDPAHLDSWALHFRRQYCSDQEIPVLLMGTGMTTEQYLNAYIFPDKTKAPGPSIRSGDFAEFLISDYLEFTLNLWVPREKYADKASNNESVKGVDIIGFHQLDITTPARTDALHAFEVKASLSGNAYGGQLQNAVNDGSNDQHIRLAVTLNATKRRFHREGKALEVNRISRFQNPADNPYTYLSGAVAVLCNTAFNEEELAETLAKAHSNAAALYLMVVRSDMQMQLVHELYERACK

SEQ ID NO: 54701 - protein, 1046 aa, Pantoea sp. GM01
MKAGSNSRRLFGITRSKGKMYEFGLDESQHLRVPEGSDPLQLFVMTIATLGDVTGVLAELPHPLTPLPPESQAELNFCASFFDAVLDSGFAQGLERTTLLLASAAYYVARRPGSSLVLARRIDYRAKGNKVEHFLQWLLKADWSTYWPLDDVRYGSLLTSISLSVITHFAEGTQLQHIESLLKILRSEVYKMGSAEELLYADVAISVCRMRLAASVWSTLPHYSGLSADYWRPVIQRGRFPKELWPSQLLLGASGIYRGASGLIQMPTSAGKTRSIELVLRSAFMSGRTRLAVVVAPFRALCHEIALSLRQDLAGDDIKVNELTDALQIDFVEQIAELLGSAPPSTSNVLVLTPEKFLYVLRQSPQVFKHVGLVVYDEGHQFDTGWRGITYELLLTEIKGLLSDTSQTLLISAVMQNPQAIASWLMGADKAQVIDGATLLPTSRSVAFASWTESLGQLMFHENGYDREDYFVPRIIKEAQLSGLKADSATFPTRAKSSDVSLYLGLRVAGKGSVAIFCGTKLIANGIAKRAVQIAEAGYNTIWPAAYADPEEVSALKTTIEGNFGSNALLFKAAELGIYTHHSNTPQGIRLALEHGMQQGLINFIACTSTLAQGVNLPIRYLIVQGVNQGAGLVKVRDFQNLIGRAGRAGMHTEGVVIFADSTVWDRRTSWQESWKFQNAVELLSPDRAEGVTSSLLLLLKPFALSRTQEWRFSGEYLLDLIDNEAEWERWAQHVANTVPRLIKKKKDELEKTLLRSLAERKKMTHTLESYLMANCATISTTAFEQRAGELARDTLAYSLASAEEAGKLEEYFRLVARRIESVESSPVKQAFFGKTLLGAKQTKRIETWSDEHRDMLLTLDSVDAWLTAVWPLLAELCDSRFFRNVEPVDAGFQLALLWMSGTSYGEIFREAVQMQVKKKAGKLKRKVSDDDIIQFLESSLAFDCSLILAALAQFLFTPEDLIGDPGASLAHFQKSLKYGLPDTLSMSAFEAGFADRFISQAIRDALLQKGYGGSSFNEAWKIHLSAIEQVIKATPAYFKYVLSSY

SEQ ID NO: 54702 - protein, 252 aa, Acinetobacter sp. NIPH 542
MIESLCEKTETTVDQHIFRVLVLQDSHFNTLRDLLISKLPEYYLASRSFQRTLNLLGQAAAYEKLKLKFPNSRQIRSGDVGEVISSIYIEEHLNYFLPIRKLQWRDHKDMAMRGDDVIALKFEEDNIKFIKCESKSAKSLSTATLVEAREELDSFDGRPSPHSIDFIIERSYEIGNDDIAQQLETFIYKKSIKNSDVKHLLFVLTKSNPNLLQKTAFDNYKGNYPQISIGLKVDKHAELINEIFFGLNKNYE

SEQ ID NO: 54703 - protein, 1151 aa, Acinetobacter sp. NIPH 542
MNNEQIDLLIKQNLEPDFKGRLLDRGLSRSMIWKDGILPENAPHFSEDLSYDLLTYGYALLSLAIKSTEKNGDVELRLQAFEKAAIALMVVVNNGEEDYTQRSFHILLSASAYHLAHYSAKAYSLLKKYNDLYAHNILEKALSFLITRDLKQLTQNIPIWKQENQKDLDRLANLEVDSKDSAMDSISANLNFINLSLINIYLESLYEFLDALEVGSGKVIENIEKNLSLNISISQEYNFLEEWWIFRITKYLLRDLWFQTYHHILPIRDNDTNWSKLRYKFIKNLLKKKNAEIDLWPSQIEGAKSAINDSENLIVSLPTSSGKTRIAELCILRALSQNKKVIFITPLRALSVQTEITLMNTFKDMDIKVSSLYGGQSLYGFQKNQFEDSEILIGTPEKLDFILKNDPVLLNDVGLVVLDEGHMLGLGGREIKFEVLVQNLLNRPDSNLRRIVCLSAILPSGSELDDFVDWISHPSEGKAISSDWRPTDLRFGEIYGTNESNSYRLDFTIGEQNPFIPKFIEKRLVRSRVNFPNNSQDLTLTAAHKYINDKQSILIYCPEKKSVNSLAKRLIKIHDLNYLNFDLGKIQSPYYFSALSQGEELLGENHIAILCLKLGIVIHHGGLPKDYRTAIELLIKHSRVSLIISSPTLAQGLNLQANIVLFNSIFRAGQLIPSSEFRNVIGRAGRSFVDLQGIVLFPNYGHILSKTKNWNSLIRDKDKLTLNSGLGLLIVQLILRIANSLKENNIYTIYEYIVNSNYAFDFPQVAFENQDAVTEANVKWKEYLGLLDYSIINLIGDEEVAIENVAEFVDILLKNSFLYKQIRHLSNEKQMLIKSFVQKRSEYLWKTTTYSSRQQLYFSGVSLDTINNNDKIINDILNKINEIDTLLIVDEFNYSILSKKLIQLAELVFSISEFTPKKIPEHWDKILYNWLNGLNYLVGFDVDVAVDFIEKNISYNFIMAIEFFKARCSLLSEYIIEQSTFDYISQVFEYGVLDRNALFLIGLGLKSRVKANEISRFINFPSAGKLLKWLNQADFDSFIDTFGQENTQILKNFASNIKNTLLEKEDRILRNIYVNWKEIDPLDYMFTNIKLLNIDSITYLISRKAQVVGSFNFNLNLDLMSEIFVYINSDFSVDIRYKCSPDDSLRIVKNR

SEQ ID NO: 54704 - protein, 263 aa, Paenibacillus sp. FSL H8-237
MPIINNYPSENHPFSMSLTCSNENATNGVPHRCLIENGHHDVFLDHMTVALQNHHISPEALERRRDLIESLRIIGAPMPLSPHPRNLSTQKGNFAEVFLAEYLCETTGAELPIYRLRYNPNIEQSMKGDDVLLFDLDSDPVRIIVGESKFRGVPDKQAVVDIVDGLVRSNKAGLPISLMFVAERLFEAGNSELAKKVQNCAILFVTNQLQIHYVGLLMSNHNTRRIVNTHASSELHNLLIISLNFESPETIVQQAFARLENNI

SEQ ID NO: 54705 - protein, 1108 aa, Paenibacillus sp. FSL H8-237
MSIPTDYAISLLRSLEQSRIENLVTQADARRILQEVRERSENYPNFDSALTEKATHIAYTLISCGCSLIENEDAETDEGLVVLEKGGKILSDVFKFNSDDIETKNYNLLIAGMSLYATKQYSRAFIILHDIDVDFIVGQIIINFIKKDFESMLQIVSNVLFTQAPTHLYLRDFDEWVISHEIARCFLIVADFIQTGNQENFTLIKDILEKLLAISSESALTLYWLIIRLLRIIFSTFQASSLWSILPPFLPERYITEKYIRLLSGFRSPVTEIWPSQTAALPLAVGDNRGAVINLRTSGGKTRVAEIAILRTLSTQLLSKVLYLAPFRSLAFEIEQSLNRTFGPLGITVSQLYGGSTANVTDFELINESQVIIATPEKAKALIRCGSGLEQEIKLIVVDEGHLLGAEERYIKNEMFLTHIKEFASRNQIKMLLLSAVLPNADDLAQWITSDSDLVARSDWKPALERLGLLLWDGKRVRLEWKSEGEPFNPNFIQKGPLGFGLRRNHFPNNKNEAVASTAVRLAQNGTVMIYSARANSINGLAGSVLLALGERPEDFLWDESLWKVFESICFEELGNNDIVLTAARKGVICHNNRLPTLVRIAIERLMRSKAPRIIIASSTLGQGVNVGISTVIVSTPYYSDKVISNRDFWNICGRAGRAFSDVEGKILYVIDTTKAQWQVNNDRRLAQNYFDNRQMEEVRSGLLAALMAICRNASRTGTDFTLLVETIANNFIEGNIREDFSKWLNYIFDFIDDELLAMHEDFSTDDADINWIDDVFRNSLALIQAESENEESYLALLKARTTALLRRIPNRTDRKKLISSGVPLSVSTAMLEDTDFFRNLATTFIQSSVGEHDDIEIIDSIIRELEIWSIQKAHNLMNFVPEQAVLDNIRRSWIRGDALATIMTFEPDAADISKDYYGFTLPWIIHAVSQLFDHETQENVVQLYTSLAMFVELGLPNNLAANIYLAGVRSRSAALEISTIEVFKNKSISEIKQTLLNFSTSDHALSDSSKVWIELLSESTKSQTPKRISFPHFTWKRHNLPDKLYLREVNGECFLTSSDGYFYEKVESTIDLPFSNIANIPGLFFVYENDKWLLRSYNLRIVVNAGD

SEQ ID NO: 54706 - protein, 147 aa, Bradyrhizobium sp. DFCI-1
MALRGDDFIGVRSSAEGHLFLLKGEAKSRANLAGATIIEARTALSRDSGRPTATSLLFIADRLMEGDGPLAALGRIIRNEVASRAVPSDRIDHALFTMSGNATPRALFDDLRGAGVDRSHTVIHLRIDDHQEFIRLSYEGALALGDG

SEQ ID NO: 54707 - protein, 400 aa, Bradyrhizobium sp. DFCI-1
METVDELAAFLTQATADGVRGRLQARGEARSIIRRDGVLPDDAPAFGETIDTDLSEYALSVLRASMALREGGGNDEIWRRGFARAGNAFEALVQNGSHEDVGRGFYRIAGAAAYHLASYSALAFSLISQRPENANLSPAEEALAHLILRDLAGLGRRARAWLLNPAHGDANISQALRAGEIDSDDAVRLIATSTIFRALAFFEFALQTGAAVLIEESRSLLRRAISLARNANAVSLWWTARIAFNLVDDLWSSSLHQVLPLDGPAGAGNYQDLRQLFIGELFGRDVAEVELWPSQIEAARRATDDRRSRRRVADQCWQDTNRRDRRIDGARGAQAGPHCNAASRIIRPDGTIIPSDVLEPWVLGLVALWRGWSRWRRRRRTPYAGYCHRHTGEAGLRLAE

SEQ ID NO: 54708 - protein, 266 aa, Lachnospiraceae bacterium M18-1
MKYVDWYENENILYTKDGKVISVLNLAAEENDEVLDEWAAHFRNNYRTLEDLDFDIEDTGKTREEFLINDVFPDTKIKPGPATRVGDFSELLVADYIEFVKKYYVPRTRYCRKTNRNMSTPGSDVLGFKLHGKQSPKDEVFVIEVKGMADPKSRKKGYQRLQDAIDHSKKDILRYAESLNAVKRKLKDFGQADKASLIGRFQNYADRPYVVRYGATAVLTSSKFIAKDMVNVVAKDHGGENLELMIIHNQNLKDLINELYRRAAKC

SEQ ID NO: 54709 - protein, 1052 aa, Lachnospiraceae bacterium M18-1
MLIEGTSRYYLKKIRAKAKMYEYHIPNELHSTTEEPVNQLIISAIAIIGDFSDIIISNIEGESFDYKDFQDNLRFAAKFFDGYVESKLYFGDQEYYLLLGAVVYYLCDHNGSSQVLCSRISFDIDLGVYGIDAVLTQILKGDKNVIYNGKYEIVSEICRSYNHFLENGIFDAYGELAVFRRYIYELGSDREVLFADALIAVIYLKIKNSAYELMPQYTAIEFETWKNVISQGTLVTELWQAQRELGKRGVFWGTSATIQMPTSSGKTKSIALIILSAFLSKRTNYAIVVAPFRSLCREITEELKKAFSFDDSIHVNELSDVLQMDFMDIILGNREMDGDKGVYIVTPEKLLFVLRQNIHILSNVGLMIFDEGHLFDDSSRGITYELLISTIKLYMTDETQKVLISAVIPNAEEINEWITDGQGEVIKSNAIQTTEKTVSIAEIKYNRENNKRYAYLYFVNPDNPDEEEFYVPRVITQVNIKLHKRETKERVFPEINNGKNTHKNDIALALAINLCINGGTAIFCGRKDTADGLLNRILDITNRGYDISNLIKCAEKEEVEKLSKLIAMNLGSDSIYFSAAKIGAFVHHGGIPMGIRCSVEYAMQMGLIGFLACTSTLAQGVNLPIRYLIIPTIYQGKDRIKVRDFQNLIGRAGRAGIYTEGNIILSETNVYRYKNVNYENWKWLNYKELLNSNQAEACTSELLSWIRADDEMEQYLNRIIEIFETHYASEDFAETVNSFLEDLKVEKEETYRKADFIVHQMLNNIEAIESFLLFYLMEDTYEEAKETIHEIIEETLAFHLAKENERERLLHITDLIGSFIVKVVNTSDKRNRYSKSLLGVRKEIEIEQWVQGHIFEICTCKNEEDILTMIFPLLLQTDNSLIRACNKPELLLEVGLNWIKGINYHDIHEAAIVSDIRILARNKYKLISINQTINLCDNYFGYDCILTLAAIIENVSYSCDDMDLDYNFKMLSKRLKYGLQNQCAITIYEMGFSDRFVAGVLSDIIESEYKAGSRKEILRLIKQNENVQNEVLSFLEEYPAYFEDKIRSMIEN

SEQ ID NO: 54710 - protein, 268 aa, Clostridium sp. CAG:349
MNKPRYIDWLVEEKGLVVQGGHEVRSYRIDYTDDSAVIDDWALHIRRNYIKDEDLNESAQLNGLTVEQYLKTYIIPQKNEPLGATARSGDIAEIVVSDLLEFIMGYTVPRCKQMNRSGKNNSEHGTDIIGYKFYKPDKSPNERDELIATEVKAKLTSEDYDSLARAIKHSGKDEDRLARTIDYCRKKLRCQNDSKYSEEVARFLIKPENNYKIIYCAAGISSRTSIDESITLSIDGEELKISDGQAIFFIHGKKLMDLVHKVYERCIR

SEQ ID NO: 54711 - protein, 1010 aa, Clostridium sp. CAG:349
MIFAEKSQLMLKYQKAKAKLVEFDVAKEDYPHFPLNSNDLSFSSTYILSRYAESVIENDYNTKSELGVYVRNVAQYFDAAVGSKDRNKYDVDFLLSGATAYFFSNNFGSSKVLLRKALQKVDVTQKTAKAFLTRLLAFLFDNYPMEYMRNEDKYSLLNNAVKVYFETGENCQNIKMFSEQYRKDVYNKDDIDEVFFGDLSLAILFLSIEQSAWRLLPNYTELPSEKWRDYLRGKNGLKMLWPAQQLIGNSNILRGMNGIVQLPTGVGKTKSIELIIRSAFVEQRVSIVVIVAPLRALCNEITTDMIKTFGGEVKINQFSDVLQEDIAFFDDYLGKQIVVCTPEKLSYVMHHQKDIIDMVDLFVFDEAHMFDDGVRGAVYELLMTHIRSIIRKNQQIVLMSAVLPNADEIKEWLFGQDGVLATDPQISSTPKSIAFVSDSSDMFYFSDNPSKYDYYIPRIIKKKKLKKKSKERKDRFFPENSSIDIAIFNTLKLCRNGGVAIYVGRQSSIITVMKKIIELNSREFDLSPFLADVDSVQLEKLSNFFSEYYGSENTYTKCSRLGVVAHSSNIPNGLKLAVEYALKQKHIQIVVCTSTLAQGVNIPIRYLIVTTLRADREFMKIRNFQNLIGRTARSGIFTEGSIIITDPQIYDERKRGQGYYNWEMCSNMFNSNASEPCSSSILKLVQKIQVDYESSVPAENFVKYYIEHVEEEDVIDTLTQELIADFLKKYPEKKKHNIDEELRLRKNTLEAIESYLFLALENVEECDRFGVAKTVCRDTLAYSLASDQEKNMLETIFDAIVKKINRMVGADVSRYTFSMSGVELSKKISGWLSVADITTMLKTGEDCLTEIITFYKETFNLGKYKEQFDYLCRLWINGVLPKQMSDLTGIQVFDIDNICNKEISYELNFLIGNICDMLDNNVSTEFERLKDMLNILQKRVKYGVATKTAVSICETIFNDRVLATKLTNIIGDDNISSEKLLEDIKHNRKEIFSKLEQYPAYFEDRLKFLL

SEQ ID NO: 54712 - protein, 231 aa, Rhodopirellula europaea SH398
MLGLSIRRCYLSDHTLSALLDDNTSEQELIAACLPDRGATMAGDFGELLAYIFHLADNDALNLCGPKKWRIKIDRRKASPMSDVVHFALPTWPLASDDDQLLCSEVKVKSTKTKSRPISDALEDSRKDRASRLAKTLVWLRERTILGGDTDVNCDQLNRFIKAAENPAFSKSFNAVAVICNGLIEDELVADPPANDPHHQIVVIGVPELKETYQQVFEAVAQAGLPNGAVQ

SEQ ID NO: 54713 - protein, 426 aa, Rhodopirellula europaea SH398
MNDALAKWISDADRSCPLIVCTSTLAEGVNLPVRTLVLYSVVRRTGQGQTAMLLRDIKNLVGRAGRPGSNTKGLVICINESDWGTVQQIAEQATVEPVHGALAELLSTIIRTLARSTTINELTNDILEANSWLHALVDGVDATLIELAAQELGMEQLQELANEIAEKSFAATQADDSEIDLLKTVFQLRSEAIVQMQTSGKLAWVRSTGARPRMIRLVEEGLLPLVEDWTALSGTLNTEAVDALLNWSFTLGEVDAKLREAYRIEEGDATSTVHEPFRHFVKLWLQGDRFVEIASQLSIEVNQVLRIYSGAFAYAFQTVAEQGIVVLSELLESRLEILPESVTMLPEYLRHGVPDESSLRFSMSGVRHRRAAIDLGSQFSVPAGDQRGAFEIASAEVNSDYSNWLSEWGELMLTNTLSDLDDILDS

SEQ ID NO: 54714 - protein, 252 aa, Rhodopirellula sallentina SM41
MTAFLKKWMNVSQPLDDCAELVVLTEQPAARKAIEKTLDLVVKDHFADLDIIHRIGGYRKSLAYVRNKLPTKKKVRSGDFGELMTSEYIDQYTEYSVPIKKLRWKDDRNTTLRGNDVLAIQRLTRGSKILKAESKSRLSLNNVTVTEALEGLDGDGGRPNPSSLAFISSRLRELGRDDEAEAFEKLQQRLMPPSKVRHLLFTLSGNAPLNFLSKAIVDSSHPYKRDIVGCVIEDHQEFIADVFDRNYGRRSK

SEQ ID NO: 54715 - protein, 1133 aa, Rhodopirellula sallentina SM41
MAEDPNDLARQIETLVQPGFREQLLARGLARGLIWQDGELPSDAPSFAPSLTTDLLDHGFQLLAQSLRLRDVGQFPDVVRRGLSAAAESLESAARREATSSTNRGFYLVMAAGAFHIGGYAARAYSLFSGELETLNLASYERCLVQLMRRDLNGVRDTVFQWMNNRENDDASVQRRLETDDDFGAGDLLAIALTRLFLKAIASFEFALLTGRATYHERAMGFLRDGSKASAESNHVPLWWSFTVARHLLDDLWDNSLHNRLPVGGGSPEWPRLRRKMIDLLASRSVAEVDLWPSQLQAAGRVVDTEDDLVIALPTSAGKTRIAELCILRCLADGLRVVYVTPLRALSAQVEHGLARTFRPLGFSVTSVYGASGIANADIDTLRSAAIVVATPEKLDYAIRQEPDTIDDVGLIVLDEGHMIGLSEREIRYEMLVQRLLRRDDSSQRRLVCLSAVFSPGESFDDFTNWLRDDKPGTAIHSAWRPTRQRPGRLMWNGEVGRLELEVGDEKPFVPRFVQQQTPTVGKRRVLFPRDAGEFLVGATSAFLARGQNVLLYCPQRRYVESTAKAFIESHRQAFFAYDAGARFVDTIADAVRIGTEWLGANHIAVSSLKLGIAVHHGALPRQFLAEIEALLRQGVLRVVICSPTLAQGVDLNFSVLLFKSIYKMGRDPIDAKDFANVVGRVGRAFVDLDGLYVLPLFDQDVRKNSRSQRDFRALISKAKSRLLESGVRLLVGHIIDVLQSRLGGDPQSVREYVLNQESTWEVEAREDEWEKWLDVALNELDTAILGVIDVLDLPTESLADYLDQCLQSSFWQRRLAKEPTELRELHGDVIRGRATWLWSNTNLASRRAFFSAGIGYKAGTEISQYLDDLQSNLAAAESLLGTNEIDTAVNHINFVAKILFGIHPFEPEKQEDNWETLLKHWVKGTALGEFADNTGIHFIQQDVVYRLVWGIETARSHLEFLSESKNDAPGALVAQCLTFGVPTQTSAFFMQAGLQSRTMATLMPTMIGMELSTFDELREWFGQYSSGALGELEWSSNDHQAEWKRFSQQFNHHDVRVLSNIVVKMAVTWDSKKPPRDRVRVRVKRDVGSEATVFSQAYRRLGSTKIPPSIKSDEFTGLVRNDGSKIAVRVFG

SEQ ID NO: 54716 - protein, 271 aa, Pseudomonas sp. FH1
MSFTVEHVQWLEDTGERVVSVCGKSIPIFKLSHDASNEKIMSAWARYFRNHYCSDEQIEYIKNPSKTNSEYLLTEKFPHEQNPPGPSIRAGDFAEILVADYLEFVRFYKVPRTRYERKIIANESSKGSDVIAFRKEPGVISATDELLIFEVKAKASENSKNNVLQTAIDDSVKDEMRIAESLNAMKQRLLDKYDLDGVQLVDRFQREPDHPFKRIYGAAAVVTETSFNSVIISGSTTAKHPKAQELELIVIRSVQLMPLVHALYKRAADEA

SEQ ID NO: 54717 - protein, 1036 aa, Pseudomonas sp. FH1
MKLETNSKILLDITRAKSKLYEFGIEEEYHLPLTDNPKKLLVFTIGILGELAALEARPADMRNGYRAELKEQLVLVGQYFDALSTSRLTPDIDAYLKMLGSASYYLADMPGSSLVLAKMLSDQPEQLSEGYLESFLIWLLKADVASVWYYLEGAPFNGELFEVLTIYKKFWAQGAQFRDVEIVAKKLRDKVYESGSDRELLLIDTIVSVMLRRISNSSIICLPKYTGLPSEIWGAALNGALFVKEFWPAQRLLGERGVLRGISAVVQMPTSAGKTKSAELIIRSSFLSGRSKLAVVIAPFRALCREISQNFERAFEGDSISVNELRDVTNVDEAEDSFLKFLLGDSFKGGKEYTVLVSTPEKMVYLLRHEPMLSSKIGLLIFDEGHQFDSGNRGVTYELLIASLKATVQYDAQKVLISAVMANAETIGEWLNGERGISIQGSKWLPSLKSVAFFSWRTEMGQLSYLSLDSFNDSGLYVPRIVQQINLGKRGRERSDRLFPDKSKPQTISTYLGLKLSAQGPVALFCGDKRSITSISKMLIEYYSRGLNLPAPRLSSDGEELDKIAFLATLHFGSDHVLPKAISMGLLPHSANIPNGIRIAVEWAMVNDKGSFVVCTSTLAQGVNLPIKYLIVSSTMQGGKKISTRDFQNLIGRAGRSGYHTEGSIIFADPKLYDERFTRDGRFRWAEALELLDFNNAEDCLSSLKELIKPFSAAYATDHLMAFLSNPAQHRMDWVNWAAQSGNDISILLDEMDDKQQIINSIESYFLSVLKDDPKLLKEDGVISLLHQTLAFHLANITERLALENIFKLLSERLFRLEEYKFSYYGKTLLGLDQLQYIDSWVDSASFELGLAETSNDLLDLSWGLIQLFARRKIVMNIQPPELVIELSKLWMAGNSYHELLAHARSSGGSCQAKTKILNITLDHIMDLTASLAYDGMLIVGGVADILEGRGFDEDRVRLMRSLQNMLKLGMSSEFQMWLYSKGFTDREVCRLLHKKIEDAGIIPDILDFNILKNNHELVSEVLSILPTVFSDVIIK

SEQ ID NO: 54718 - protein, 265 aa, Mesorhizobium sp. L103C119B0
MNWLVDTGERQATACGREIEIWELNPQDDAEILSNWARYFRKHYIADADLPFMAGGTGLDHADYLRTILFPDAKVAPGPSLRSGDFGEIIVADFIEYFLGYWCPRELRYQDRWNRNDSTKGCDVIGFKFANEDNPGPADELFIFESKSGMSATDANRLQDAIDDSIKDRLREGMSLNAIKRRFFDRGEMGDARKVERFQNQADRPFRRINGAAAILDEAVFAESDLAATDGAAHFNQENLRLLVIRGPSLMKLVHALYERAADEA

SEQ ID NO: 54719 - protein, 1039 aa, Mesorhizobium sp. L103C119B0
MRPEATALTILSTALARAKMHEFRVAPADFNALPRDPSMLFSLAIGILGDVAAAVADTLEGAAVAPAALPQPLGWGELDEDPQDVLRFASIFFDAYLNAQLDADLDTEFSLLCAAAYYITGNVGSATVIIRQMAAPDLDLAGGLGHLVYSILQNSFVPIQAPHAHQAVTSELLQALGGYFSFEAEAGGIAEVCRALREYFHQSGSPRELLYADIAGALCALKLRNAARTILPAASGLEPGVWRPALAKPHFPIELWPAQQRIADAGVFAGRSAVIQMPTSAGKTRATEIIIRSAFLSGRAHLVVIVAPYRSLCHDIRGDLVTAFAGENVRLDEASDAYQFDLALDALFAEDSVLIVTPEKLLYMLRRAPDLAERIGLVIYDEGHQFDGMTRGPTYELLLTSLRMSLPAETQIILISAVIGNAPDVAAWLIGDADAVVGAEGLLPTTKSIAFASWQDQRGRLEYVKPEDPAEREYFVPRIIGDIALPLRGKETAQRRFPEKTGGDVGLFLGLHVVRNGSVAIFCGRKDSVTKICSRAVEIIDRGVALEWPIETSDVAEVEKIRALCELELGAGASATRAAALGIFAHHADTPHGIRLAIEHAMKDGLAKFVICTSTLAQGVNFPLKYLIVTSTRQGGEQILVRDFHNLIGRAGRAGMHTEGSVIFSTPSIYDQRQQFRGQWTWNRAIELLDARNSEPSRSSILALFDAYQQRQPPIVQEIPPEWLDLAFADAARIDEVVAAALAAQPNISEREFRRFIESRARAVQNVAAFLVANMTFAEGEDAAARTGELAANTLAHHLADEETRVRLVEVFRSIGESIAANTDGDQRALIRRSPLPPAAVAELKTWLTDNLEILQTAVQENRLFAEISPLALRFATSRAIQAISVQDLLPRALQEWVAGRSYAVIFDTLAEAKVRVGRDHVTVEDAVALCEGGFGYDVAMIAASIADLTEELDDALHTNASLLQKQIKYGLTDRAAIAFHEAGFADRHVASLLGLVWGNVVDRGGVRAACQQEEIVRAVLAHIPSYFVRVAAELGGWA

SEQ ID NO: 54720 - protein, 271 aa, Mesorhizobium sp. LNJC384A00
MMAAPAHIGWLKKTATNVATTEGVEVEVWDLEHQPDDAVLSSWAKHFRQHYCKDEELPDFIEGTGHTPATYLATVKFPDPVHPPGPGTRSGDFGEILLADFAEYILGYWCPREGRYENRDNRNVPSNGCDVVAFKFHGDDPVHPKDELLLIESKAGLKAKKQNRLQNAVEDSIKDITREAMSLNAIKQRLLRTDRLAAKRVQRFQNQNDRPFKRVNAAGAVLDQDVFDSVDFTTTLAKHHPNFKNLKLLIIRGTSMMNLVHALYDRAANEA

SEQ ID NO: 54721 - protein, 1041 aa, Mesorhizobium sp. LNJC384A00
MRPKNNSIQLLASVRSRAKMHEFRAAEADYNEFTRAPDSLVVLAIGILGDSAAALADRFITSDTESAMPRSWDEPDGSIRDMVHFSARYFDAFLESRLDEDLTNEFSLLCATSYYLSDSIGSAAVVMKRTESPALELGHGLAFLAYRILKGLFAPVEESFAHRLFANRMLAALRAFYALQGGAEEIRLLCEELKAHAYLAGSARELLYADVVIALVSRKLDGAARTLLPPSSGLDLADWAPALRKGSFPTELWPAQRLLCEQGILSGRSAVIQMPTSAGKTRATEFLIRAHFLAQRSSLVVIVGPFRSLCHDIRSDLVRSFAGEDVLINEISDSYLFDIDLAGARRQNSVFVVTPEKLLYMLRRKPEFAEEVGLVVYDEGHQFDGLTRGPTYELLLASMRISLPTNAQVVLISAVIGNAAEIAGWLVGDETAVVSGSGLLPTARNIAFASWQFERAWLRYVSPADPNADEFFVPRIVESKVLAKKGRELKVKRFPERGTTRSNTDIGLFLGQHLAANGSVAIFCGKKESVGTVCDRAVEIAGRGLELDWPAACSDENEIRKIADLCQTHLGDGRVSKAAKLGILSHHANTPPGLRLSIEHAMKAGLARMVVCTSTLAQGVNFPIRYLVVTSTQQGKEEIAVRDFHNLMGRAGRAGMYTEGNVIFSAPSLYDDKKKDGRWRWSKTTRLLDADNSEPSASSILKLFVSFEQKVKGKPTITLDLPTEWLDLTFATKQTIAAYTAAAVSERPGLIGKDFSRFLSDRARAVQSIASYLLSYVDFESDLAEERVEELARSTLAYHLSDDDLRVKVLAVFQAAAKAVQQGTDLSLIKLVRKSPLPPADVKALAQWIDMHLDRLAAIETEEELLTAIMEKAARHAHAPVLAAVPEAMRPDCLADWIAGRTYYEIRARLTAAHVKFGNARATSEHVVHLCESGYAYDLSMVVAALADLVEERSEDLHARLVTVQKKIKYGLSSDAAIAFQEAGFADRVVAQALGDAFPVIDGYRDVVTACRTQRELVLATIEPFPRYFEEVALELSSGYD

SEQ ID NO: 54722 - protein, 264 aa, Salinispira pacifica
MKKTIIDLLYPYSGPSPIVDVEVYSIPQKCNVYLVDLLSGELSQCYISGTKLQTQQLRTGLSIREILKSVFPDRGSVMAGDFGEIFTLNYLSDYAHSEVHKVYKWRYKQDRNKPAPHTDVIVIFRDSDDTASANDYVLSAEAKVKSTNGNFSPIEASIEGAANDKTGRLARTLVWLKEQAIKHENKETIEYISRFTDQLLETSFKKKYRAVSLIDMNYIGQELAKDICVPEISDDFRVIAFGIHNLKQLYEETYSSPVEQDLHE

SEQ ID NO: 54723 - protein, 980 aa, Salinispira pacifica
MSKLLRNLMAEIESWESATEFGISESEWADYQVKKRSDDLYIALISMIFDQLNGRVDSASSVPLIDLAKALLVYSKSTAAKYITGVERDLNLLYCASVFYIAGYSATATYLVGYISKTDSLSEEEQIIVNFLNRDLDIDGTWYEKLNSHLEYSNPNALDELLLEFQANKKRGLETDPRLFIASSFMAEIISQFKKQSLVTTLVRNSSGFNYEKWAPLLSNHGSTFKLWELFPSQIKMLDSGVLYTENTIYSMQMPTSSGKTSLTEIIIYNEVKILNRRVLFLVPFRALASEIAIGITKRLSAAQVRVVASYGGNLPTKVQGLTLEDSDVLIITPEKFIALSQFEPGIGSGFDTIICDEGHLIDDNNRGFQYELLLTRLIKAENASKKVIFMSAILPNVNDIHKWLGGSSRTLVESHYKPVESDFAFIRRQDDRSWALDFNTIYERPKSYFILNFLTKEDFRYKNLATNRYRLLGNYSTNTSLACAVALKARKTGPVAVFTTMKGSNGINGLADTMINFHNLNVNIVSKPIDNTSKKLTLLCRYIELHFGSEYRLSKLLKFGIGFHHGDLPQEIRREIEDAIQSGIIQVLLCTSTLAEGVNLPIRTLIVHTIRRYDGNRLSPINNRNIKNIIGRVGRAGKETKGRIIVVNDNERNILENVFREQNMEPAKGALFKLVDIINTAINDFEIELNNDLLEAQDNSFLATLDRIDIALIEIMPMEMLNEGVEQFVDELVEKTLAYQFCSTIELQQRIKQIFNLRINYFHDTVPVEQRIGVKNSGSSPRFWSLVRDIEIDKNPIWRELDEVFSEEWMDEIIGSILDLTVMQLENESFIIRKVIESWMSGCTYYEIAEVINEDIETALKILSKDIGYSLLEALNRLIVLVSEIHEDMQVSEIAMNWGNLLQYGLGSLQQLDLFNFGASDRLAVWSISRFIEINDISYRGAELIQEIRIQSSSLIAFLSNDSRVPQLSINRIRAEIGF

SEQ ID NO: 54724 - protein, 279 aa, Enterobacter sp. MGH 22
MVTMNAGQPYSAWLKKAEHSITTSDGNEVEVYELEIDLEAGLVLSAWAKHFREHYCLDSQIDRLRRGTNKSRAEYLRDLVFPDESEDFGPATRSGDFAEILIADLLESHFGFWVPRTRYDNKMVRNESPKGTDVLAFKFDGIGPSRPSTKDILISFESKAQLSGKKAKPRLQDAVIDSIKDVYRISESLNAMKRRLIDRQDEEGADRVERFQEGLDVPYVRMTGAAAVFCSSLYDPVHISKTTDCTSHENIKNLMLVVIHAKSLMKFVHALYWRAENEA

SEQ ID NO: 54725 - protein, 1061 aa, Enterobacter sp. MGH 22
MKPKKRARYAAAVTLSKGKMFEYGVPEGDHIELPDDLNLEMQFPLAVGTVGDFASEVVAKTIGNSIEAQSQTPLDEVIFSAQVLQAFDDSLLNKELSFNLRILAAAGFYLGDVPGNAAVQLSKLSQLDFPKHDTLAIAVKTAMDRPWEHTNETLESSRAKDILDVLSQHFRNGLNGRQKAYDAIKSLREWAYSHASAHDLLMADLLGAISATRIANSAWTLLPRYSNLPQEKWDTYLSRSMSIKEMWPSQRLLGDAGLYKGTSGVVQMPTSAGKSRATELIIRSAFLSARTKLALVIAPFRALCQEIANDLEKAFKDDGYDVNQPSDALQPDVEFDFSNLSDFLDLESGIFDSEVESKPQVIILTPEKLLYILRQEPDIVQKAGLVVYDEGHQFDTGSRGVTYELLLTSIKRMLHENAQSVLISAVIQNAASVAAWLLNDGSKVVSSRALQASRLIAFASLPKGKDGQLQFNVASDSDQKFFVPRVIVSEKMPRLPKERKDRFFPTQESGSIALYLSLRLLKNGGVAIFTGRKSSAAKIVREAAEDIFRRGISLEPPSAHSDPNEIRRFVYLFERNFGANAYLTQAAALGIFAHHGNTPQGVRLAIEYAMRQSLIRLIICTSTLAQGVNLPIRYLLVTSAMQGRESIKVRDFHNLMGRAGRAGMYGEGTVIFTDPRLYDERFAKTYRWQETINLINPDSAEPTGSTLLSLFDPLRNDLGTVILSSPSSAEVATYIVNDWEALLKWVESVPINIPKQNFSVASLIEQLKSKKKIIEAVESFLMTYRSDVQPETFVDNSRELVTETLAYSLATEEQKILLTDIFESVARRIELFVPDTAIQKRFGRTLLGIDQALAIESWVTTNANALEGATSADHLFDMLWPLLVLLSNEKRLSDIVPNGALKKLALGWLAGDSFAALVQRLDKLGASYPYGANQRKFDLDVVVDLCEQTFGFEFALLLAAVKESFLAFSSEHAGEVFREYVDLLQKRLKYGLPNQSCIAFFEAGFAERVIAQCLAEGTTQGAIQVSFDARHMIRQNPERFEVMLQGFPSYFFDVFKTITAP

SEQ ID NO: 54726 - protein, 259 aa, Agrobacterium sp. JL28; identical to SEQ ID NO: 52926

SEQ ID NO: 54727 - protein, 1172 aa, Agrobacterium sp. JL28; identical to SEQ ID NO: 52927

SEQ ID NO: 54728 - protein, 194 aa, Alcanivorax sp. PN-3
MIEGKLPTTKAIRSGDLGEIFATEWIDAHSGGYHAPIKRLRWKDHRNMAMRGEDVIGILQDPQTQLLHFLKTEAKSRATLTAQVVSEARANLDKDGGLPSGHALSFISARLLELGNEPLADAIDDALLKYGILPANVRHLLFTFSGNSPEAMLTASLQAYPGAFSQWGIGLHVDGHAAFIGAIYDQVIANANDA

SEQ ID NO: 54729 - protein, 1172 aa, Alcanivorax sp. PN-3
MPTTPEAIIADITEAAAAGFRGRLIARGQARAIIWRDGVLPPDAPAFAPQLSYDLHSYGYALLGLGLRLRELGGDAAQARIAFEQAATALEAVIAKGNREEVDRDFHFVMAAASYHLAHLSARAYSLLAIVENDENFSLIERVLARLMRRDLGALRASVLDHRASGEGSDDRIAAAIQAHLNEAEDGVNPVDSGNDFLFESLDTALTDSFLAAMSLFLLAVERGERPLLDQAIGRLRESLTICSELNMLPQWWVHRIAIHLLSDLWSTTFHERVPLQPAGGDAADWSRLRELFIALLQRRPKAEVDLWPSQIEAATRAVDQSDDLVVSLPTSAGKTRIAELCILRCLAGGKRVVFITPLRALSAQTETTLQRTFGPLGKTISALYGSIGVSGFDEDAIKERDIVVATPEKLDFALRNDPSLLNDVGLLIFDEGHMIGLNEREVRYEVQIQRLLRRPDAHERRIVCLSAILPDGDQLDDFAAWLRRDHPGGLVRNDWRPTRLRFGEVLWTSPTARLNLRIGEERPWVQRFLIGAAPPNWIPPKRQRKRLFPDNQRELCLATAWRLIEDGQTVLIFCPERRSVEPFADVIVDLHERGALRSLLEADPAVLNTAIALGEEWLGQNSMILKCLRLGVALHHGALPTAYRKEVERLLRDNVLKVTISSPTLAQGLNLSATAVVMHSLHRNGEIIEVSEFKNVIGRAGRAYVDVEGIVLFPMFDEIAKKQRNWEALITDLGAREMESGLVRLVAALLSRMQARIGNDFNQLVDYVVNNAAAWTFPEVANEKPEDRERAHAEWERHVATLDTAILSLIGENDVPDEGVEAALDAILQSSLWHRRLLRQNEQVQQVLKAGLVSRSRFIWSHSTAARRRGYFLAGVGLASGHALDAIAADANLLLVQANGAILQSDTEEAIAAITALAERVFTFYPFTPDPIPANWRDVLRAWLLGQPLAGIAAGQESETLQFIEGGLVYRLPWAMEAIRVRATANGDTVGELDLPLEDHELGLAAPAVETGTLNRSASILIQAGFNSRLAAIKAVTDTGATFQTGQALRQWLNSEAVAAWSAQPDWPTAETKAIWTDFAQSFTPNENHTWADRRYWANVAWLGTPPPPGTPVQVYHGGSQPHVLAADGTPLGTVQAALNPGRAGLLRAQVAQDVSRIDITYLGPADLSGA

SEQ ID NO: 54730 - protein, 240 aa, Candidatus Contendobacter odensis Run_B_J11
MHTVPHRLLDDGPLQPDAFTAAMTQWIVNHHVKPEFIESDRRRREALARQGLVDPSRSRLPTADKTKKGNWAEILLAEYVAASCGAQLPVYRLRYNPNVDQSMKGDDVLAFDLDSDPARVLVGEAKFRTTPNKQVVEDLVGALVKSHSANIPASLQFVADMLFEARNNELGSKVASCNALFAQGRLQLDYVGLLVSSRDAHLHVQRNAKSSISRLAVISLGLGDPEGIVTASYAGARGLV

SEQ ID NO: 54731 - protein, 1116 aa, Candidatus Contendobacter odensis Run_B_J11
MSLPIANARLLVQSMRMPVIRNLIAQSKAKQVLREVREIPANFPNFAPELDDRVTFVAYGLLAAGCSLIEQGQTSEGHAELETAADILESAHQTEVANCETSALHCLIGAMAFYACGQYSRAFVLIGSVEELTPAAGIVASFLRKSRPRLISKLNAVLLAPSPSFDNSSQFDDWALTICVARSVALVAEHAISGEPELLANADVVLRDAMTISEGASHPTFWWLARLLRLMFKDYGNSSLWSVLPPFFGPDGIVHVDSYVKLLAFLKPPVIELWQSQTTALQLALNPKNKGGVINLRTSAGKTRVAELAILHTLSTDPSAKVLYLAPFRSLAFELEKTFARTLVPLGYSVSHLYGGSRFSGVDREMVNEGRITIATPEKAKAMLRAAPELFEAVKLIVIDEGHLLGGNERNVRNEMFLEHLRLLARQRGARILLLSAVLPNAEDLAAWVGGGVDALVKSNWKPSAERFGTLQWKASGVSIEWLGGERCFNPHFIEFKEVPKGKKGKRMFPESKTEGVAATAVRLAELGPVLVFTGQARWVPSMAKAILLAFGPDEPFYPWPATEWRLFEAVCKEELGDNPFELAAARVGVICHSNKLPPQIRISIEKLMAKCPPRIIVATTTLGQGVNIGISSVIVATTSIGQSKISKRDFWNICGRAGRAFVDSEGKVLFAIDMTGKPWQVRNAKAAAKEYFNAALLDKVDSGLLYVVGQIHKIAGEAGISFEVLLELAANDNFDRCGVKKDEVLGFLDWIDDQLLALHVAYKGDDPAMNIDWVDDTFRDSLAAIQESAKQEVGHEDQLMGFLKARVKGILLKVPTSEARRSVIASGLPLSVGVVAFDQLDVFRRMVDRYLGSEQNEMALSVLVLEFETWARQHAKTIVEKIPEQVTLDKIRPQWLEGASLRKIVETCGDESTDICTDLYGYQLPWLFHSIAQKLDKSVEETRVQILAKVGLLVELGLPTETAAKVFLAGVRSRTAAVELACFVTNPVASVSRIRNALLDSATVKALSALVSESTLEWLNLLSAEHSAPEVAPPQCTRFRLDAPGEVNTLHVRQQTPQGSIFLCSTDARFKYAVRATEEMPFDKFANNPRFIFARDSDAWIQQCRDPRIDGLSSG

SEQ ID NO: 54732 - protein, 272 aa, Salinivibrio sp. KP-1
MPWNSTHTKWLVDTGDRLKTADGKEVEVWEFRHQNDRKMLSAWATHFRNHYCFDNEIDYWRKGYKYTRSEYLDQIKFPDPKAAPGPSIRAGDFSEVLVADFLEYLKGYWVPRTRYGDKTVRNESTKGSDIIGFHIVKDGKFSSDDKLAIYEAKAQFSGKKPSARLQDAVNDSAKDITRKAESLNAIKQRLYNRSELDEASKIERFQNEVDHPYKEVYGAVALFDNPLFDGNLTSSTNATSHPYSANLALVVIKGDQMMALVHELYRRAADEA

SEQ ID NO: 54733 - protein, 1060 aa, Salinivibrio sp. KP-1
MRPEQKSQHLLGVARSKAKMLEYSVPEEHHIKITQDPAKLFSLSIGLLGDLAAAINRGESDSLADLKANLLFSARFFDSYLQSKLNETLDPYLMLLGSASYYLCDLPGSAAVLANHATELSSDEDPYSMGCFIRYLLAPDRFTPPDTHVGNFDGYFFDRYRLISYDYKSLFINSSLDDFDFNVIRKRMIDRAKDIRNVSYKIGGERQLLFSDIVCAIIITKIRNSAWECLPKYSGLNLNVWYPAILKPGAIKEFWPAQHLLGQADVLKGESAIVQMPTSAGKTKATELILRSAFLAERASLSIIIAPFRALCHEIKNSLVEAFHNEPTKVDELSDALQTDFEIAEFLGHQQILVVTPEKLLYVLRHSSELAAHVGLLVFDEGHQFDSGTRGITYELLLTSLRSMIREGTQKVLISAVISNAQAVGEWLNGEPNVVEGMTLIPTFRSVGFASWLDQLGSIEYVDSRDAEQGEFFVPRVIERFNLGRKKGERTERFFPEQALKPNGKPNPDFGKTVALYLGLKLTPNGSIAVFCGRKSTAAGICKKAVDIIERGVPLALPSDFSDAQEVARLTHLHVENLGASAPASQSAAYGIFSHHGNTPHGIRLAVERAMRDNLVRFVVCTSTLAQGVNLPIRYLIVTSVYQGMERIKVRDFQNLIGRAGRAGMHTEGSILFADPVIYDKRKALNEKWRWNQVKELLEPRNSEPCVSNLLSIFDPIQSDDEKYTITMEALDFAKAYIKDPDEVAKLAAEIAAQHKDKKFSQDGVERQVAWRISLISAIESFLLSHWDESEGGLSEVDVTSLAEGTLAFSLADDQKKEHIRELFQLLAGNISANITDPTRRKIYGRTLYGLQDAQAIEGWVQSNADSLLAIVDEEEALDLSWPLLTRHINGGVFTKFDKPEVLKEISHEWISGKPFRDLLDIIRKRKAKMIWGTHRREFKIDDVVDVCEGTLAFDAALVVSAVCEFTATLNQAATSDLIYRLQLFQKRLKYGLPSETTIALYELGFSDRVIAQDLATSLNLDATQKTELVKALKKDRDRAKAMMEKYPKIFLVRMNEILG

SEQ ID NO: 54734 - protein, 266 aa, Dethiosulfatarculus sandiegensis
TTYLATTTRERLQTTDGKEVEIWNFQHQEDEEVLSEWAKHFRNHYCFDSEIDYWRRGIKCSRSEYLNNIKFPDPKAAPGPSIRSGDFGEVLVADFLEYLLGYWVPRTRYGDKTIRNESTKGSDIIGFHIVTDGKASSQDQLAIFEAKAQFSGKKPKAKLQEAVDGSAKDINRKAESLNAIKQRLHNRNEFDEAVKIERFQNEIDYPYKEVYGAVALFDSALFDGGTNTSTDCSTHPYSDRLTLLIFKGDQMMPLVHELYRRAADEA

SEQ ID NO: 54735 - protein, 322 aa, Dethiosulfatarculus sandiegensis
MRPEQRSQKLLGVTRSKAKMYEYGVPEEHHISIPQDPAKLFSLTIGMLGDLAAAINREGIQPESIIELRDNLIFSARFFDSYLQSKLNESLDPYLVLLGSAAYYLCDLPGSSSVMSKWIDGDCPDLDGEGLEDLLLWLLQADLSTDFDIWDGPFREYIESISKMVVDFFEDGNDEENLIDWVSQLRKAVYEHGTPRQLLFGDVIAAVIRKKIENSSWKALPFYSELPRDKWQPAIQKDTFIKELWPAQHLLGQKDVLKGESAIVQMPTSAGKTRATELVIRSAFLANRTSLVIIIAPFRALCHEIKNSLLEAFRGESTKVDE

SEQ ID NO: 54736 - protein, 259 aa, Burkholderia jiangsuensis
MVQFNDWCDSADTPLGNHHVRVMRGRPADTATGVQLTATAIPSHYAAEERIARALARLGKIGAAKMVTGLLPQTPQIRSGDLGEIYATEWIDAHSGYRAPIKRLRWKDHRNMAMRGDDVIGMILDPETQRLRFLKTEAKSRIDLRAQTLEEARRGLNKDGGLPSSHALSFISARLMELDIDVPLVDAIDEALYRHGVATESVRHLLFTFSGNSPQALLTQALQAYPGPIEQWGVGLHVEGHAAFVGAVYDQVIANANNP

SEQ ID NO: 54737 - protein, 429 aa, Burkholderia jiangsuensis
MPTTPESIIAAITDAATAGFRGKLIARGQARAMIWRDGVLPPGAPDFSPQLSFDLHSYGYGLLGLGLRLLELGGDPSQARIAFEQAATALEAVMAKGNRAEPDRDFHFVMAAASYHLAQLSAQAFSLLAVVAAEDNFSPIEHALALLMRRDIKALRAQAYTFRLDGQGSDASIAALFHQRLTEPADRDRQDFLFEGLDLALTDAFFGAIATFLLALDRGERNLVDQAIAQLRDSLEICSDLNLLPQWWVHRVAIHLLHDLWSNTFHEKVPVLPAGGPANSWQGLRELFIALLARRPRAEVDLWPSQTEAASRAIDQSDNLVVSLPTSAGKTRIAELSILRCLAGGRRVMFVTPLRALSAQTEIVLQRTFGSLGKTISALYGSIGVSGFDEDVDCQLRWPPGRQLSWPVDGVSCRCSARHSCRSFRFGVG

SEQ ID NO: 54738 - protein, 270 aa, Bacillus sp. JCM 19047
MIRDWLRVKVRGKHIYKFNIIDATETDIRTDLTIPTWLAEEILLAYKDPGHLKRRYFNRKKEELNQYLTTHISPPLEKTLEKNVRRGDFGEIITSLILRDINSLETTLIKLRYKLNRKKSSFGIDVFGVQLDKNGQVCGLCICETKTKITYDKAIGIKAHDSLFSDDQSAIITISDFMSNLYYTSGNYDLSDQFDKIVLQKANFPTNHHIFLVHEKDKFNEEILDELDKFKDLQKGIHVNVLLIENLDALMHESHSLIPTVGERLVYGIT

SEQ ID NO: 54739 - protein, 673 aa, Bacillus sp. JCM 19047
MELHDYLIKKEYDITKLINSSNFKNQYGQFFARKMRADFQPTYEESNIWGYALFLSSTSAKVLINKQSEVCNQGLKIAAELFETFSIVSDEYDREYARILSALCYDLSGYQANAACILRSINYTLEEKSSNDTSINELLKNLVLLLKRQLQAIPITPLMDKNVVHSEIDNLNISWKNAVSKFKDYQLSGNFVDYEQDISEAVKSAISLKDATLTTILLLLKLKIEVSNKRSIWSVLSDEIYESPDTWKPYLNLLALNPYQDNKIVPPNKRLSQVELWKSQITAVRSGILKNNNGFIIQMPTSAGKTLIAELTILQQIGKNKKCLYIAPFRSLVNEIENTLNKHLSKLGYSVSSLTGSYEIDELDQFWMKEADVLVATSEKVDFLLRVQPDLFSDISLFVIDEGHVLGNLDSRSAQFELLLTRLKRWFTPKGCRFIFISAVMPDSDSSDFAKWLLTDENAKIQSPREYDGNMWQPTRRLLGYFSWDQQINFQNHVENSGQDIYIPNFISPLKWNTKKGKTKSFPQKLTQKAETTALLAYRYLREGSVLIYCATVGRNRGAGVYSVLKAFQRLIDTLDNEYASEFQLPIINDSEALEASIRWYGEDNLITKCIRRGIAPHFGDLADEVRRAVENDYTKKIIKILVATHTLGQGVNLPIKTLLVYSLDINANPKTV

SEQ ID NO: 54740 - protein, 258 aa, Burkholderia sp. K24
MAQFNDWCLAVDTPVGNHFIRVMTGQPERLPVGIQATAAIVPAHYASEEQVARALARLGKPAAAALIQGRLPTTKAIRSGDLGEIYATEWIDAHSGYRAPIKRLRWKDHRNMAMRGDDVIGILQDAQTQRLHFLKTEAKSRAALTAQVLTDARTALDKDGGLPSPHALSFISARLLELGNLPLADAVDDALLKHGIPAQNVRHLLFTFSGSSPDALLTAALQAYPGAINQWGVGLRVEGHAYFIGAVYDRVIADANNT

SEQ ID NO: 54741 - protein, 1170 aa, Burkholderia sp. K24
MPTTPEAIAADIAEAATAGFRGSLIARGQARAIIWRGGVLPPDAPAFAAQLSYDLHSYGYVLLGLGLRLRELGGSDAQARIAFEQAATALEAVIAKGNPDEADRDFHFVMAAASYHLAHLSARAYSLLAIVAADANFAPTERVLTLLMRRDFRTLLTTVLDFRASGEGSDTEIAARMQARLDRVGAWINLAGDGEDILLEGLDKALTDTFMAGMSLFLLALERGERALLDQALERFRTNLSVCSEMNMLPQWWVNRIAIHLLSDLWSSTFHERVPFQPAGGEAADWPALRVLFLALLQSRPKAEVDLWPSQIEAANRAVDQSDDLVVSLPTSAGKTRIAELCILRCLAGKKRVVFITPLRALSAQTEANLQRTFGPLGKTISALYGSIGVSGFDEDAIRERDIVVATPEKLDFALRNNPALLDDVGLLVFDEGHMIGLNEREVRYEVQIQRLLRRPDAHQRRIVCLSAILPDGDQLNDFAGWLRRDHPGGLIKNDWRPTRLRFGEVVWTSPTARLNLRVGDERPWVQRFLTGETPPNWIPPKRRRTTLFPKDQRELCLATAWRLIEDGQTVLIFCPERRSVEPFADVIVDLHERGALRSLLQADPAVLNTAIALGEEWLGPDSAILKCLRIGVALHHGALPTAYRKEVERLLRDNVLKVTISSPTLAQGLNLSATAVVMHSLHRNGERIEISEFKNVIGRAGRAYVDVEGIVLFPMFDEIAKKRRNWEALITDLGAREMESGLVRLVAALLTRMHARIGGDLNQLIEYVINNAAAWAFPEIANEEPEDRQRALADWERHIATLDTAILSLIGDNDIPDEGVEVALDDVLQSSLWHRRLLRQNEQTQQALKAGLLSRGRLIWSQSTTARRRGYFLAGVGLTTGHALDAIAEDANRLLIQANGAILQGDDEAAIAAVATLAERVFTFYPFTPDPMPANWLDILHAWLRGEPLAGIAAGQESDTLQFIEGGLVYRLPWAMEAIRVRAVANGDTVGGMPMDGYELRLAVAAVETGTLNRPATILIQAGFNSRLAAIKVATDTGATFQTAHELRHWLNSEALAAWRERPDWPTAETREMWIEFAQSFIPQTNRVWADRRYWAGVQWLGAPLPPGTPVQVHHWNGQLSVLAADGTPVGTLLHALNPRRAGLLLAQVAQDISRLDLRYLGPDDFVDI

SEQ ID NO: 54742 - protein, 281 aa, Bacillus sp. LF1
MNESISGQCVLIGEHPNKSIFAEWLSHEDLPILNNKIHRKLIETEGMREYAVEQISDWILTHHIADSTIARLKRKREMIVRKYGLNEYLNQQQMLPVAEKTMRGNGAEIVLAEYLQASTPLQLLLYKLRYNPNVSQSIKGDDVLLFNKENLADKVILGESKFRKTPNKAAVKEITDEFGKKLKLPLSILFVANRLSELGEEELADKLEELNIDVKQGKVPVVNVGFLLSNHNTATNVENHLNSENPSFIFLSLGLDKPEELISQSFALASEKLKRGIENED

SEQ ID NO: 54743 - protein, 1114 aa, Bacillus sp. LF1
MKIEKAEALLERLESDKLIQNYFAQSDSRYILFNVQEPFANFPNYSPDLDEKLTGIAMSYISIGCSFAENGSNSQSIFPLEKGAVILENIYSPIANRNEFSTYFILTSSLAFYAANQYSKSFILLKNISVDTIIAKLISLFLRRQYSELDKFLSEIFLSGEYSDKTISELDDEEFANNRVYVLILSKSLSSLLEFIFTGNELWLRKAKEYLKDLLELLEIDAEPSLWWVIRLFMLIVEGFQENSLWKAIPPYINGEDMTVRKYIASMAFQKSPVVEIFHSQKIALPVVLDDKGAVVSLPTSAGKTRIAEFAILDCLVKGYENKILYLAPFRSLAYEVEDSISKVFGPLGFEVSHLYGGSQFSKLDEMVINESNIIIATPEKAKAILRSNSEVKSNIKLVIIDEGHLIGPEERQVLSEVFIEELRIHLNRNQGKMILLSAVLPNSSEIASWISGNETMEVNSNWRPSSQRFGLLEYNGRNVNITWKGEIESFNRNFINPFIVKRARSEYRFPREKKQAVAAAALKLSNSGSVLVFVCRKNMVLSQAKEVILSMGENKEEHIWTSIDEWSVFKLACDEAYGEESKVYQCAKYGVLCHHSGLPTEVRLAMEKLIRKGNPKIIVATSTLGQGVNIGVSTVIFSNVWYDAENKISSNDFWNIAGRAGRSFVDREGKILFVVDASRGSSSWSARRDRRLALEYFESGNQDKAISGLLHIIDYIYRVAKATDVSFETLLQMIAENDYSSLKEKHTDDLLTLFDWIDDTLLALNLEFESYGCENSSEWIDDYFRHSLAYIQVKYFENLNKEDIISFLKARNKGVLNLAGEPQFWKGLVSSSIPIRSGLFIRNELPVVLEILEKYQKSNKAIEDLLVFLKDTEIFISRFPSKQFENNEIEDDVRELWITGQSISSLDERTLKNINEYFGYTLPWGIHAIARMLSELNNDEGAKEYETLAVLVQMGLPNLYAAKIHLAGIHSRVAATELGTALDSEYEELSVRRLKHYIIDSVGKLPGITENTHHWVSLLKSNETNITNEMVKIPNFIFEEGISVDSKVLNAKGYDGNTFLCSPDYSFIDKVEVNKEFPFDKVTNNFGVYFTSNNGEWKMQLRNPYLKYGLSNN

SEQ ID NO: 54744 - protein, 260 aa, Devosia sp. LC5
MGLYERWCESAKEEDERKRYWTYIEKDGGRDEIRESLAETIRSHYDRLERIAEDVERLGYKVAAKILSEAMPQTDRGRSGDLGEILATELVEEEIGLRVPVRRLRYKDGRNMAMRGDDFIGAGYDGKGEKLWLLKGEAKSNKKLGKSTVTSARKVLDRDNGRCTPDSLLFVANRLLESNDPDENALGRDLRDEVGLKSLRANRIDHMLFTVSGNGPHASLKDDLDAAGTNRDHYVVNIHVEDHQDFIAAMYQEAEDLGDA

SEQ ID NO: 54745 - protein, 1167 aa, Devosia sp. LC5
METPDELTAFLATATADGILGRLLYRGAAWSLMREAGVLPQNAPPLGATIETDLAEHGFALLRGAMALRAQTGASDLTNKAFERAANAFEAIVRNGDPEAPDRGFRRTIAAAAYHLSGFSAVAYSLFNETAEDLNTTPGETAIRHLILRDLDQLRSFVRHWLGDDAHGDEQMAEALGGEDPDIDEVLSTILNTTICRALAFFDFALETGEEEPIESARSLLATAVSLADNCGNVPLWWISNLCRHLIDDLWQHSLHQALPTAPPEGTEEKYPDLRRLFISSLYARKTSEVELWPSQREAAQRSTDVTDDLVVALPTSAGKTRVAEIAALMTLSAARRVLIVTPLRALSAQTERSFRKTFAPLGFSVSSLYGASGLSAGDEDALRTREIIIATPEKLDFALRSDPSLIDDVGLIVLDEGHMIGPSEREIRYETLVQRLLRRADAAERRIVCLSAILPSGDELDDLTAWIRSDEPGEPVRSDWRPTRQRFGALTWRGKHALLRLDLDEDGPFLDKFVLEKPARGKEKKPYPRKNSHLALFAAWEFASQGKRTLIFSTQANWVESYGKQVVDLCKRGYLDSLLDDEAPIARALEVGKEWLGEDHPAVASLKVGVAIHHGRLPSPFLRELEVLLSEGVLKVIVASPTLSQGLNLNAAVLLVPALYRAGEKIKGEEFANVAGRAGRAFVDVEGLIVHVMFDKTDWRKKEWRKLVASAKARTLKSGLIQIVAEILERLSREGVLDRDDAWEYLANAREAWKSPDEEAEVAKRLAAGVEYDGDDVDEDGEDDDEEETIDEEPLSQLVERLDATVFGLIEALDADRTDLPKLLDEALKGSLWARQIAREEEDVAPLHKKVFEARADLIWKTTTVQARRGHFAMGVGLEAGLSIDAMADELADLIDRADGAALNGDVDELADALGGLGGRLLFMRPFIPDKANALPANWKAILRAWVSGEEVSKIGPQNMRAVEEAFTYRLVWALEAVRTRRMSLGWSPDTVAGGAAAVVETGVPQFMMAMLIRAGLPSRRAAMAAIEDTKPVFVTPAEMRAWLESDEITAYTDAGDWPTPDTAALWARFRTEALSGGIQKWSVERYKRLLDTDVAPPAGLYRIVTDEGDGRTWLATPDYQRVAAFRKPAVDPKPSLFSGRLPGNTRLVEALRVGRGKLRWPPADA

SEQ ID NO: 54746 - protein, 259 aa, Pseudomonas sp. AAC
MAQFNDWCDSVDQPVGSHFRRVMTGQPANLPTGIEVTAAIVPGHYASEEHVARALARLGKPAAAALIQGKLPNTKAIRSGDLGEIYATEWIDACSGGYRAPIKRLRWKDHRNMAMRGDDVIGIRQDARTQQLHFLKTEAKSRAKLTAQVLAEARAGLDKDGGLPSAHALTFISERLLELNELPLADAIDDALLKHGIPIQNVQHLLFTFSGNAPEALLTAALQTYTGTIIQWGIGLHVNGHPAFIAAVYDRVIANVNNA

SEQ ID NO: 54747 - protein, 1180 aa, Pseudomonas sp. AAC
MSTTPEAIAADILDAATAGFRGRLIARGQARAIIWRDGELPPDAPAFAQQLSYDLHSYGYALLGLGLRLREFGGDPAQARIAFEQAGTALEAVIAKGNRQEVDRDFHFIMAAASYHLAHLSARAYSLLAIVEADENFSLTERVLALLMRRNLNALRSGVLNYRASEQGSDIRIAAEIKENLDQGEAAEGLADGGNDFLYNGLDTALTDAFMAAMSIFLLALERGERSLLDQALERLRKSLAICSELNMLPQWWGHRVAIHLLTDFWSNTFHEKVPLQPVGGEAADWPRLRELFIALLQRRPKAEVDLWPSQIEAAARAADQTDDLVVSLPTSAGKTRIAELCILRCLASGRRVAFITPLRALSAQTETTLQRTFGPLGKTISTLYGSIGVSGFDEDTIRERDIVVATPEKLDFALRSDPSLLNDVGLLVFDEGHMIGPNEREVRYEVQIQRLLRRPDAHERRIVCLSAILPDGDQLDDFAGWLRRDHPGGLIKHDWRPTRLRFGEVTWSSATSTARLDLRIGDERPWVQRFLTGVVPPNWVSPKRRRTKLFPCDQREMCIATAWRLVEDGQTVLIFCPERRSVEPYADVIVDLHERGALRSLLEAGPAALSVAIALGEEWLGPDSAILKCLRLGVALHHGALPTAYRKEVERLLRDNILKVTVSSPTLAQGLNLSATAVVMHSLHRAGERIEVSEFKNVVGRAGRAYVDVEGVVLFPIFDSIAKKRRNWVELISDLGARDMESGLVQLVGALLSRMHAHIGGDLNQLIEYVVNNAVAWAFPDVANEQPADREVALAKWERHVATLDTAILSLMGENDIPDDGIEVALDNILQSSLWHRRLLRQSEPVQQVLKATLVSRTRHIWNKSTAEQRRGYFLAGVGLETGHALDAIAAEANLLLVQANYCMLDADADADADADAEGAITAITRIAELVFAFNPFTPDPMPTNWRDILRTWLLGQPLAAIAAGQESETLQFIEGGVVYRLPWAMEAIRVRAVANGDTVYDVLLDDFELGLAVPAVETGTLNRSASILIQAGFNSRLAAIKAVADTDATFRTGHELRQWLNSAAIAAWSAQNDWPTAETKAMWTEFVQSLTPRENRTWTHRHYQANVQWFGAPPHPGTPVHIHDWVGQPLVLAADGAPLGTVQAVLNIARTGLARAQVARDVSKIDVVYLGPDDLSGA

SEQ ID NO: 54748 - protein, 260 aa, Bosea vaviloviae
MELYKKWCDVTRKKDKRKRYWTYVEKDGGRDEIRDDLSETIRSHYDRLERIAEDVDRLGYKVAAKILSEAMPQTPRGRSGDLGEILATELVEEEIGLRVPVRRLRYKDGRNMAMRGDDFIGAGYDEAGEKLWLLKGEAKSNKVLGKATVTSARKVLNRDNGRCTPDSLLFVANRLLESSDPDDNALGRSLRDQVGLKSLLADRIDHMLFTVSGNGPHASLKVDLDATGTNRDHYVVNIHVEDHQDFIAAMYQEAEDLGDD

SEQ ID NO: 54749 - protein, 1167 aa, Bosea vaviloviae
METIDELSAFLATATVDGILGRLLYRGAAWSLMREEGVLPANAPPLGATIETDLAEHGFALLRGAMALRAQAGASDLTSKAFERAANAFEALVRNGDPQSPDRGFRRTIAAAAYHLAGFSAVAYSLFNETADDLNASPSETAIRHLILRDLGQLRSFAREWLEDEAHGDEQIAAALTGDEPDVDEVLSTILNTTICRALAHFDFGLETGEAEPIERARELLGTAVSLADHAENVPLWWISNLCRHLINDLWRHSLHQNLPTEPPEGTEEKYPDLRRLFISSLYARKASEVELWPSQREAAQRSTDVTDDLVVALPTSAGKTRVAEIAALMTLSSARRVLIVTPLRALSAQTERSFRKTFAPLGFSVSSLYGASGLSAGDEDALRSREIIIATPEKLDFALRSDPSLIDDVGLIVLDEGHMIGPSEREIRYETLVQRLLRRADAADRRLVCLSAVLPSGDELDDLTAWIRSDEPGEPVRSDWRPTRQRFGALTWRGKDALLRLDLDDNGPFLDKFVVEKPARGKEKKPYPRKNSHLALFAAWEFASQGKRTLIFSTQANWVESYGKQVVDLCKRGYLDSLLEDEAAIARALEIGKEWLGEDHPAVACLKQGVAIHHGRLPSPFLRALEALLSDGVLRVIVASPTLSQGLNLNAAVLLVPALYRASEKIKGEEFANVAGRAGRAFVDVEGLIVHVMFDKLDWRKREWKRLVASAKARTLKSGLIQIVAEILDRLSREGVLDRDDAWEYLANAREAWRSPEEEAAVAERLAAGVEYEADGDDDDEGADDEEDAIDEEPLSQIVERLDATVFGLIEALDSDRADLPRLLDEALKGSLWARQIAREDEDIAPLHKKVFEARADLIWKTTTAQARRGHFAMGVGLEAGLAIDAMADELAALLDRADKAALSGYVDELSDALGVLGEHLLFMRPFIPDKANTLPANWKAILRSWVSGEDVAKIGPQNMRAVEKAFTYRLVWALEAVRTRRMSLGWSPETVAGGAAAAVETGVPQFMMSMLIRGGLPSRRAAMAAIEDAKPVFVTPAEMRAWLESDEITASTDAGDWPTPETAALWARFRTEALSGGIQKWSVEHYKRLLDIAAAPPAGLYRVVTDEGDGRTWLVTPDYQRVAAFKKPAVDPKPSLFSGRLPGNTRLVEASRVGRGKLDWPTADA

SEQ ID NO: 54750 - protein, 272 aa, Paenibacillus sp. FSL H7-0357
MVFTNVHLNWLQDTGLSLTTNEGKTITVLEFLHQPDETILSEWAKHFRNHYCLDNEIDFLRGGTGLDRKNYLVDIKFPSSRNAPGPSIRAGDFGEILSADYLEYILNYWVPRTRYSNKAVRNESTKGSDVLGFKFIHNNGESLEDTLAIFEAKTQFSGREPNPRLQDAVDGSAKDHARRAESLNAIKQRFLDKGIVGEALRIQRFQNIEDHPYKELYGAVAILSSNYYESNLLRATITNNHPNSVDLMLMVIKGEDLMPLVTELYRRAADEA

SEQ ID NO: 54751 - protein, 1039 aa, Paenibacillus sp. FSL H7-0357
MRPSKNSELLLGATRSKAKMFEYGVLEEHHIELPKDPARLFSLTIGLLGEYTARLNRRDITLEQESALKEDLHFAAYFFDSYLQSRLDLTLKPYLLLLGSASYYLCDLPGSSKVLAYKITDSPDLGAFGLENLLIWLLMGEYAEPLQIEGMYSAIIFLISEAFVLFWHNGRNTLDVERYCQELRESIYLNGTSRELLIADIIFSIVRKKVENSSWSSLPLYTNLSLDTWRSAIQKESFIKELWPAQHLLGLNGFFIGKSGVVQMPTSAGKTKSIEIIIRAAFITNRTSLAVIVAPFRALCQEINSDLHNAFIDENNILVNELTDVPLIDFSLDTSLNVKQILIVTPEKLLYILRHNPDISEDIGLIIYDEGHQFDNGSRGITYELLLTSLKHMISIETQMVLISAVISNADIIGEWLIGENSINVDGSHLTPTFRTFAFASWIHQLGRLEFVSNHNPEVGEFFVPRIIEPIQLNLIGRERSPRIFPNKEDSQSIALFLALKLVNNGTVAIFVGRKATAAKVGEKLTDIFRRGIPLISPKSLSDENEVIRLSNLIEHNMGSEAIETKCANLGVFIHHGNIPQGIRLATEFALKETMIKFVICTSTLAQGVNIPVRYLLITSLYQGNQKIKIRDFHNLIGRAGRSGMYTEGSIIFADPTVYDKRRSKKDRWRWSQATEALNPLNSEPCISTLFSLFDPIESDMKESRLVFNTSELVQIYYSSPSELDEWKRNIATDGFSLSSIESQVSNKFSIISSVESFIMTNWDSEDYEVDQFVELSTQTLAYFLGDISQKIQLTQLFTEIARHIHLIVGSLESKRIYGRTMFSLRKTYDMQEWLQINVTGLLYCGNVTELLNFLWPLLYENIENNTFKKCSSPEFLENITLMWIAGEPYKNMLEEVRNAGVMINGKRPRNFKMEDIVEICDNSLSYEGTMILAAVIELIPLVHNDEDKRVSQLIELIETFQKILKYGLPSLKAVTIYELGFTDRVIAQQITDILGGARSSRRATILQLKEYRERLSNLLELYPTYFQIKLQQFLAKVD

SEQ ID NO: 54752 - protein, 280 aa, Halobacillus sp. BBL2006
MEGKDNKLIELIGSHEGKEPFFIEWLLSEDSIELPQKKHRILSEIDGTRENSIDKVSEWFIQHHMDEKRKSRIEKKKKTLEKQGFQNYVQKLNFFPSDNKTIKGNTAEIILAEYLKATSGLDLLVYRLRYNPNINQSMKGDDVLLLNAADVFGRLIVGESKFREVPGKAVIEEILDNIGNEVTYPLSLLFLSKILSDRGEDEIAEELEDLNSNMHTGKTDIINVGFLLSNHNTAANVERHLYSRNPNFVLVSLGIENPANFISEISDLAIKKISEVEDES

SEQ ID NO: 54753 - protein, 209 aa, Halobacillus sp. BBL2006
MKVEKAQKLLSKLEEDDFVRSLVAQGDSKFLLLNVNEPIENFPSYTSDLEQKLTSIAISYLSIGCSFAENKHTQDSIFPLEKGATILENIYSSKDVTDKYNDYFMLVSSLAYYSAHQYSKSFVILKKVKFDSKINEIIGFMLKRQFSLLSKAITEILLNKDYSDESISENEEIDIANYKIYTVILSKSLALLLEFIFTGKVEYLKQTKE

SEQ ID NO: 54754 - protein, 270 aa, Pseudomonas sp. 10-1B
MSSEVPHLEWLEKTSTFTSSCGRPITVYTFKHDAMDTAVMSAWAKHFRNHYCLDDELPYLKNPSKSNSEYLLTERFPDEKKKPGPSVRAGDFAEILIADYLEYIRNYNVPRTRYDRKIVTDESAKGSDVIAFKKQPNVISDTDELLVFEVKAKASENQKVNVLQTAIDHSGKDEVRLAESLNAMRQRLYDRKDFDGIQVVDRFQREADHPCKRSYGAAAVFTASSMHEDIIKASTTVEHPSADALELVVVGGTHLMTLVHELYRRAADEA

SEQ ID NO: 54755 - protein, 1036 aa, Pseudomonas sp. 10-1B
MKLETNGRIILDITRAKAKQYEFGIDEQYHITLPQDPKRLLVFTIGVLGELAALESRPNDERVEARSSLKDQLVLAGQYFESMSTAQLISGSDEYLRILSSASYYLADMPGSSLVLARTVSDVPEELTASGLERLLVWLLKSDISSNFQLVPLGVFNDLIRRVARIYRSFINFEADLSDVNEELVDFRSAVYFGGSDREILLVDTITALVKRKIDNSSLICLPRYTGLSLDRWKQTLANDRFMKEFWPGQRLVGELGVLTGSSAVIQMPTSAGKTKSAELIVRSAFLSGRAKLAVVVAPFKALCREITQGFSQTFEDDAVNVNELRDITNIDDDEHEFLKFLLGDAYKGAHDHTVIVSTPEKLVYLLRHEPSLAERIDLLIFDEGHQFDSGKRGVTYELLIASLKESVSDSAQKVLISAVMSNAETIGEWLNGESGVHIQGSNSLPSIKSVAFLSWVTEMGQLSYLGRDNKNDSGLYVPKVIQQLNLGRKGRERNDRVFPARGETQSISCYLGLKLCHQGPVAIFCGDKRSVVSLCNTIVNAYDRNLPLSKPSTISDAGELERITFLSNLHFSDGHIFSKAIPLGVLPHSSAVPNGIRMSVEWAMDKKSAHFVVCTSTLAQGVNLPIKYLLVSSVMQGGKWISTREFQNLIGRAGRSGYHTEGGIIFTDPKIYDDRYSWAGSFKWRKTLGLLDFNNAEACLSSLVDIIRPFSLEQASDDLIEFIKNPTRRRAQWELWGDENDTDVTTLMEEMDSKELALNAIESYFLSMLKDDESLLEISSFLGLARETLAYYLASEEERERLLEVFSTIHARLCAIPVEKFSFYGKTLLGLDQLRFVEGWIDANQWDLELCSSSNELLDACWALISKFSVSKIITNIKPQVQAVELAKRWCNGESYHDLLSYAKENKIKVQAKSKIHAVTQEHIVDFCSAISYDGMMLIGGLADIVEGKSLSEEILGNARALQNQLKLGLSDEFHIWLYGKGYSDREVCKHIATVLEKVMIGKSTLGYDILKDNRELLSEALSRLPGVFSEVKVR

SEQ ID NO: 54756 - protein, 276 aa, Bacillus sp. FJAT-21945
MKDIISEQCKLIGEHPESFFFSEWLESTDDPIRDKKIHRHLSEKMGTREYAIEQISDWIVEHHVDEKKLNRLKRKRNQILTKYGFEEYVRRQNMLPTADKTKKGNGAEIILTEYLLETTGLHLLVYRLRYNPNVNQAMKGDDVLLLNRDNVLEKVLIGESKFRKAPSKSVIEEITKEFSKESRLPLSITFLAQKMSDFGNEDMAEELEDLNATIHDGKIPIISVGFLLSNHNTAVNVNRHLKSSNPNFVFVSLGINNPDEFITKCFNLAEEKIKRV

SEQ ID NO: 54757 - protein, 1119 aa, Bacillus sp. FJAT-21945
MNIEKANELLQKIERDSFIQNLIAQGDSRYILFNVQESVDNFPNFTLNLDSKLTHIAFSYLSIGCTFAEKSYMRESILPLEKGAGILEYVYKPIENRKEFSSYYILASSLAYYAANQYSKSFILTQNVDLDTDISKLLGLFLRRNFKKLGQLISEISLSNKYNINTVSSVENYDDANTLIYTLILSKSLSALLEFIFSGDSAWLEKSKEYSTDLLELLSIDEEPSLWWCIRLFQIIIEGFYQNSLWKIIPPKINDNNHELVTKYINTMVFQQKPVTELFQSQKEVLTQALNPQGAVISLPTSSGKTRIAEISILQELINEPEGIILYLTPFRSLAFEVEESLSKIFRPLGVEVSHLYGGTQYSKIDELILNESNVIIATPEKAKAIFRSNSHIKKKIKLVIIDEGHLIGPEERYITSELLIEELRFHITKNKGKMILLSAVLPNTDEIAHWITGNSGMKAHSDWRPSTQRFGLVEYTGNNVNITWKGELESFNRNFINPFTVKRPRSEYTFPKEKKQAIAAVALKMASFGSVLIFVGRQNMVVSQGKEIITAMGLGTTEHSWTNQVEWYAFKLACEEVYGSNSEIYKCASHGILCHHAGLPSEVRLIMEKLMRSSNPKIIVSTSTLGQGVNIGVSSVIIANVWLNQNDKIKHSDFWNIAGRAGRSFVDTEGKILYVVDASSGARKARRERELAIQYFHIEKQNDVISGLLYALQYFFQVAKAVNIDFDTLLELIANNDFSRFKHEHIDTFDSLLDLLDDTLLSLNLEFESYNLEDKSSWIEDFFKNSLAFIQSQHLKMKEEDIIALLKARNKAILRLAGESSNWKGLVSSSVPLRTGLFIKKELSTILDILLKFQETEKSTIDLINFINEIEEFISKFPSDQFKGNLDIQDLNSFRECWISGKSINTFDEKDIKNYNQYYGFTLPWALNAIARMLSTIKLEEECKIFEDLAVLVQMGLPNMFAVNIYLSGIQSRVSATELSNKLEQNFQGTSIRKLRSKIIKIADTIPNISENTRRWVQLLKDKESKLVSFTDKLPDFIFKSNVAIKNKRLFVKKFNEEFYLCSPDFEDQIKVKITKKFPFNKYTDNFGIYFENIKQDTWTMKIRNPYIKHDLFDLLGF

SEQ ID NO: 54758 - protein, 273 aa, Flavobacterium sp. MEB061
MIEHYFDYNQDRKDFCFEFFYVTQNKKVDAAFLEDLKEKVLLSYRSIEALKFHLSESTEDEIKKYVTDYVIPQNAGIIDRIVRQGDWGEIVAGLIVANIQKLSIPIHKLRWKINKNKSVFGTDLIAFNLGDPITDIHYYEIKTRVASHQKEGTNPNRNYISIIAHNSLAKENNVPNEMLADFLMRYYVAQNDYASAAKFKDIVKNPSAYNRNFELFFIVEENNYTDTIFDELHNLPPQLAPLRVTVIIVNDLQKIIDETWQDIEQRLVDMIKT

SEQ ID NO: 54759 - protein, 1136 aa, Flavobacterium sp. MEB061
MTRQEYTQFIDSEVRNVLKDTTLASYKNQIFAWRLNASFTKSFQIDYLWNRAVFLSSSCAYLLEQDGDTRIITTGLKSSAEIFEYLSELKELAELYDKDSVLLLSALCYDLSGYQANAYCIAQQISEFIFHDERSETSTESESYIVRQITCILLKKIPEAKANIQATDDLGITLFNDALSKWCDAIFKLSEEAGYEEAFERVYRYYLKRHNIFISHLLSLLKTRIAVFENKSIWNTLKKNGHIAESKVWRKYVKLLAHDYYDSNSIKNIGNRKSVFELWTSQHRAIEQGLLEGNENFVVQMPTSAGKTFIAELSILKNLTEFPDKKCIYVAPFRALTSEKEIELARYFSKLGYSVSALSGSYEVDSFQDVIISQTDVLIATPEKIDMLVRINPELFKGISLMVVDEGHIIGEVSTRAALLEFLIIRLKIKFPEIAYLFISAVMPPKNADQYAQWLSGEQENVLRSLQFPDSPVTEEWEPTRKLIGSFTWTKGGSQIGFKNFEETETLAAIGNSFVPNYLIQKEIGGKYPAVQTKPATTAALAYRMSLEGNTLVFCGQPRRTLTIANQLLLILQGIDIDLPEWFEADEDKESFYYAKMWYGEEDPITQSIRHGIGIHFGDMPEQVRNSVEHDYRTGRLRLLLSSNTVGQGLNFPIKNLIFYNLAIGHGDQGQILISKRDFWNIVGRAGRAGKETEGKIIFVINTPTDLNNYADFTNRDNLEEADSLFSKVINTYNRRRITRIVRDRHLSILSETFLMEMFTEEIIGTDYEEIINDIIENSLFKFQLDEDDLELIKRSFRSTFKKFEENLDVSDAEIYKQSGFTFDSNIIIDEFIIKHLDVLNGYLEDDNHFDFCRLVFEFLLDAGLEELDDHKLTNIGLTTEMHYPIIEMWISGEPLEEIIDKWKENQSVDSFHLFLSKGLYYLYPWAFTAFTNIMIYRLGIERDDVPYNIANLSSYLKYGLPDSAGCLARSLGIKNRDAVVVLTKLASGRTGPDFIKWLSNLSIGRINSLELSVFDTENIISISRKLTPHRFNALPDVFSFTVEATSEFVGYRINSRRVREGAVLEYRRVRGKNNPYAIYLLYKGYRIGRVPAEYSKVISAEIDINDADYLVTVKEVIEHGKYNSIIVEMALMDLL

SEQ ID NO: 54760 - protein, 259 aa, Spongiibacter sp. IMCC21906
MALFDAWCTLKKEKDKRKRLWKLTERDGGRDEIHGELVQIIRSHYQRLERIAEDIARLGYSDAANILGAVLPQNPKSRSGDIGEILATELVDETTGFNVPIRRLRYKDGRDMALRGDDFIGIAYDDEERLWLLKGESKSRKKLGKTTITEAREALNRNHGRCTPDSLLFVADRLLDSDDDEERKLGRTIRDEVGRATLRPNRIDHMFFTLSGNGVPSAMMKDLEAASTNRNHYVANLHVEDHGEFIKTIYDEVKDLGSD

SEQ ID NO: 54761 - protein, 1157 aa, Spongiibacter sp. IMCC21906
MEAIDELRDFLTSATEDAVWGRLLDRGAAWALMRVDGKLPDDAPPFGDTIDVDLAEHGFALLRAALNLRDEVGPTPLTTKGFERAANAFESLVRNGPSDAVERGFYRALAAASYHLASFSAVAFSLFNEHDRDLNSSPAEIAIALLILRDMDRLREYVRNWLRDNKHSDEELSQALVADEIEPDEAIATVLNTTIFRALAYFDFALQTGESVLQEQAKALLATAVRLAGNANNVPLWWVCRISQSLIDDLWGHSLHERMPRDGPGGGDENYPRLRRMFITSLYARKTSEVELWPSQLEAAARATDLADDLVVSLPTSAGKTRVAEIAALMTLATEKRVLIVTPLRALSAQTERSFRKTFAPLGFTVSSLYGASGISSGDEDALRSHHIVIATPEKLDFALRNDVDLINDVGLIVLDEGHMIGPTEREIRYETLVQRLLRRGDAAERRIVCLSAILPGGEELDDLTAWIRGDEPGEAVRSDWRPTRQRFGTLAWTRGSARLNYDLNNDGPFLTGFVSAMEPRGRDRNPFPRDVGDFAIQAAWEFAGQGKRTLIFSTQANWVEGYGKKIVRFVEKGYLPTLLDDQGAIERALEVGREWLGSDHPAVASLRVGVAIHHGRLPSPFLRELESLLAEGTLKVIVASPTLSQGLNLNAAVLLVPYLVRAGMLVSGEEFANVAGRAGRAFVDTEGLIVHLMFDKHPQRLRNWRRLVESIKARSLKSGLIQIVDEIMQRLAREGVWARADALEYLANSRDGWKSQAEEVAALAAEGTDEDDEEDKIEEEPLSQLVERLDATVFGLVEALDADSDDLPRLLDEALMGSLWARQIQREEEGTEVEHKAIIQARAKLIWQHTNVRARKGHFAMGVGLEAGLQIDAMAEELEELIDCADLAALAGDVAPLSEALAELAQRLLVIRPFVPDKKNALPANWRDLLVKWVSGTDVDEISTANMRIVEDAFMYRLVWALEAIRTRRLSQGWEPEVVAGGGAAALETGVPQLMMSMLIRAGLPSRIAAMAAIEETQPIFLTPAEMRQWLASDDMEILTAQGDWPTVETAALWQRFRVSMLTESVQAWAINEWKRALELPNEVAAPPPGIYRIEIDEDDLATWLVTPDYLRIARFKKPIQDVTPSLWMGKLEAGCTVVDAVRIGRGNAVWPKATA

SEQ ID NO: 54762 - protein, 260 aa, Halomonas sp. 54_146
MGLYGKWCEPTKEKNKRKHYWTYVEKDGGRDEIRDDLVETIRSHYDRLERIAEDVKRLGYEVASEILNAAMPQTTKGRSGDLGEILATELVEEEVGLRVPVRRLRYKDGRNMAMRGDDFIGAGYDGKGEKLWLLKGEAKSNKVLGKTTVTSARKVLNRDSGRCTPDSLLFVANRLLESDDLDDNDLGRSLRDEVGLKSLHADRIDHMLFTVSGNGPHASLKDDLDAAEANRDHYVVNIHVEDHQDFIATMYIEAENLGDD

SEQ ID NO: 54763 - protein, 1168 aa, Halomonas sp. 54_146
METIDELTEFLTTATADGILGRLLYRGAAWSLMREEGVLPENAPPLGATIETDLAEHGFALLRGAMAMRAQAGTSELTSKAFERAANAFEALVRNGDPEAPDRGFRRTVAAAAYHLAGFSAVAYSLFNEMTNDLNTSPGETAIRYLILRDLDQLRDFVREWLGDEAHTDEQIAEKLRSEAPDVDEALSTILNTTICRALAFFDFALETGEPELAENSRVLLDNAVSLANNAENVPLWWISNLCGHLIDDLWQHSLHQNLPIEPPEGSEEKYPDLRRLFISSLYTRKTSEVELWPSQREAAQRSTDVTDDLVVALPTSAGKTRVAEIAALMTLSSARRVLVVTPLRALSAQTERSFRKTFAPLGFSVSSLYGASGLSAGDEDALRTREIIIATPEKLDFALRSDPSLIDDVGLIVLDEGHMIGPSEREIRYETLVQRLLRRADTSERRIVCLSAILPSGDELDDLTAWIRSDEPGEPVLSDWRPTRQRFGALTWRGNDALLRLDLDDDGPFLDKFVLHRPARGQEKKPYPRKNSHLALFAAWEFAGQGKRTLIFSTQANWVESYGKQVVDLCKRGYLDSLLEDEASIARALEVGKEWLGEAHPAVASLKAGVAIHHGRLPSPFLRELEVLLSEGVLKVIVASPTLAQGLNLNAAVLLVPALYRAGEKIKGEEFANVAGRAGRAFVDVEGLIVHVMFDKIAWRKKEWRKLVVSAKARTLKSGLIQIVAKILERLSREGVLDRDDAWEYLANAREAWRSPDEEAEMAERLAAAMEYDADSDDDDEGDEDGDEESIDEEPLTQIVERLDATVFGLIDALDADRADLPNLLDEALKGSLWARQIAREDENVAPLHKRVFEARADLIWKATTVQARRGHFAMGVGLEAGLAIDAMADELAELLDRADAAALSGDVDELVDALGGLGERLLFIRPFIPDKANALPANWKDILRNWISGEDVAKIGPQNMRTVEEAFTYRLVWALEAVRTRRMSLGWSPEIVAGGAAAAVETGVPQFMMAMLIRAGLPSRRAAMAAIEDAEPVFVTPAEMRAWLESDEITAYTDAGDWPTPDSAALWARFRTEALSSGIQRWSIRHCRRLLDIGTAPPAGLYRIATDEGDGRTWLVTPDYQRVAVFKKPALDPKPSLFSGRLQGNTKLVEVVRIGRGKLRWPLADT

SEQ ID NO: 54764 - protein, 259 aa, Magnetospirillum sp. XM-1
MVQFNDWCLSVDEQIGNHFRRVMTGQAASLPNGIQATAAVVPGHYASEEQVARALARLGKSAAAALVQGKLPTTKAIRSGDLGEIFATEWIDAHSGGYQAPIKRLRWKDHRNMAMRGDDVIGILQDAQTQRLHFLKTEAKSRASLTAQVLTEARAGLDKDGGLPSAHALSFISARLLELDNLPLADAIDDALLKHGIRAENVRHLLFTFSGNAPEALLTASLQSYRGPINQWGIGLHVEGHAAFIGAVYERVIADANNA

SEQ ID NO: 54765 - protein, 724 aa, Magnetospirillum sp. XM-1
MPTTPEAIAADIAEAATAGFRGRLIARGQARAIIWRDGVLPPDAPAFAPQLSYDLHSYGYALLNLGLRLRELGGNAAQARTAFEQAATALEAVIAKGNRQEADQDFHFIIAAASYHLAHLSARAYSLLALVEADENFANTERLLALLMRRNFTALRANVLDYRASGQGSDARIAAAIQANLDQAEADADLAYGDSALLFDGLDTALTDVFIAAMSIFLLALERGEKPLLDQAMEQLRTGLSICSEMNMLPQWWTYRIAIHLLSDLWSNTFHEKVPLQPVGSEAADWPRMRELFIALLQRREKAEVDLWPSQIEAATRAVDQSDDLVVSLPTSAGKTRIAELCILRCLAGGKRVVFITPLRALSAQTETTLQRTFGPLGKTISALYGSIGVSGFDEDAIRERDIVVATPEKLDFALRNDPSLLDDVGLLVFDEGHMIGLNEREVRYEVQIQRLLRRPDAHQRRIVCLSAILPDGDQLDDFAGWLRRDHPGGLIKHDWRPTRLRFGEVVWSSPTARLNLRVGDERPWVQRFLTGSAPPNWVPPKKRRTRLFPGDQRELCLATAWRLVEDGQTVLIFCPERRSVEPFADVIVDLHERSALSSLLGAAPAVLNTAIALGEEWLGPDSAILKCLRLGVALHHGALPTAYRKEVERLLRDNVLKVTISSPTLAQGLNLSATAVVMHSLHRYGELIDISEFKNVIGRAGRAYARIAVADTITSRIAFLRNS

SEQ ID NO: 54766 - protein, 258 aa, Citrobacter sp. MGH105
MGLYEKWCESIKENDERKYYWTYVEKDGGRDDIREDLAETIRSHYDRLERIADDVGRLGYKVAAKILSEAMPNTPKGRSGDLGEILATELVEEEIGLRVPVRRLRYKDGRNMAMRGDDFIGAGYQGNKLWLLKGEAKSNQKLGKTTVIAARKVLDRDNGRCTPDSLLFVANRLLESNDAGDNALGRDLRDEVGLKSMQADRIDHMLFTVSGNGPHASLKENLEAAGVNRDHYVVNIHIKDHQDFIAAMYLEAEALGDD

SEQ ID NO: 54767 - protein, 1166 aa, Citrobacter sp. MGH105
METTEELSTFLTAATVDGILGRLLYRGAAWSLMRKDGVLPQNAPPLGATIETDLAEHGFALLRGAMALRAQAGASKLTGKAFERAANAFEALVRNGNPESPDRGFRRTIAAAAYHLAGFSAVAFSIFNETEEDLNVSPGEIAIRHLILRDLDQLRGFVRNWLDDGAHGDEQIAATLQGEDTDVDEVLSTILNTTICRALAFFDFALETGEVEPFEAARGLLTTAVGLADNAENVPLWWISNLSRHLIDDLWQHSLHQNLPTEPPKGAEEKYPDLRRLFISSLYARKTSEVELWPSQREAAQRSTDVTDDLVVALPTSAGKTRVAEIAVLMTLSSARRVLIVTPLRALSAQTERSFRKTFAPLGFSVSSLYGASGLSAGDEDALRTREIIIATPEKLDFALRSDQTLIDDVGLIVLDEGHMIGPSEREIRYETLVQRLLRRTDAAERRIVCLSAILPSGDELDDLTAWIRSDEPGEPVRSDWRPTRQRFGALTWRGKDALLRLDLDDDGPFLDKFVAEKPARGKEKKPYPRKNSHLALFAAWEFASQGKRTLIFSTQANWVESYGKQVVDLCKRGYLNSLLEDEAPIARALEVGKEWLGEDHPAVASLKVGVAIHHGRLPSPFLRELELLLTEGTLKVIIASPTLSQGLNLNAAVLLVPALYRASEKIKGEEFANVAGRAGRAFVDVEGLIVHVMFDKIKWRKKEWRELVASAKARTLKSGLIQIVAEILKRLSREGVLDRDDAWEYLANAREAWRSPDEEAGVAERLAAAVVYDAATDDEDETDDEEETIDEEPLSQLVERLDATVFGLIESLDVDRADLPNLLDEALKGSLWARQIAREDEDVASLHRKVFEARAGLIWKATTTPTRRGHFAMGVGLEAGLLIDAMADELAELIDRADSAALSGDINELADALGGLGERLLFMRPFIPDKANALPPNWKAILRSWVSGEEVSKIGPQNMRAVEDAFTYRLVWALEAVRTRRMSFGWSPDTVAGGAAAAVETGVPQLMMAMLIRAGLPSRRAAMAAIEDAEPVFVTPAEMRAWLESDEITAKTDAGNWPTPDTSALWARFRTEALSGGIQKWSVERYKRLLDTEPSPPAGLYRIVTDEGDARTWLATPDYQRIAVFKKPAVDPKPSLFSGRLPGKTRLVDALRVGRGKLRWPAADA

SEQ ID NO: 54768 - protein, 268 aa, Shewanella sp. Sh95
MLGIHPTVNSFGYFAASTDLVTAKNIAHRELLIPDAKVNDAVQELRPALIQHHASAEMIARDNRKIASLKKLGYTIDDANVQRFPTHSDTQKGNLTEVFLAEYIVASSGANLPVYRLRYNPNVDQSMKGDDVLAFDFRGRKPRIIIGEAKFRGVPSKAAVEDIIKGLNSSYQGGLPASLQFVADRLYESGQNNLADQVESCALQIANGNLDLNYVGILLSNQNSANPINTHADSNISELVMISLAMSKPIEFVTACFEGIEEEAHGNP

SEQ ID NO: 54769 - protein, 1121 aa, Shewanella sp. Sh95
MAIPRETAQRIIERFQAGGTVNLFAQSNASHLLYEVGETQDNFPNFDPSLQDKVTISAYSILAAAISIAEEEWTDEAVHALELGAGLLGNVNQPHTEENNSSVFHVLISAMAFYAAGQYSRAFVTIRKIEAKSDIAEIISAFIRKDPEQVIILTNKFLLDDLTRFESHHDILDHAIALISSRALSLTLEYFASGDHRIPERIDELLTSGVELASDYDSPSHWLVMRLLRLMLAGNLDDSLWSRLPRLMDGDEDIVKKYIRLLAFDKNRITELWTSQIDALDKALDSTTPGAVINMRTSAGKTRVAELAILQTLLGDPAAKVLYLAPFRSLAIEIEQTLSKTFDPLGFPVSHLYGGFRLSRSDTQLAESSSITIATPEKTRAMLRASPELMSQIGLIIVDEGHLLGANERYVRNELFLDHLRIISNKNNSRVLMLSAVLPNSEDISNWLTRNPNNVARSNWKPSSERFGILQWQGNNVRIDWRGEYESFNPRFVQQIECNRQFDHGAGIWKGRRKPFPADKGEAIAASALRLCTVGPVMIFSARANSIPGLASSSLTAMGEDAPHHSWPQLEWDLFEATCIEDLGENAIELHAARKGIICHSNRLPPETRLAIERLMRSFAPKLVIASTTLAQGVNIGISSVIVSTPFKSKDPIDHRDFWNICGRAGRAFIDGEGKILYAIDRTNEDWKVRKDIALANYFFNQKNSNEVQSGLLFVLNLLKRISDEHQLNFQQLLTMVAENDFTALEDQSREEFHYILDLVDDSLLSIQEDEIINPNNIQPEQWVDDFFRNSLASLQASADTGLSSDELIQLLSKRADYLVKSIPDRAQRKAYGSSGLPISVASKLFLDIAVFVNHAQTVSNSEFSIDSILSFLNWLEDWAIQNAAAIIQDAPAKKSFNRIRSSWLSGISMREITLLDDSADDICKGVYGFTFPWLIHAASQQAKSIGLEDESDVLSNVAILVEMGLPSLLACWVFLSGIRSRAASTEIANSGVDLGNSLRRVRISLRRPDILDALNVLVSDHSKNWLSLHRINHASTPDRLPSFRRFTVNGFDGEPPVLLLRSIRQQDYLCTPDGRQKLLVGSDRQLPFRDVANDYRVAFERSNDGVYQVVLRDPRAQLEE

SEQ ID NO: 54770 - protein, 281 aa, Lysinibacillus sp. F5
MIEKVDLFPHLYSHPEEDSLFSNWLICEDDYRKDEDGSYKNHRKLNVRENVSHPFDEIVNLIKKHHISPERMASLERKKSILDKYSFSKYIEAQQLIPKTKKTQRGNLGEIILGEYLERVTANRLFIYRLRYNTNVEQSMKGEDVLLLNKEEPFSKVYTGEAKFRTTPNQEAVNDICKSYGKDIVRPLSIGFTITLFYDKGKIEEAEILEELLNKVVNKEVEIINIGLLLSNHNAARNVENHMKSQNKNFGIISLSMLNPAEFADIIYDRAFKSLGVEPDE

SEQ ID NO: 54771 - protein, 1075 aa, Lysinibacillus sp. F5
MNKILDNYKRINEDVYFQNLIAQSYSRSILRDVNEPLENYPKYDEELDTKLIAIFQMYLNTALRVDFDETDFELINIRTDSFKLAADILKNMYHYGIEKPEKDYYILIASMAYYLSGDYSKSFAVMKNFNEKNAITNLVSHFLKKEYTILYEEVLFNFSAQIPKSESEMEMDSHIYLKILSIAMNNFLRYLTTGNDAFIYEAIENTSDLIELTELDNDVLAWYIFKLLNFLFKCFHRVSLWKIIPPLIQRKEVVDKYILNNLFNSPSIVELFPFQIEALVKSMNPSGAVLALPTSSGKTKIAEINILKTLVEDPNAIILYLAPFKSLAYEIEDTLKKNLSNLDINISNMYGDGTESLFDDFLRGQSNVLIVTPEKAKMILRNDNDIKERLKLIILDEGHLIGGDLRFTRNELFYEELKYYVMKVNGKFLVLSAILPNSSEVAEWFTRDSQNKYVLNRTKNDKRFGVLLYTKNNVSIKWKGKSNPFNHNFVDNIKLTDKVILPNSKRTSVILSALKFSNSGKVLIYLARKDMIKGYIKDYSRILDHLEDHCWEEKYWNEYLFNLKTFYGEDSIFEKVALKGIIVHHASLPNDLRIATEKILRYSNPKIIIATSTLAQGVNIGVSTVIIGHYRVTKDLISNGEFNNIIGRAGRSFVDVEGKVLFAIDANQSTKKNKWEIGIFESFINGIIERVESGIYYVLRYIYRLSIKNKVSFETLLEIISNNESLEDNSYLHLLDDTLLAILNEEDFDVNNLDEFIDNSFAILLAANKAEDFNEEKLKRMLIARANYIKTTYQDATKKEMYLQAGIALTFIKLLEENLSSIEEILQQEYYLDELISRILDIANSDLNIYRNDNYDISKEHIYEWISGEQINESTYTNFKWNKLYYELPLIVNTLSKILLFNQKEECSEKLLNFNECLKYGLPNIAAVKIYLLGLNSREVATKIAEKYYSEILQIDDRFGLKLLLMTKSKDILEEFNETEFFLIVQSWFEKEFSERSLNTPEIRLRIRNVSSEINEFRLMEIDNKYFLITLDLNTKIQLNLNTGTLEGKEYIINNIKYSFIREADDVFVLKTYND

SEQ ID NO: 54772 - protein, 281 aa, Desulfosporosinus sp. BRH_c37
MLGANTIIDKWLSEIKRKKHSYKFTIIDISEKTKITDNITDYLALSLLSHFRDLEHLKRMFKCEPRSKLKKYIRNNIFPSIDSSLDLKLRRINYNVRQGDWGEVLTTSIALDIRNVNAPVKKLRYKMNKEKSLFGIDVLAFEEDGDKNLVKAILFESKTRRTYKKEIGVEAYNSLCKNSEKAFIDMLNFLSTLFFDKGNFELADKYDELVKNPNSIIKEYHSFIIMEKNVWREAILDCLDNETVDFENVYFNIFLIDNLKDMVAETYRRTENIAIEVVYEK

SEQ ID NO: 54773 - protein, 1159 aa, Desulfosporosinus sp. BRH_c37
MKSSISKAEYLNKKKVEIHDILTDRTLSNFFYQASAQKIGARFTPTFKEEYLWKKALILSSHGGKILLTEPDYLEASKAVHIAARIYEILHYISEEYDTEYCVVLSSLCYDIAGYHANALCLIKNLYHLETNQDNYEYENQILDFIQLFMIRKLSILSELTSQFDSNNADNIKEIFKILSDFFLNGTYVKSLDELNDFDNMIEEKIDVVFSEYLYVGDIMFSNLFFLFKVKYKLFVRKSIWHNFYKYEKLPNKIWDRYAKILSHNMYSDGKVIASGQRTSIIEFWNSQVNALNKGILNTNDNFIIQMPTSAGKTFIAEMIILNNLVQSPGKKCLYIAPFKSLVSQVEETLSDHLSRMGFVVSTIIGNYELDSFDNLLIHEADVLVATPEKIDLLFRLMPEFFDNVSNITFDEGHVLGNLDTRSSLMEFLITRLRQRLKDKVSFIFISAVMPDISVAQISQWLSIKSENKITSKNSNGEKWQPTRNLIGKFEWHSSSGWLEYPTLRISAKANAFVPSVIESKRYSYINSETNRTNTVSFPKTTSKSETAVELAYKFSDQGPVLVFCGQPRNANSVAKAYIDMIRIKTISKTIKLENRTKYTKLNSYEIASKVLGKESETVLYLSHGIGVHTGSLPQVVRRAIEQDYKNKRLKLLIATNTLGQGVNLPIKTIIIHSVNIAQGQIVSNRDFWNIIGRAGRAGKETEGQVLYLCNSDKDRNLFSNYVDESKIEPINSIFYQIVKALSDKRIDSDQLRELLAETIEPQLFALLVEEMVDSPDEQIINKMIGTTLFNIQLADEPHVDDSELANELVNISNRFYIAAPNYKKRNAFARTGFSLSSCIKLHDYIENVFDNLYEKVQISIIDFILDVLNYIKGIQEMQSYKDSINELCQKEDIFNTIISMWLKEDNITEIRSFIRKHDVQSAVLLNEFIESMLSYRYSWGVTSFIVIFKYEIEERGLTDLDLLNYIPSFVKHGTNEILTSWAKSLGIPTRESASAIGNYYRNKLGRTLDLKKFVQWFSNITKEELIEILNIPLTTYEFEAILIIAQKINTRKYYDIEDNQEYRFYVMGIKYYTESIALARRIKINDKVSLRRDFDNLFDSYAVMIMYQDEFLGYVPRELAKEISVQIDMNGFKYHGHVLKKRKKSTGIDIFVSVTLDL

SEQ ID NO: 54774 - protein, 261 aa, Smithella sp. SDB
MNVAGVFKPHTMPRKALPVRCHILQDDKAKILEDYMVEQLPDCYINSRQLKERKKKTGLSASEILSNKLPDPGSVMSGDFGEMLTLFFLDSERTERTVPIRKLRYKQDRRKSAPHSDIIILHRQDPHGMFPDDFVICAEAKQKATNTEFNPIAEALKGFVKDRTGRLARTLLWLREKAIDVENKSMIDYIERFTQAHSVSFKKDYKAVAVIDRALLDAEITQTLKLPAQDESFEIVVLGVNRLYKMYNDVYKRAINEVRNE

SEQ ID NO: 54775 - protein, 981 aa, Smithella sp. SDB
MNKLLRNWLSQVESWEAAAEFGIPRDEWVKYDIIQRNEDVYIASLSAIFDALRIDDMEQKQSELWSLAKTLLVYSRGAAARYLSGVGRDLNQLYAATLFYIAGYPATATFLARNINDFSTEIAEEEFIHNFLSHDVSSVNSLTRQLALFVDGQTEDISDLMDNLSNSIATGIICDPRQFIAARLARECIQRFSNVNIWKLLREHAADYSTDAWKPFFATGGNAATMWELLPSQEMALTQGLMSRMETTFSLQMPTSAGKTALCELLIYQEVKIHGRFVLFLVPFRALAAEIQRDMSSRLHGLGIRILATHGGNIPTRSESSSVADAEVLIVTPEKFAALEQMIEGFSDRFQTIICDEGHLIDDESRGLGYELLLTRLRGVNVLGRRFIFLSAVLPNVSEINVWLGGDQQTFVQSEYRPVDTDYCFIKQVSSNSYCLDVNPTEAQPRSYYLYRFLTTDDFRYTNPVTGRLKLIDGRNNFSSLACAATLKARRNGPVALFTTTRGRQGIQSLGKTLLNMVQKGIRAAQERPSETPELKELFEYVLFLLGHEHLLAQLVRIGIGYHHGRLPQEIRRAIEEGVQEGSINIIICTNTLAEGVNLPIRTMVVHTVRRYDPDRDLHFFIPKRSIKNIIGRAGRAGKETRGRIIFVNWNERVRIEQVLREQEIEPAKGLLCRLIETLHEFSLNNKKELTNELFERQRPWFLEIIDKIDLALLNLIASDAQADTLDQHLNDLLEQTLARRLCTSEELQNCLEKVFQLRAEHLVATVEQAIWPKLRKSGSAPRFWRFVNEKLLLQHPLWLELQDPLDDQWLQEVIMPLLSYEGEDTSRDHGMLQDFIKGWMSGLTYQELAEACGCNVDRILDFVCNDVGYVLQDLVAKLCQLATETHDERDLSEPARNWSSLLQYGLGTLQQLDLFERGVSDRLAVWGATRYIEATQTTLRGRDLVVYLRRNGQFLRSSLERDERVPTMSVKRFIRELRIR

SEQ ID NO: 54776 - protein, 265 aa, Sphingomonas sp. Leaf226
MGWIRDTGERRQTACGREIQIWELDPVDDKVVLSAWAAYFRHHYCADADLPALVAGTGKSNAEYLLSILFPDEKVAPGPSLRSGDFGEILVADFIEFILGYWCPRELRYQDRWNRQDSTKGCDIIGFKFVNIQGEHANDELYIFESKSGLSATKKNRLQDAVTDSMKDHLREAMTLNAMKQRLLVRGEAAQVDAVQRFQNETERPFRRINGAAAVLDIDVLATTNLETTDTTGHKNADNLRLLVIKGPSLMKLVQALYQRAANEA

SEQ ID NO: 54777 - protein, 1038 aa, Sphingomonas sp. Leaf226
MKPRATANRVLSTTRARAKMHEFRVAPEDFIELYRDPAMLFDLAVGILGDVAAVTANEFREAEGLDSFDPDIEPVSWGGEELTISEGLRFASTFFDAYLNAKLDETITLEFSLLCATSYYLNNSVGNATVIVKKMEPPPLDLAAGLARLVYQILLNDFTLIDASADRVNAVLGDMNGFMTFASGVAEVSVACDALREVAYRNGSPRELLYADLTAAICATKLRNASRTILPAASGLDATAWQPALGKSHFPIELWPAQKRIARAGLLRGRSAVIQMPTSAGKTRANELIIRSAFLSQRASLAVIVAPYRSLCHDIRGDLVTAFAGEPIRLDEASDSFQFDIQLEEILAVKTVLIVTPEKLLYMLRRVPELVDRIGLVIYDEGHQFDGLTRGPTYELLLTSLKLTLPETTQVILISAVIGNASAVAEWLVGDRDAVIDGEGLLPTSKSIAFASWQDARGRLEYVSPADPEESEFWVPRLIDDFALSLRGKETKVQRFPAKTKGGEVGLFLGLYVVNNGSVAVFCGKKDSAITICRRAVDIFDRGADLPKPVDVSDAVEVEKIRSLSEWHLGPDAVATKAASLGVFAHHADTPQGLRLSIEHAMKVGLAKFVVCTSTLAQGVNFPLKYLIVTSTRQSAERIMVRDFQNLIGRAGRAGMHTEGSVIFATPSIFDQRNEYRNRWRWNEAKELLDATKSEPTKSSILSLFDDYEQREKDAPPVVQPIQPQWLDLSFAGQARIEAVVNEALALQPNISAAEFRRFIEKRARVIQAIAAFLVANMTFLEEEGQGRVSDLASHTLAYHLAPEEVRSPLVAVFQMIAAAIAANTDGDQRAVIKKSPLPPAIIAELQAWLAENAEQLRAAIDADQLLKVAGEKIISWNSAPSIRSMSNTDFLPEALSDWVNGRPFYHIHSRMERLGIRVSGNHATVESAVALCEGAFAYDLAMITASLSDLAEGMDETLFRGFSKLQKQIKYGLTHPAAIAFNEAGFADRVVANFLSALWTDVRDRDGVRAACRHAAMLPALTAYPSYFSTVASEIAG

SEQ ID NO: 54778 - protein, 260 aa, Aureimonas sp. Leaf324
MGLYERWCESTKEEDKRRRYWTYVEKDVGRDDIRDDLAETIRFHYDRLERIAEDVARLGYKVAAKILSEAMPQTPKGRSGDLGEILATELVEEEIGLRVPVRRLRYKDGRNMAMRGDDFIGAGYDGASKKLRLLKGEAKSNMVLGKTTVTSARKVLNRDNGRCTPDSLLFVANRLLESADPGDNELGRSLRDEVGVKSLRADRIDHMLFTVSGNGPHASLKDDLDATGTNRDHYVVNLHVKDHQDFIAAMYQEAENLGDD

SEQ ID NO: 54779 - protein, 1167 aa, Aureimonas sp. Leaf324
METTDELTAFLATATVDGILGRLLYRGAAWSLMREEGVLPPNAPPLGATIETDLAEHGFAVLRGAMALRAQAGTSDLTNKAFERAANAFEALVRNGNSEAPDRGFRRTIAAAAYHLAGFSAVAYSLFSEADDDLNASPGEKAIRHLILRDLGELRGFVRDWLNDEAHGDEQIAAALTDEEPDVDEVLSTILNTTICRALAHFDFALETGEPDPIEIARSLLGTAVRLADNAENVPLWWISNLCRHLIDDLWQHSLHQNLPDEPPEGTEENYPNLRRLFISSLYARKTSEVELWPSQREAAQRSTNVTDDLVVALPTSAGKTRVAEIAALMTLSLARRVLIVTPLRALSAQTERSFRKTFAPLGFSVSSLYGASGLSAGDEDALRTREIIIATPEKLDFALRSDPNLIDNVGLIVLDEGHMIGPSEREIRYETLVQRLLRRADAANRRIVCLSAILPSGDELDDLTAWIRSDEPGEPVRSDWRPTRQRFGALTWRGKDALLRLDLDEDGPFLDKFVAEKPALGREKRPYPRKNSHLALFAAWEFASQGKRTLIFSTQANWVESYGKQVVDLCKRGYLGSLLENGASIARALEVGNEWLGEDHPAVACLKQGVAIHHGRLPSPFLRELETLLSEGVLKVIVASPTLSQGLNLNAAVLLVPALYRAAEKIKGEEFANVAGRAGRAFVDVEGLIVHVMFDNIDWRKKEWRKLVASAKARTLKSGLIQIVAQILERLSREGVLDRDDAWEYLANSREAWRSPEEEAAVAQRLAAAVDYGDEDDSDEEDSGDEEETIDEEPLSQIVERLDATVFGLIEALDADRADLPNLLDEALKGSLWARQIAREDDDIAPLHKKVFEARADLIWKTTTAQARRGHFAMGVGLEAGLAIDAMADGLNELIDRADQAALSGEVDELVDALGGLGERLLFMRPFIPDKANALPANWKIILHSWVSGEEVVKIGPQNMRAVEEAFTYRLVWALEAVRTRRMSLGWSPETVAGGAASTVETGVPQFMMAMLIRAGLPSRRAARAAINGAKPIFVTPAEMRVWLESDEITAYTDAGDWPTPDTAALWARFRTEALSGSIQKWSIEHYQRLLDIEVAPPAGLYRIVTDEGDGRTWLETPDYQRVAPFKKPAVDPKPSIFSGRLPGNTRLVDSLRVGRGKLRWPRADA

SEQ ID NO: 54780 - protein, 259 aa, Rhizobium sp. Leaf371
MTQFNDWCLSVDEPVGNHFRRVMTGQAAGLATGIQATAAIVPGHYASEESVARALSRLGKPAAAALIEGKLPTTKNIRSGDLGEIYATEWIDTHSGGYRAPIKRLRWKDHRNMAMRGDDVIGILQDAANQRLLFLKTEAKSRVALTGQVLTDARAGLDKDGGLPSAHALSFISARLLELDNLPLADAIDDALLKHGVPVQNVRHLLFTFSGNAPDALLTASLQAYPGPINQWGVGLRVEGHAAFIGAVYDRVIADANYP

SEQ ID NO: 54781 - protein, 114 aa, Rhizobium sp. Leaf371
MPTTPEAIAADIAEAATAGFRGSLIARGQARAIIWRNGTLPPDAPGFAPQLSYDLHSYGYGLLGLGLRLRELGGDAAQARTAFEQAATALEAVIAKGDRLEADRDFHFVMAAAC

SEQ ID NO: 54782 - protein, 262 aa, Chryseobacterium sp. Leaf405
MVNIDILTHFEESAGENGITIFSLKEAERNAFFNKLPQPFRCLYLTDEDLDWRTNEFGTSRAEEIVDKIPDNPTIQSGEFSEILCYYIIPEKYLPSSHLRPPKWKWKESKNNPAHFTDVILFCQNDLDNPGTDDSLISIESKARATKPTNTESSLQKAIDDAHKDYVSRLGESLFHLKTRYKDDRNAEAVNRLSRFMDVANYPTFLKHFKAIATVDNSFADTHLNNVTEIPDDIRDTFEVILIRIEDLKGAYEHTFTQILAT

SEQ ID NO: 54783 - protein, 977 aa, Chryseobacterium sp. Leaf405
MIYQELKRWIAQSESWQAFIDYNIANEEQANYTFYNRPQDFYISLLTKLQDILDQFEEEESDDVKKGLLSIAKGLEIYSLRGKRESFSGVNYSRNMLYVASLYYLADFPATSFLLLKQFPQEEFQTNIEKFIYYFLSRNYTRKQGQENPYFGYIIEYLREGNNEAIDILRGIFDNILSPDNQIESHLFVLTYIAKSILKKFSTNNLWYDLTEYGAEIDWKTYVRFNIGKSPQIWSFFPSQQTAIRSGLLTFDKAFSLQTPTSSGKTSIDELVIFNELSRNPESKILYLAPFRALASELKNNLGRNLTSKLGIKVKTIYGGNIVTDSDRLSIEQSNVLISTPEKFMAIELGLSGMLDDFQTVICDEGHLIDNTTRGISYELLLSRLKNTESVERRFVFLSAIIPNIEIINSWLGGSDNDIARSNYRPTEIELAFLTQVSASHFNLEVNPNDEFPTKYILNRFLSTNDFSTPNGVYNVSTFKSKTVAAALKSLNSGAVAIFSPTKDYNQGVAGIASEVLNQLPTSLPKPIQFCDTDEIAKIEDYLNYIFSNNYLLAKCAKEGFLFHHGDLPQFIRELIENSIRDEKVKLLICTSTLAEGVNLPIKTLVINTARRFDGNKGYLMPLETRDLKNLIGRAGRAGKETKGTIIVVNPKDQSILSDVIADRNLEDVKGFLYHVVEVIEGYITKNATTLSNELLDQLKEADYIDNSIMQLLAEDVPVENLEQEINTLIENTLTFYQSDDALKTRLRELFSLRAERVRPIVEYGNLDLIRYTGIPLRSFNRIEELVDFKQNFLSEIENPLDNRWIDFLFDILYEIEDFPSDRSREEFIEALAIWIEGGWYHDVAQGLNSTVDDALIFIRFLEYGLQNSAGSIIKYIDTKRRENEEETSDIILNWSNYVVYGVNNRLKLDLMEINIPDRILVQQIANWFIENEIPYDDQAALRSIILRNQLLLFGYLEGRVPQISIDLLNQYFYRTV

SEQ ID NO: 54784 - protein, 263 aa, Acidovorax sp. Root219
MQTASGDQVEVYELQIDTNNKLMLKAWAKHFREHYCLDDHIDELMSGTPQKTRAEYLIAQKFPDANSNFGPQTRAGDFAEILLSDVVESLLGYWVPRTRYRDKKVKNESAKGTDVVGIKFHSGGPSKPSAYDALITVETKAHLSKSTKGNRLQDAVDDAQKDDVLGQFRVAESLNAMKQRFIEQGKGKETKSVARFQHPHKNPYIQDIGASALFCTTFYKDTEVAQVSTSKHRPGSRFKLIVVHGQDMMKFVHELYDRAANEA

SEQ ID NO: 54785 - protein, 778 aa, Acidovorax sp. Root219
MPTSTGKTRATEMVIRAAFVSERTSIAVVVAPYRALCYEIARDLKLKFESDGYQVNQLSDAIQQDYLVDFDDFMRLGIVTAPHVIVVTPEKLLYVLRHEESFMENVGLVVYDEGHQFDSPTRGVTYELLLTSIKALLPSSSQTVLISAVVNNAAQLAGWLLADQSKVVSDSNSQTARHIAFTTFQEQAAGQLRFESAIRGEQEFFVPNLVQHHRLSGDETPTHFPTADSGSIALYLGLNLVRQGGVAIYVRAPDSASKIVRDAVEIIFPRASSLPTPRSWADEREVNALTRLYEENFGDASFLTKAARLGLYAHTGDTPEGIRLAIEHAMRESLIGFVVCTSTLSQGVNLPIKYLLVTQLQTGERPIQTRDFQNLIGRAGRAGMYGEGTVIFTNPRLYDERATKPGAWRSAKALLDPRKAAPTSSALLNLVRPLKDRFGTQELTDLSVVEVLDGLVDQPEHLFTRIDELLLDIEDHRFSAEDLRRQLGERLGCIKAVECFLMAQLAAMEASEALIGVSRLAISTFAFHLSTPKQQEDLHYAFLKIWGRIARKNLSPETKARYGRGILGLVDAIAIDLFVQDKLFELQLAETSQDLMDVVWEFIVQSEAGKKLRRLEPATSTRTLANEWIEGKPFKVIMDTLVGSGTQIRWGQGTRELTFDQVVDLCQDQIGYRTSLVLASIASAFEAITVSSESQAQTLGLFNRLLKMLKYGLGRWEEISVYEAGFSERIIAKKLCATIPKGILGVDAAKRALLQSRSQVTSILEDYPSYYLSVLDSL

SEQ ID NO: 54786 - protein, 259 aa, Sphingopyxis sp. HIX
MAQFNDWCVSVDGPVGTHHRRVMTGQAASLATGIQATAAIVPAHYASEEQLARALARLGKPAAAALIEGKLPTTKQIRSGDLGEIYATEWIDAHSGGYRAPIKRLRWKDHRNMAMRGDDVIGILQDAQSQRLHFLKTEAKSRATLTGQVLTDARAGLDKDGGLPSAHALSFISARLLELDNLPLADAIDDALLKHGIPPQSVKHLLFTFSGNAPEALLTASLQAYPGAINQWGIGLYIDGHAAFIGAVYDRVIADANNP

SEQ ID NO: 54787 - protein, 1172 aa, Sphingopyxis sp. HIX
MPTTPEAIAADIAEAATAGFRGRLIARGQARAIIWRDGALPADAPAFAPQLSYDLHSYAYALLGLGLRLRDFGGDAAQARTAFEQAATALEAVMAKGDRQEVDRDFHFVMAAGAYHLAHLSARAYSLLAIVETDENFSPVERALAQLMRRNFGALRSSVLDYRASGQGSDARIAAGIQAQLDQAEAVAAPPEDGNDFLFDGLDIALTDAFMAAMSLFLLALERGERPLIDQALERLRTSLAICSEMNMLPQWWAHRVAIHLLSDLWSSTFHERVPLQPAGGAAADWQPLRELFIALLQRRPKAEIDLWPSQTEAAARAADQSDDLVVSLPTSAGKTRIAELCILRCLAGGKRVVFVTPLRALSAQTETTLQRTFGPLGKTISALYGSIGVSGFDEDAIRERNIVVATPEKLDFALRNDPSLLDDVGLLVFDEGHMIGPNEREVRYEVQIQRLLRRPDAQERRIVCLSAILPDGDQLDDFAAWLRRDHPGGLIKNDWRPTRLRFGEVVWTSPTARLNLRVGDERPWVQRFLTGAAPPNWIPPKRRRTRLFPDDQRELCLATAWRLVDDGQTVLIFCPERRSVEPFADVIVDLHERGALRSLLEADPNLLNTAIALGEEWLGADSAILKCLRLGVALHHGALPTAYRKEVERLLRENVLKVTISSPTLAQGLNLSATAVVMYSLHRAGERIEISEFKNVIGRAGRAYVDVEGIVLFPMFDEIAKKRRNWEALITDLGAREMESGLVRLVAMLLTRMRSRIGGDLNQLVEYVVNNAAAWTFPEVANEKPEERERALADWERHVATLDTAILSLIGENDIPDEGIETALHDILQSSLWHRRLQRQDLQVRQVLKAGLVSRSRLIWSQSTAAGRRGYFLAGVGLTTGHALDAIAADANLLLIQANGAILEGDTEGAITAIAGLAERVFAFYPFTPDPLPANWRDILRAWLLGQPLAALGAAQASETLQFVEGGLVYRLPWAMEAIRVRAAANGDTVGVFDLLLEDHELGAAVPAVETGTLNRSASILIQAGFNSRLAAIKAVTDTAATFTTGQELREWLNSDAVAAWSALPDWPTAETKAIWTEFTNSFMPADNRTWADRRYWASVNWLGAPPPPGTPVQVHYWGGQPRVLSADAAPLGTLQAALNPDRIGLLRAVVATDVGKIDIAYLGPADISPP

SEQ ID NO: 54788 - protein, 259 aa, Sphingopyxis sp. HXXIV; identical to SEQ ID NO: 54786

SEQ ID NO: 54789 - protein, 1172 aa, Sphingopyxis sp. HXXIV; identical to SEQ ID NO: 54787

SEQ ID NO: 54790 - protein, 259 aa, Sphingopyxis sp. H057; identical to SEQ ID NO: 54786

SEQ ID NO: 54791 - protein, 1172 aa, Sphingopyxis sp. H057; identical to SEQ ID NO: 54787

SEQ ID NO: 54792 - protein, 259 aa, Sphingopyxis sp. H067; identical to SEQ ID NO: 54786

SEQ ID NO: 54793 - protein, 1172 aa, Sphingopyxis sp. H067; identical to SEQ ID NO: 54787

SEQ ID NO: 54794 - protein, 259 aa, Sphingopyxis sp. H071; identical to SEQ ID NO: 54786

SEQ ID NO: 54795 - protein, 1172 aa, Sphingopyxis sp. H071; identical to SEQ ID NO: 54787

SEQ ID NO: 54796 - protein, 259 aa, Sphingopyxis sp. H073; identical to SEQ ID NO: 54786

SEQ ID NO: 54797 - protein, 1172 aa, Sphingopyxis sp. H073; identical to SEQ ID NO: 54787

SEQ ID NO: 54798 - protein, 259 aa, Sphingopyxis sp. H081; identical to SEQ ID NO: 54786

SEQ ID NO: 54799 - protein, 1172 aa, Sphingopyxis sp. H081; identical to SEQ ID NO: 54787

SEQ ID NO: 54800 - protein, 259 aa, Sphingopyxis sp. H100; identical to SEQ ID NO: 54786

SEQ ID NO: 54801 - protein, 1172 aa, Sphingopyxis sp. H100; identical to SEQ ID NO: 54787

SEQ ID NO: 54802 - protein, 259 aa, Sphingopyxis sp. H107; identical to SEQ ID NO: 54786

SEQ ID NO: 54803 - protein, 1172 aa, Sphingopyxis sp. H107; identical to SEQ ID NO: 54787

SEQ ID NO: 54804 - protein, 258 aa, Idiomarina sp. H105
MDFIEELNERPEGSLDVTCHVLSDNSAQQLEDYLVDRLASCYISQEKLQERANQTGLAYSELIANKIPDKGSVMSGDFGEIFTLYFLDRQYEENLKLIKKWRYKQDRKKAAPHSDVVLFNIEDFNNPSEDDFVICAESKQKATSSTFDPITSAISGYESDRTGRLAKTLVWLKEKAIDEGEQDDIALASRFADGLNTTYSKLYKAVAVVDRDLLDDEITKDIDLPDRTDEFEVIVIGIDDLKVRYESVFERACSEADL

SEQ ID NO: 54805 - protein, 973 aa, Idiomarina sp. H105
MSELLLHMMAEFESWEAAAEFNIPQQSWADYTVNDRVDDLYIATFSHIFNTLREESDDKKSNLLSCAKTLLVFSKSAASKYISGVEKNRNLLYSAALYYLADQPPTAFLIAKDIDPDIFEIEQEKFLYSFLSRISDEETELSVEIFDAVNRGEYQRFDHILDILSEQVAIGLQHDPLLFVSSKIAHECINRFKSVNVWILLERYSDCEDMSVWNELLSSNGGHPIWELLPSQVKAVESGILTGEKPAYSMQMPTSAGKTSLCEIIIFNEVKVRGNKVLFLVPFRALAAEVKAGMYSRLSNVGIEVSASYGGNIPTRSESTTVENSDVVISTPEKFEALCQVIPDFIDRFDVLICDEGHLIDDGNRGLQYELLLTKFKRRENPVDKIVFISAILPNVSEINDWLGGDESSLINSTYKPVVTDYSFVRPVNDKWFLDFNPHLDQPYSYFLSDFIQKDELKFTNQSTGNSNLLPNWSSLLTLACASAFKSSISGSVILFTTEKGQSGVRGLANKCLDMLEKNAFITQQYQEEGQPVDLVNYISTVLGEGHLLTRLVQRKIGYHHGDLPQELRREMEQAINDQKLNILICTSTLAEGVNLPIRTIVLHTVKRFNGRIKDFIEKRNIKNIIGRAGRAGKETRGRVIFANESERDYALEVINDVDLESAHGFLFSLIKALKNYLEATNLTLNQEFFDSNVAQDISYIFESIDMSLLQSLPEDIPEEDIDTFLDQMLSENLASKFCDEEGLTDLLKMVFSLRTERIFNETDPAMRAIMRNTGSSLNFLNYVEASQILDQDIWRSLTAPQESHWYKNIIKPVLNHIGYEDSADLIIDVLNGWVSGSFYIEIAEDLEQDVDDVVSYVCTVIGFELQQTLSQLTRFAIELYEDEVPDHVVNWPQYMQYGVNRQIHLRLINSGVTDRLAVFGVARFLDSLGVPEDIRNLRRMLRDNREALNNALEQDPRVPALSISRFFDDYNI

SEQ ID NO: 54806 - protein, 254 aa, Mycobacterium sp. GA-2613
MTDFESWCQPAAFVKVKKHTAGMLLSNDDSVGVDAVAATLAEKYAETETLALIAEKLGKQEVAKFLRHRFPTKANARSGDMGEILATAFVHEDHDYVVGPSRLIHRDHQEWAMRGDDVLGAFVDAQSRVHLVKVEAKSGVSITEKVVKDAREGLQRTDGLPSPHSLTHFAERLLGTPDDALGEAVLRLQLVEGVRPGAMTHVMFLFTASDPSQLVQNDLTAYNGMIKQLAMTLRVNAHQDFIRTAYEKALADDT

SEQ ID NO: 54807 - protein, 1184 aa, Mycobacterium sp. GA-2613
MQEATAPEFRRRLLARGQAQSMIRRDGILPEDAPQFGANLDDDLLSYGYALIATSLQLLEAGDPENSDGVPTAQERQQQAQTGFIEASYALEAATRNAEPDEGMAFHRLIAGAASHLAGYAARAFSLMQTSIDSGRLTPMEHTLADLVLRNLTQIETRAIALRSSAELTDGALLDALQTQSFDDPTDDDEKPETTPTSEATTSSDASGVGPIALLLSEHYLSAVSSALFALAYNQTNMLQAALADLATGEQASQEISVPGPWWVYRLTRRLFGDLGQTSIRANIPVPRPPAATASDETPGTGEIDWDHLRRTFVSALFARGQSEIDLWPSQLHVVQRIFEDTKDLVVALPTSAGKTRIAELCILACLAQGRRVVYVTPLRALSAQTERVLERTFTPLGAEVSTLYGSMGVSDVDEDALRSSQIVVATPEKLDFALRSDRTVLDDVGLVVLDEGHMIGPSDREVRYEAQVQRLIRRADADTRRIVCLSAVFPSGPDLDDFVAWVTDDEPDGLHRENWRPTRQRFGLVEWLTDHARLAMTFEQEQSFIPRYIEAKTPSGGKRRNPFPHDNRELVIATAWRLVEEGQTVLIFCPQRNSVEPYAREILKLRGQGFIDSVLPSEVDLDEALAIGAEWFGADHPILGCLRVGVAIHHGALPGPFRREVERLLHRGVIKVTVASPTLAQGLNLSASVVLFHGIRRGRALLTGSEFANVIGRAGRAFVDTEGLVLYPRYEPTPRHRREWFDLTVGDAGKSLRSGLITVAENLVRRMHAAAGSPQLQTFIDYLTGGVDWAFPVILGEDTEVRDTAEQTWSSSLALLDTALLSIGGEDESDPDEVTQLIADALRDSLWERQLNRLENQQAANALRELVSSRARFVWSNSTAAQRRGWYLAGLGAASGYELGLAAARVVELIFHAENAIEKNDTDAAVGNLLEIATILFAVSEFKPETSLIWQPVLVHWLSGAPLGLLGEDPVEVAQFIEADVVYRLVWGMEAARVYETAHENIVATALTGTALTAIETGTFNRSASVLIRSGFDHRAAAIAAVTDSEATFSSSSEMRDWIRELDPDLTESPDWPTVESHAAWKQFVNRADRLRSNSWALHVESVEEVAWRSTIPEAGAWLRVTDAGPGRIALWSTGFDALGEAMVDINPHRQGVLHARRLSGSSGIKLHYRGPRDLLAPTHRSS

SEQ ID NO: 54808 - protein, 254 aa, Mycobacterium sp. GA-2617; identical to SEQ ID NO: 54806

SEQ ID NO: 54809 - protein, 1195 aa, Mycobacterium sp. GA-2617
MTRDASALAASVQEATAPEFRRRLLARGQAQSMIRRDGILPEDAPQFGANLDDDLLSYGYALIATSLQLLEAGDPENSDGVPTAQERQQQAQTGFIEASYALEAATRNAEPDEGMAFHRLIAGAASHLAGYAARAFSLMQTSIDSGRLTPMEHTLADLVLRNLTQIETRAIALRSSAELTDGALLDALQTQSFDDPTDDDEKPETTPTSEATTSSDASGVGPIALLLSEHYLSAVSSALFALAYNQTNMLQAALADLATGEQASQEISVPGPWWVYRLTRRLFGDLGQTSIRANIPVPRPPAATASDETPGTGEIDWDHLRRTFVSALFARGQSEIDLWPSQLHVVQRIFEDTKDLVVALPTSAGKTRIAELCILACLAQGRRVVYVTPLRALSAQTERVLERTFTPLGAEVSTLYGSMGVSDVDEDALRSSQIVVATPEKLDFALRSDRTVLDDVGLVVLDEGHMIGPSDREVRYEAQVQRLIRRADADTRRIVCLSAVFPSGPDLDDFVAWVTDDEPDGLHRENWRPTRQRFGLVEWLTDHARLAMTFEQEQSFIPRYIEAKTPSGGKRRNPFPHDNRELVIATAWRLVEEGQTVLIFCPQRNSVEPYAREILKLRGQGFIDSVLPSEVDLDEALAIGAEWFGADHPILGCLRVGVAIHHGALPGPFRREVERLLHRGVIKVTVASPTLAQGLNLSASVVLFHGIRRGRALLTGSEFANVIGRAGRAFVDTEGLVLYPRYEPTPRHRREWFDLTVGDAGKSLRSGLITVAENLVRRMHAAAGSPQLQTFIDYLTGGVDWAFPVILGEDTEVRDTAEQTWSSSLALLDTALLSIGGEDESDPDEVTQLIADALRDSLWERQLNRLENQQAANALRELVSSRARFVWSNSTAAQRRGWYLAGLGAASGYELGLAAARVVELIFHAENAIEKNDTDAAVGNLLEIATILFAVSEFKPETSLIWQPVLVHWLSGAPLGLLGEDPVEVAQFIEADVVYRLVWGMEAARVYETAHENIVATALTGTALTAIETGTFNRSASVLIRSGFDHRAAAIAAVTDSEATFSSSSEMRDWIRELDPDLTESPDWPTVESHAAWKQFVNRADRLRSNSWALHVESVEEVAWRSTIPEAGAWLRVTDAGPGRIALWSTGFDALGEAMVDINPHRQGVLHARRLSGSSGIKLHYRGPRDLLAPTHRSS

SEQ ID NO: 54810 - protein, 254 aa, Mycobacterium sp. GA-2945b; identical to SEQ ID NO: 54806

SEQ ID NO: 54811 - protein, 1184 aa, Mycobacterium sp. GA-2945b; identical to SEQ ID NO: 54807

SEQ ID NO: 54812 - protein, 270 aa, Stenotrophomonas sp. KCTC 12332
MNSPAYLHHLKQEKSLALGEGFDCEVWELAVPDDSTSLSEWARRFRETYCLDSDLDILREGTGKSRAEYLLELVFPDERIAPGPAVRSGDFAEMLVSDYVEFVLGYWVPRGKYAEKGSRDESVKGVDIIGFQCQDPTEPKPTDEMLAFEAKAQLGGGMYKDRLQVAVNDSGKDYLRAGETLAAMKRRMLVSGDRASMLVVQRFQDAVDRPYRLVSGAAAILSDSAYDTDGIKGTSITGHTNADNLKLVAIRGKDLMKLAHALYQRAANEA

SEQ ID NO: 54813 - protein, 1045 aa, Stenotrophomonas sp. KCTC 12332
MKPDFNSRRYFGITRSKGKMYELGLPEESHIAVPDGVEPAALFPLSIGTLMDASAALNDAIDVEGGLADDLRDDIGFAASFFDAYLSSRFDASVSREVTLLASASYFLGQRPGSSLVLARRLQAESANPIEHLTIWVLRADWRAPPKLAVHWLSGMLQELSFRLMGHFNEGVPPESAIELLSELRQLTYASGSSREVVLVEVASAVVRLRLAGSAWILLPKFTGLDNAAWAGAIRRPGFPKELWPSQKLLGKAGLFAGRSGVVQMPTSAGKTRSVEVVLRSAFLADRTRVAVIVAPFRALSHEIAASLRQSFKGEDVKVNELSDALQLDFVDQLAELLGQTVPAARYLLVLTPEKLLYVLRQEPSLIAHIGMVVYDEGHQFDAGSRGITYELLLTEIKALLPATAQTVLISAVIKNASDVGTWLIGAEPNVVNGKSLLSTARSVAFATWSERLGQLLFFESDSYARPDYFVPRSIEAQELELHGRERNVRRFPQKGDDAWKDISLYLGIRLAPSGAVAVFCGRKDTASGLAERAVEVYERGFKLPSPAAASDANEVQRLTHLATEHFGADSMVTKAALLGVFVHHGTTPQGLRLSIEHAMQSELIKLVICTSTLAQGVNLPIRYLVVSGVNQGAERIKTRDFQNLIGRAGRAGMHTEGLVLFADPKVIDNRQRENWRLEAAVGLLKAENSEETSSSLLELLEAISSPDGRSTLPIATTEVLQAYFKRGEELAAWTRHMAVVHQSLGFDERSLAKEISRRQRLMVALESFLMANRGFESFENVLGKVRVLAGSTLAFSLADEAMKASLVQLFVLSATHIEQVVSEPARQMSYAKTLLGAFDAKIVDAWVQEHANALRTLATPDAWLTAIWPLFMTVVDDKLLTAMEPAGMPMQLAQGWMRGASYRELIAMTKDAKASKPWGKAARRKLNDADVLQFLEGCLGFDCPLIVAAVGQFLFGATGLNGEEAGALNDFQKSLAYGLPSRLAVSTYESGLADRQVAQEVAFQVRLTGYEGFNFRAALREHRDVVVRSLAAYPSYFDKVLDGL

SEQ ID NO: 54814 - protein, 259 aa, Enterobacter cloacae UCICRE 9; identical to SEQ ID NO: 52946

SEQ ID NO: 54815 - protein, 1145 aa, Enterobacter cloacae UCICRE 9
MIWRDGVLPPGAPDFSAQLSFDLHSYAYGLLGLGLRLLESDGDPNQARIAFEQAATALESVMANGNREEADRDFHFLLAAASYHLAHLSARAYSLLAIVADEANFSPIEHALTLLIRRDINSLRTRVYTFRLDGRGSDATITTFLQQHLTESIVADAAERDGKDFLFEGLNLALTDVFFGAFSMFLLALDRGEYTLLEKAIAQLRENLDICGELNLIPQWWVHRIAIHLLKDFWSNTFHEKVPLLPAGGVAPSWPVLRELFIGLLARRPRAEVDLWPSQIEAASRAVNQTDNLVVSLPTSAGKTRIAELSILRCLAGGRRAIVVTPLRALSAQTEATLQRTFGPLGKTISALYGSIGVSGFDEDAIRGRDIVVATPEKLDFALRNDPSLLDDVGLLVFDEGHMIGSGEREVRYEVQIQRLLRRKDADQRRIVCLSAILPDGDQMEDFSAWLRRDQPGGPIKNDWRPTRLRFGEVTWNSPTARLNLRVGEERPFVPRFLTGAAPPLFVPPKKRRNRLFPDNQQELSLATAWRLVRDGQTVLIYCPERRSVEPFAKVIVDLHSRGALESLLTVELTTLQIAIALGEEWLGTDSYILKCLRLGVALHHGALPTAYRKEIERLLREGILKVTISSPTLAQGLNLSATAVVMHSLYRHGEMIKVSEFKNVIGRAGRAYIDVEGLVLYPIFEDVNNRKHNKWVNLIEDHGAREMESGLIQLIFSLLSRMHSHIGGDLDHLIDYVVNNAAAWVFPEVAGEKVDEREQALKEWDRHMATLDTAILSLIGEADVPDDQIETALDSILQSSLWQRRLLRVNDESRAAYRTALFTRSRYIWANSTAVTRRGYFLAGLGLEAGRALDAIAPEANNLLMQANAALVVSDHEAAITAITDIAERVFTFYPFEPDTLPANWREILRGWLLGHPLAMMIAGEEVDALQFIEGGLGYRLPWAMEALRVRAAANGDTVGMPALALEDYELGLAVPAVETGTMNRSASILIQAGFNSRQAAIKAVTDTAANFTNGAELRDWLRSPGLAVYSAQPNWPTAEARTIWLEFIQEFAPSDNLSWARRDYLGNVNWFDVPAPSGTPVGLFHWNGQPLVLAPDGHAIGLLQHPLNLNRRGLVRATVAMNNGQINLSYLGPDDLWVVAKPH

SEQ ID NO: 54816 - protein, 269 aa, Methanosaeta concilii GP6
MGSNCSIEDKARTHPPADDRVDLFDRWLSIKKANLGKHVLIICKENNCSCDNIFDELQNVLLSHYVAPEITAKRLAELGAPRTAELLREHLPTTKTARSGDLGEILAIEFTERRLGFSVPIRRLRFKDGRNMALRGDDLIAIDRDLKGSLKFLKGESKSYARLTPTVIKEAADALDRYRGRPNRHSVLFVAERLRDKGDHDLAKDLDYAVLQSFRGCPFEHLLFTVSGTDPNTHLSNHLRECRNRTRRYAVGIYIVNHGDVIERLFSEQ

SEQ ID NO: 54817 - protein, 1141 aa, Methanosaeta concilii GP6
MTESAIELQNILEKAISPGFRDRLLDKGLARGLIWRNGELPTGAPSFGDSLTDDLLDYAYTVLAMALRLRSVNGDEILLQRAFLVAGEAIEAAVRNGDPFRIDRGFNLVSSAISFHLARYAARAYSMLPIGANDGNLAPTEKALVQLLRKSLDEMHEFVAAWLLDKEQWDERIAERLLNDADFDETDAISAVITRSFMRGLALFDHAITTGEEVSAMEAKRLLLFTAEAAKDMHAVSHWWTSTMAFHLIDDLWQMSLHRQIPKILSDDDDIEKWTTLRQAYIQRLRAAKKSAIELWPSQIEAAQRAIDQSDDLVVALPTSAGKTRIAELCILRTLASDLRIIYVTPLRALSAQVEQDLADTFLPLGISVSSLYGSAGIESSDADTLREVKIVVSTPEKLDFALRVDPTIIDNVGLIVLDEGHMLGPSEREVRYEALVQRLLRRSDAGSRRIVCLSALFPPPEEMSDLVSWLRRDEPGTAVYSTWRPTRQRFGVIRWVRDAARLDIKVETEGPFVKRFVETKVPPAGSRRFNSFPHDKDELTLAAAWQFVDQGKDVLIYCTMRRSVEKLGRVILKCIRQGMLKPLRLMNQDIQDVMAAGAEWLGPDHPAVQCLKYGIALHHGHLPRQFLNELEKLLRKGDIRLTIASPTLAQGLNLSASVLLVPSIWRNRDIIPATEFANVIGRAGRAFVDVDGIVLHVIWEDDGKSEARRLYHWHDLVSKAKAPEISSGLLLLANKIFQKISDIVGAPLEEVIEYLTGHGDVWDFTDSQLEQVEMKLEDWEHDIASLDAAILALLDTGIEEECLDNELDNVLEGSLFSRKLAYYEHNMQMLVRRFVKARAHCIWRQTSTSQRRGYHVAGVGLRAGRFLDANIANLVDLLLRAEAAVVAGDSAGATDSIVEFARLVFQTEPFRPSGTMPDYWENALREWIEGKSASKIVGLDSSKGVDLLQEAISYRLPWAMEAVRVHAIAVRQDGAEQIKGHAAMAAEVGNANLSVIKLLRAGLNSREAAITAVTKTEAAFIDYREMLEWLRSDQVESMSKMENWPTKQSRPAWLQFFSTKKGNRLKLTCQTQVVQVEWFIDAPPINTHVIVEPDARLVLTTDYVRLGVLITELSIQSHDIVNAWVADCPNTVVVEYFGPS

SEQ ID NO: 54818 - protein, 258 aa, Candidatus Nitrosoarchaeum limnia BG20
MLKTWLEVSKRPSGTFRFNVVNINEKNSRDLENINEIFSKIIINESVGYDTAKKLAKKYGWNKILESIITPRLTRTSNMKKGKFGEMLESSVLETFFDYVIPIKKWRYAISSDQSLPRCDIIAVKLEGQKIIEMSFIESKLTTTSDSNKIIEAHSQLMEEKKSGFSDILSFIILRLIDEKHPLQEAFIEYTLIKDKPNDSYRIAATYDNAKWNENYLTKLNDIHTKSTPELTVDLIRIEELEKVVKTVYEKKGWKPIE

SEQ ID NO: 54819 - protein, 1143 aa, Candidatus Nitrosoarchaeum limnia BG20
MSSIPKKWIEQIASSSGDDDFQNDVAQITSKSMLKEITDDMPSYAWNYNESVIIRNATTLSLMIQNMALENPEHLKNIGQSTLRLATLWENLARLHEKMDPVLALMNSAVCYQLAGYQANATCLARKASKIMKNDNSTSYLSSLFLQRHFLQLRIQCQQCMQEPTETDNEFEVIRKLGLASLADGYQNITDYFLRGNESSIEKAEKSFSNSEKLFSELFMIEDSNLVRKIRSLVKPMIQTSTWKILGDIKQENLVWDRYLRLLARGIGDDLLQSTSISEIWPSQKNAIDSGLFNSNSNKVIKMPTSAGKTRIAELAMVQMLAKNPGKKCIYVAPYRALVSELEDTFLNLFGDLGFRVSTIVGTYEQDPFEKKLIEDADVLVLTPEKLDLVLRSHSELLDDVKLFILDEGHIIDDDKRGIKLELLLTRLKRKLINTRFIFISAVLSEETVQEYLLWFNGTAEDEIKSDWRPSIQQHARFEWSSRKNTGLLRYEPRKENKLIDNFVPGIITHKKYRIKNKESGRYRNTVFPTTAKTQTAAELAYKFSDLGPVLVFTTQVNWVLSIANLLLKRIELTKDIEEQLPSHFQHNDSRSLTISKEWLGNDHPITQLLQNGIAIHHGRLPDILRRSIESDFRDKKFRVIVSTNTLAQGVNLPIKTILIHSCRRRRMDNTQEMISVSDYWNVAGRAGRAGQETEGTTVHIINTPEDQADYSYYLSQRNKLEHVRSALFQILNDLAGERLSINSLREKIDAEVLALLMEEGGFDSLNKVIDEIIESSLVNFQSKNTSEIKLLIQGFKTISEKISQEVPAEFIGVFSSTGLSSSSCLVLKNFIELNSSTIKQFYNSPSVENNLEFLSMILDALSEIIEMEPISTFDGDVLDLLKKWIMGDDINELISSVKSQDKTEIAKFIEEYFGYKLPWGISSFLQIAQKIFNISEEKVPNEMRYLSSMVKYGVPTYEASWCMMMGIPFRKLALRISSKYLSLSNESEYSKFIEWISNIDSESLQKDFGIKSPFLEDISNALNRNGVNPLLKNKIKLEEIIETPLSITGIRFENRYVVANKIKESETVVLSRDYDNAYDRNAIKVFSSNKSELGFLSRNVAQYLAPYLDCGIEFNAKVFSIIYKKIPEIEIKINTLPNYSSP

SEQ ID NO: 54820 - protein, 397 aa, Stigmatella aurantiaca DW4/3-1
MTTSADATGATATPPTSTTDSVGAAHESIEEALKRLARGTPTALAGLLHDVESHVTVDGTLVTAHCHCLKLDGNGRPRTEDLVKVIAEHVLDYAIPRSHIREAAEELQRSRSTQKLVRLVDEARSLFTDLEQSGEGGELLLFAFAEKILHLPQLICKMSLKTNTRMHVHGADGLHAGVDPTTGKLLLYWGESKIYGDVTGAVRECLASIRPMLAEYSSGQRDLQLLQRHADLDDPALEAALKKYLDPDADEFNSLEFRGLCLVGFDCDAYPTGPSTTQLAAMAKQIATTLPTWRGHVKKRLTEEKLDAFAMHFLFVPFPSADGFRQLLRDKLGVSKQAMPAAPTAVPSAPVSTPAVVAAKAAKPTPTRRTTPAPVSGVTTPRKARATKPRGTPSGAA

SEQ ID NO: 54821 - protein, 875 aa, Stigmatella aurantiaca DW4/3-1
MALRDLGPWLLDVPGFRRQADKVLVDAACGELGTDFVRLDQHRDLEHDWRYLLLAASVLAQSTDGRCQLAALRIAQSCLSGANATEVQRDSAALVLDALANHPAIKLAENRQLLKPSFVTRLPGAALIEYTRRWYENSVAVHGNKLLRVNRFQRRLWDEVRNQGWMSVSAPTSAGKSFILARWICELMRTSTVATVVYVVPTRALISQVERDLRDLFKDEGLQDVSVSALPILKADSDAEPVRRRVFVFTQERLHILLSAKPDLAVRALIVDEAHKVGDRQRGVLLQDVIERVSAENPELRVLFASPMTSNPGLLLEDAAGGPANPAFASDDVTVAQNLFWVSQRPRRTTEWDVSLCERSETIALGTVSLKASPTPASKRLPFVAHAISATSPGNIVYVNRAADAETVAGQLYGLMGVDCEAEEGAALKELIELAQHVVHKKFLLATYLRRGVAFHYGNMPLLLREEIERLFTEGIIKYLVCTSTLIEGVNMACRNIFMRGPTKGIGNPLSAEDFWNLAGRAGRWGKEFQGNIFCVDADRKEIWGENGPPRERTRQPIRRTTDEVLRIEVAPQFVKFIKDGAPLETLKEHPEFEPVFAYLAGVHVRYGGLLEARWAGRYDETMLSELAAVVEEAVDGLAIEHDIIVRNPGISPFALDELLKYFREREGDVEELLPSEPSSKDAAKVYAGIFGRLCRRACPKLGPEGPRAFVLALLVTRWMSGFPLSRLIDDRLKRKGDDKAAAEIRNVMNDVEQIARFEAPRGLSAYCDVLRQFLREVEREDLIERIPPFNVFLELGVSLQTQIALIGVGLSRTSSVALSEIITEDKLTEPQVLQWLRDNEELWRNFPLPSLVKKEVERVLNQHKERAGVKEASS

SEQ ID NO: 54822 - protein, 397 aa, Stigmatella aurantiaca DW4/3-1; identical to SEQ ID NO: 54820

SEQ ID NO: 54823 - protein, 876 aa, Stigmatella aurantiaca DW4/3-1
  MOD_RES (152)..(153): Any amino acid
MALRDLGPWLLDVPGFRRQADKVLVDAACGELGTDFVRLDQHRDLEHDWRYLLLAASVLAQSTDGRCQLAALRIAQSCLSGANATEVQRDSAALVLDALANHPAIKLAENRQLLKPSFVTRLPGAALIEYTRRWYENSVAVHGNKLLRVNRXXVRRLWDEVRNQGWMSVSAPTSAGKSFILARWICELMRTSTVATVVYVVPTRALISQVERDLRDLFKDEGLQDVSVSALPILKADSDAEPVRRRVFVFTQERLHILLSAKPDLAVRALIVDEAHKVGDRQRGVLLQDVIERVSAENPELRVLFASPMTSNPGLLLEDAAGGPANPAFASDDVTVAQNLFWVSQRPRRTTEWDVSLCERSETIALGTVSLKASPTPASKRLPFVAHAISATSPGNIVYVNRAADAETVAGQLYGLMGVDCEAEEGAALKELIELAQHVVHKKFLLATYLRRGVAFHYGNMPLLLREEIERLFTEGIIKYLVCTSTLIEGVNMACRNIFMRGPTKGIGNPLSAEDFWNLAGRAGRWGKEFQGNIFCVDADRKEIWGENGPPRERTRQPIRRTTDEVLRIEVAPQFVKFIKDGAPLETLKEHPEFEPVFAYLAGVHVRYGGLLEARWAGRYDETMLSELAAVVEEAVDGLAIEHDIIVRNPGISPFALDELLKYFREREGDVEELLPSEPSSKDAAKVYAGIFGRLCRRACPKLGPEGPRAFVLALLVTRWMSGFPLSRLIDDRLKRKGDDKAAAEIRNVMNDVEQIARFEAPRGLSAYCDVLRQFLREVEREDLIERIPPFNVFLELGVSLQTQIALIGVGLSRTSSVALSEIITEDKLTEPQVLQWLRDNEELWRNFPLPSLVKKEVERVLNQHKERAGVKEASS

SEQ ID NO: 54824 - protein, 289 aa, Rubinisphaera brasiliensis DSM 5305
MVSRPQQFLSVRVTDCSSNPELSALCAGFELGSWRAEQLASHLIEWLPDFALTHSEIESLGPGNLVRLLSKAALTVYNAKTASYAKKEKGAEIGEILLHIATCHFLGSIPAISKYFYKDSQNDLVKGFDAVHVVPADDGLELCLGEVKFYKSISNAIRDVAAELETHLKRDYLRSEFALITNKIDNTWPYASDLELLLDKNTSLDDVFKRTAIPVLLGYECPLYTRHACISDQFIADLETKVQKHYASFSKKIQLPEMRVHLFLFPMKSKASLIKAFDKKLLQCQSIIP

SEQ ID NO: 54825 - protein, 708 aa, Rubinisphaera brasiliensis DSM 5305
MPIDNSLASRVRKNISSLPTQSGELFSLLSQLCAVVNSDPQDPVSHDLVLRAMEHREAFGEMSSVLDGLVRNIGLFPYLDRESLSLADAIAYESHRPIGFDDDIVFHRAQAHIYHLLLRGENVALSAPTSFGKSLIIDAIIASGKHSHIAIVVPALALIDETRRRLASRFGNKYKIITRTSQSPSPQNIYILTQERVLEFPNFDSLDFFVIDEFYKLSVDSGDKERAILLNNALYKLLKTGAQFYMLGPNIDAMNTQNHMRVELRFVKEPHYHTVATQVHRVKAGDGELATLTNLCNKIEGATIIFCKSPDRAAEVAKHLSTQRNLRLSKSLQNAIEWIDTHFHPEWHFSEALSKGIGVHHGRIPRSLGQYVVRKFNDGEIDILVCTSTLIEGVNTKARNIVVFDNTINKKRIDRFTFNNIKGRSGRMFEFFVGHVYVFHVDPQQDLPRIEIPIFSPDESTPDSLLVQVDEKDLNDKAVEKRRRFQEQDVLPFEIIQRNNGVDPETQIELAIAIGELTSNKMKLLSWKQVPNYRQLSFVCDLIYEHLDGRSVRGGSLWKSTQLAARINQLKNRRTLREMIVTQRDYADSFDESVTSVLNFLRTWASFHFPRKLRVIHNIQEHVLPQFGIAAGDYELFSYLVENWHLDPVITALDEYGLPVELGRKLERQIGTNGDFDEAIIRLKNLDISTLKLSDFERELLEDVQSFL

SEQ ID NO: 54826 - protein, 325 aa, Azospirillum brasilense
MDTPISLEEALDLLAGKHDKFNARVRTVSSIPVDGFPRVKASFYYLAFQDGLPTIEQFVKYLKHQLVAFCIPRRDRMRVRAQMQADPDEAERLVLEQFEKARDLFIKAKEQQKKAGEPGELILFVLLEWALRAPQLISKMYLKTSREMPVHGTDGIHVGLHDDGMTLLLYWGESKLYADLSDALDAVFESVGDFIKDDGKRNREIDIVRDHMNLGEDQQALRDTLLDYLDPYSEKGNQRRHVFACFVGFDYARYEQLRKLHPDQVEDEFRKFFEKRVAEAVELLRRRLGAVGMEVVNFEFFLIPFPSVNAFRTAFFKHTGIGDAG

SEQ ID NO: 54827 - protein, 685 aa, Azospirillum brasilense
MVRRTALGSSEIVLTDFQWDVWGALDEGASLGTSAPTSAGKSFLLQAFIRRLWAAPPRPRVVYIVPTRALINQVSGELVAALRSDGADEVGVVTVPLTADQPVPNDALFVMTQERLQLILTNHPEAAFDLVIVDEAQAVGDGGRGVILTAVLEELTRRNAAVQMFFASPNLSNPQIFGRLFGLKNYRHYKSRDVAVAQNLIHLDTSGADPRRIRVSLNMGGAKQPLGELIASDDLTGVKQATVHLANLFGQGGQSLVYAKGAADCQSLATGLMQLEAARAETSGSPEPSAERRQLSAFIRESVHPKFALAETVLSGVGFHYGAMPPLLRRTIEDAFRDGELKFLVSTSTLLHGLNLPARSLFLNRPRRGNKSPLESVDFWNLAGRAGRLGKEFEGDVYLIDYDDWPSQPLTGSRKVEIRSTLEEHVRERPEELIAYIGEPDRKPDRSGADEFENTFTKLYADHRAGHLDEALNRLEVPPRSEVRIQLSDALRAAEQLVRLDDSVVRASPTVSVYRQQRLYDYMLAKIAKEGPEYLMPVHPLSPGAYERLVAIFKRCHTHIFQWPAADRSHLRAAAFAHPWMRGAPLPQIIDAHFEYESRRNERYTTSNAILATLKAIEEDVRFTYVRLTGCYNTLLKRALVEKGHAELAERIVPIPMFLEVGACSQTMKSFIGMGLSRIFAHFGA

SEQ ID NO: 54828 - protein, 314 aa, Campylobacter coli RM2228
MQDKEIENTTTINTYVKNKDNDNFIIILNETLCCQYHHFLLSISNQFESKKWKMKNFRNFIITNLKECALTEQERQSLAGNEGEILDKAISKLRIDERSGEIGEIFLHGIMREYYNALPIVPKIFYKQNRNMEAFGFDSVHLTIENQEYHLWLGESKLYKNLDDAIRKATKSLKDNLSDETILNEARIIANLHELDNLAKHHNIETSTLTNFKQIINGNINLDNLKGILHVPISIIYDCDYTKKIEEITDDYKTTIKNFHKENGNKISEEIKNLLNEITYIDRIKFHIILFPIPDKEEIISKINKIFESYRNAD

SEQ ID NO: 54829 - protein, 704 aa, Campylobacter coli RM2228
MPTNKQIGEKIFDKCTEIYEILNNDKEAEAKEKLFYLLDEIQDKALYPPILNHLIRQFGLYPYMNQDTSILEDKFLLECFKTDIGEDEPKVLHREQSRVLKRLLSNESLILSAPTSFGKSFIIDALIAMKKPKNILIIVPTISLLDEARRRLVRKFYNYNITTTTQQTNLENNNIFIFSPERAVEYFSFINKENIRLDFFIVDEFYKISKDYENERFAPLQNAILKYTSISDQRYYICPNIDKIKNENSILCKGMKFECLDFNTVFIHINKCYKNKDFEKEEKILEIVKKDEKTLVYTQSQSNIKKVCEILVENTIIENSNALLENFAKWLSKYYGEHYLNDTLKIGVGIHHGRLHRCLSQLQVRLFEGKDLLKTIVSTSSLIEGVNIPAKNLILWDKKNGAKNINHFTYKNIIGRSGRMFKYFIGEVYLFESPNEDDNQEKILDVEIKSESLSINDEINNEIPDNIQVEVENNQLEIIKLIGRDKFNLLKKETLLKNDLGVIIKIIQILQSKDFNSEIFTYLFNDEPDKWYILSRIASIREFHCKNIGDINTVELVKKLSQNWTKSLPELIKDMRIDLDDFFKFENHVAFKIASLFSDINTLQKILYPEKEIDISSFVTKLSNVFLLSVVYTLEEFGLPRIISKKLHECGFINFENKELTLEQALDKFKEHTADDIINILKEKNLYDDFEDYILNYFYEGLGQ

SEQ ID NO: 54830 - protein, 314 aa, Campylobacter coli 1417
MQDNEIENTTAINTYVKNKDNDNFIIILNETLCCQYHHFLLSISNQFESKKWKMKNFRNFIITNLKECALTEQERQSLAGNEGEILDKAISKLRIDERSGEIGEIFLHGIMREYYNALPIVPKIFYKQNRNMEAFGFDSVHLTIENQEYHLWLGESKLYKNLDDAIRKATKSLKDNLSDETILNEARIIANLHELDNLAKHHNIETSTLTNFKQIISGNINLDNLKGILHVPISIIYDCDYTKNIEEITDDYKTTIKNFHKENGNKISEEIKNLLNEITYIDRIKFHIILFPVPDKEEIISKINKIFESYRNAD

SEQ ID NO: 54831 - protein, 704 aa, Campylobacter coli 1417
MPTNEQIGEKIFDKCVEIYEILNNDKEAEAKEKLFYLLDEIQDKALYPPILNHLIRQFGLYPYMNQDTSILEDKFLLECFKTDIGEDEPKVLHREQSRVLKRLLSNESLILSAPTSFGKSFIIDALIAMKKPKNILIIVPTISLLDEARRRLVRKFYNYNITTTTQQTNLENNNIFIFSPERAVEYFSFINKENIRLDFFIVDEFYKISKDYENERFAPLQNAILKYTSISDQRYYICPNIDKIKNENSILCKGMKFECLDFNTVFIHINKCYKNKDFEKEEKILEIVKKDEKTLVYTQSQSNIKKVCEILVENTIIENSNALLENFAKWLSKYYGEHYLNDTLKIGVGIHHGRLHRCLSQLQVRLFEGKDLLKTIVSTSSLIEGVNIPAKNLILWDKKNGAKNINHFTYKNIIGRSGRMFKYFIGEVYLFESPNEDDNQEKILDVEIKSESLSINDEINNEIPDNIQVEVENNQLEIIKLIGRDKFNLLKKETLLKNDLGVIIKIIQILQSKDFNSEIFTYLFNDEPDKWYILSRIASIREFHCKNIGDINTVELVKKLSQNWTKSLPELIKDMRIDLDDFFKFENHVAFKIASLFSDINTLQKILYPEKEIDISSFVTKLSNVFLPSVVYTLEEFGLPRIISKKLHECGFINFENKELTLEQALDKFKEHTADDIINILKEKNLYDDFEDYILNYFYEGLGQ

SEQ ID NO: 54832 - protein, 314 aa, Campylobacter coli LMG 23336
MQDNEIENTTAINTYVKNKDNDNFIIILNETLCCQYHHFLLSISNQFESKKWKMKNFRNFIITNLKECALTEQERQSLAGNEGEILDKAISKLRIDERSGEIGEIFLHGIMREYYNALPIVPKIFYKQNRNMEAFGFDSVHLTIENQEYHLWLGESKLYKNLDDAIRKATKSLKDNLSDETILNEARIIANLHELDNLAKHHNIETSTLTNFKQIINGNINLDNLKGILHVPISIIYDCDYTKKIEEITDDYKTTIKNFHKENGNKISEEIKNLLNEITYIDRIKFHIILFPIPDKEEIISKINKIFESYRNAD

SEQ ID NO: 54833 - protein, 704 aa, Campylobacter coli LMG 23336
MPTNKQIGEKIFDKCTEIYEILNNDKEAEAKEKLFYLLDEIQDKALYPPILNHLIRQFGLYPYMNQDTSILEDKFLLECFKTDIGEDEPKVLHREQSRVLKRLLSNESLILSAPTSFGKSFIIDALIAMKKPKNILIIVPTISLLDEARRRLVRKFYNYNITTTTQQTNLENNNIFIFSPERAVEYFSFINKENIRLDFFIVDEFYKISKDYENERFAPLQNAILKYTSISDQRYYICPNIDKIKNENSILCKGMKFECLDFNTVFIHINKCYKNKDFEKEEKILEIVKKDEKTLVYTQSQSNIKKVCEILVENTIIENSNALLENFAKWLSKYYGEHYLNDTLKIGVGIHHGRLHRCLSQLQVRLFEGKDLLKTIVSTSSLIEGVNIPAKNLILWDKKNGAKNINHFTYKNIIGRSGRMFKYFIGEVYLFESPNEDDNQEKILDVEIKSESLSINDEINNEIPDNIQVEVENNQLEIIKLIGRDKFNLLKKETLLKNDLGVIIKIIQILQSKDFNSEIFTYLFNDEPDKWYILSRIASIREFHCKNIGDINTVELVKKLSQNWTKSLPELIKDMRIDLDDFFKFENHVAFKIASLFSDINTLQKILYPEKEIDISSFVTKLSNVFLPSVVYTLEEFGLPRIISKKLHECGFINFENKELTLEQALDKFKEYTADDIINILKEKNLYDDFEDYILNYFYEGLGQ

SEQ ID NO: 54834 - protein, 313 aa, Campylobacter coli LMG 23344
MQDKEIENTTTINTYVKNKDNDNFIIILNETLCCQYHFLLSISNQFESKKWKMKNFRNFIITNLKECALTEQERQSLAGNEGEILDKAISKLRIDERSGEIGEIFLHGIMREYYNALPIVPKIFYKQNRNMEAFGFDSVHLTIENQEYHLWLGESKLYKNLDDAIRKATKSLKDNLSDETILNEARIIANLHELDNLAKHHNIETSTLTNFKQIINGNINLDNLKGILHVPISIIYDCDYTKKIEEITDDYKTTIKNFHKENGNKISEEIKNLLNEITYIDRIKFHIILFPIPDKEEIISKINKIFESYRNAD

SEQ ID NO: 54835 - protein, 704 aa, Campylobacter coli LMG 23344
MPTNKQIGEKIFDKCTEIYEILNNDKEAEAKEKLFYLLDEIQDKALYPPILNHLIRQFGLYPYMNQDTSILEDKFLLECFKTDIGEDEPKVLHREQSRVLKRLLSNESLILSAPTSFGKSFIIDALIAMKKPKNILIIVPTISLLDEARRRLVRKFYNYNITTTTQQTNLENNNIFIFSPERAVEYFSFINKENIRLDFFIVDEFYKISKDYENERFAPLQNAILKYTSISDQRYYICPNIDKIKNENSILCKGMKFECLDFNTVFIHINKCYKNKDFKKEEKILEIVKKDEKTLVYTQSQSNIKKVCEILVENTIIENSNALLENFAKWLSKYYGEHYLNDTLKIGVGIHHGRLHRCLSQLQVRLFEGKDLLKTIVSTSSLIEGVNIPAKNLILWDKKNGAKNINHFTYKNIIGRSGRMFKYFIGEVYLFESPNEDDNQEKILDVEIKSESLSINDEINNEIPDNIQVEVENNQLEIIKLIGRDKFNLLKKETLLKNDLGVIIKIIQILQSKDFNSEIFTYLFNDEPDKWYILSRIASIREFHCKNIGDINTVELVKKLSQNWTKSLPELIKDMRIDLDDFFKFENHVAFKIASLFSDINTLQKILYPEKEIDISSFVTKLSNVFLPSVVYTLEEFGLPRIISKKLHECGFINFENKELTLEQALDKFKEYTADDIINILKEKNLCDDFEDYILNYFYEGLGQ

SEQ ID NO: 54836 - protein, 314 aa, Campylobacter coli H6; identical to SEQ ID NO: 54832

SEQ ID NO: 54837 - protein, 704 aa, Campylobacter coli H6; identical to SEQ ID NO: 54833

SEQ ID NO: 54838 - protein, 314 aa, Campylobacter coli H8; identical to SEQ ID NO: 54832

SEQ ID NO: 54839 - protein, 704 aa, Campylobacter coli H8; identical to SEQ ID NO: 54833

SEQ ID NO: 54840 - protein, 314 aa, Campylobacter coli H9; identical to SEQ ID NO: 54832

SEQ ID NO: 54841 - protein, 704 aa, Campylobacter coli H9; identical to SEQ ID NO: 54833

SEQ ID NO: 54842 - protein, 314 aa, Campylobacter coli K3
MQDKEIENTTTINTYVKNKDNDNFIIILNETLCCQYHHFLLSISNQFESKKWKMKNFRNFIITNLKECALTEQERQSLAGNEGEILDKAISKLRIDERSGEIGEIFLHGIMREYYNALPIVPKIFYKQNRNMEAFGFDSVHLTIENQEYHLWLGESKLYKNLDDAIRKATKSLKDNLSDETILNEARIIANLHELDNLAKHHNIETSTLTNFKQIISGNINLDNLKGILHVPISIIYDCDYTKNIEEITDDYKTTIKNFHKENGNKISEEIKNLLNEITYIDRIKFHIILFPVPDKEEIISKINKIFESYRNAD

SEQ ID NO: 54843 - protein, 709 aa, Campylobacter coli K3
MRVTEMPTNEQIGEKIFDKCVEIYEILNNDKEAEAKEKLFYLLDEIQDKALYPPILNHLIRQFGLYPYMNQDTSILEDKFLLECFKANIGEDEPKVLHREQSRVLKRLLSNESLILSAPTSFGKSFIIDALIAMKKPKNILIIVPTISLLDEARRRLVRKFYNYNITTTTQQTNLENNNIFIFSPERAVEYFSFINKENIRLDFFIVDEFYKISKDYENERFAPLQNAILKYTSISDQRYYICPNIDKIKNENSILCKGMKFECLDFNTVFIHINKCYKNKDFKKEEKILEIVKKDEKTLVYTQSQSNIKKVCEILVENTIIENSNALLENFAKWLSKYYGEHYLNDTLKIGVGIHHGRLHRCLSQLQVRLFEGKDLLKTIVSTSSLIEGVNIPAKNLILWDKKNGAKNINHFTYKNIIGRSGRMFKYFIGEVYLFESPNEDDNQEKILDVEIKSESLSINDEINNEIPDNIQVEVENNQLEIIKLIGRDKFNLLKKETLLKNDLGVIIKIIQILQSKDFNSEIFTYLFNDEPDKWYILSRIASIREFHCKNIGDINTVELVKKLSQNWTKSLPELIKDMRIDLDDFFKFENHVAFKIASLFSDINTLQKILYPEKEIDISSFVTKLSNVFLPSVVYTLEEFGLPRIISKKLHECGFINFENKELTLEQALDKFKEYTADDIINILKEKNLYDDFEDYILNYFYEGLGQ

SEQ ID NO: 54844 - protein, 314 aa, Campylobacter coli K7; identical to SEQ ID NO: 54842

SEQ ID NO: 54845 - protein, 709 aa, Campylobacter coli K7; identical to SEQ ID NO: 54843

SEQ ID NO: 54846 - protein, 314 aa, Campylobacter coli IPSID-1; identical to SEQ ID NO: 54828

SEQ ID NO: 54847 - protein, 704 aa, Campylobacter coli IPSID-1; identical to SEQ ID NO: 54833

SEQ ID NO: 54848 - protein, 314 aa, Campylobacter coli; identical to SEQ ID NO: 54832

SEQ ID NO: 54849 - protein, 704 aa, Campylobacter coli; identical to SEQ ID NO: 54833

SEQ ID NO: 54850 - protein, 314 aa, Campylobacter coli; identical to SEQ ID NO: 54832

SEQ ID NO: 54851 - protein, 704 aa, Campylobacter coli; identical to SEQ ID NO: 54833

SEQ ID NO: 54852 - protein, 314 aa, Campylobacter coli; identical to SEQ ID NO: 54830

SEQ ID NO: 54853 - protein, 704 aa, Campylobacter coli; identical to SEQ ID NO: 54831

SEQ ID NO: 54854 - protein, 314 aa, Campylobacter coli CVM N13165; identical to SEQ ID NO: 54830

SEQ ID NO: 54855 - protein, 704 aa, Campylobacter coli CVM N13165; identical to SEQ ID NO: 54831

SEQ ID NO: 54856 - protein, 314 aa, Campylobacter coli; identical to SEQ ID NO: 54832

SEQ ID NO: 54857 - protein, 704 aa, Campylobacter coli; identical to SEQ ID NO: 54833

SEQ ID NO: 54858 - protein, 314 aa, Campylobacter coli; identical to SEQ ID NO: 54832

SEQ ID NO: 54859 - protein, 704 aa, Campylobacter coli; identical to SEQ ID NO: 54833

SEQ ID NO: 54860 - protein, 314 aa, Campylobacter coli; identical to SEQ ID NO: 54832

SEQ ID NO: 54861 - protein, 704 aa, Campylobacter coli; identical to SEQ ID NO: 54833

SEQ ID NO: 54862 - protein, 314 aa, Campylobacter coli; identical to SEQ ID NO: 54832

SEQ ID NO: 54863 - protein, 704 aa, Campylobacter coli
MPTNKQIGEKIFDKCTEIYEILNNDKEAEAKEKLFYLLDEIQDKALYPPILNHLIRQFGLYPYMNQDTSILEDKFLLECFKTDIGEDEPKVLHREQSRVLKRLLSNESLILSAPTSFGKSFIIDALIAMKKPKNILIIVPTISLLDEARRRLVRKFYNYNITTTTQQTNLENNNIFIFSPERAVEYFSFINKENIRLDFFIVDEFYKISKDYENERFAPLQNAILKYTSTSDQRYYICPNIDKIKNENSILCKGMKFECLDFNTVFIHINKCYKNKDFEKEEKILEIVKKDEKTLVYTQSQSNIKKVCEILVENTIIENSNALLENFAKWLSKYYGEHYLNDTLKIGVGIHHGRLHRCLSQLQVRLFEGKDLLKTIVSTSSLIEGVNIPAKNLILWDKKNGAKNINHFTYKNIIGRSGRMFKYFIGEVYLFESPNEDDNQEKILDVEIKSESLSINDEINNEIPDNIQVEVENNQLEIIKLIGRDKFNLLKKETLLKNDLGVIIKIIQILQSKDFNSEIFTYLFNDEPDKWYILSRIASIREFHCKNIGDINTVELVKKLSQNWTKSLPELIKDMRIDLDDFFKFENHVAFKIASLFSDINTLQKILYPEKEIDISSFVTKLSNVFLPSVVYTLEEFGLPRIISKKLHECGFINFENKELTLEQALDKFKEYTADDIINILKEKNLYDDFEDYILNYFYEGLGQ

SEQ ID NO: 54864 - protein, 314 aa, Campylobacter coli; identical to SEQ ID NO: 54828

SEQ ID NO: 54865 - protein, 704 aa, Campylobacter coli; identical to SEQ ID NO: 54829

SEQ ID NO: 54866 - protein, 314 aa, Campylobacter coli; identical to SEQ ID NO: 54828

SEQ ID NO: 54867 - protein, 704 aa, Campylobacter coli; identical to SEQ ID NO: 54833

SEQ ID NO: 54868 - protein, 314 aa, Campylobacter coli; identical to SEQ ID NO: 54832

SEQ ID NO: 54869 - protein, 704 aa, Campylobacter coli; identical to SEQ ID NO: 54833

SEQ ID NO: 54870 - protein, 314 aa, Campylobacter coli; identical to SEQ ID NO: 54832

SEQ ID NO: 54871 - protein, 704 aa, Campylobacter coli; identical to SEQ ID NO: 54833

SEQ ID NO: 54872 - protein, 314 aa, Campylobacter jejuni subsp. jejuni ATCC 33560
MQGKEIENITTINTYVKNKDNSNFTIMLNETLCRQYHHFLLSISNQFESKKWKMKNFRNFIITNLKECALTEQERQSLAGNEGEILDKAISKLKIDDKSGEVGEIFLHGIMREYYNALSIVPKIFHKQNRNMEALGFDSVHLTIENQECHLWLGESKLYDNLNGAITNVIKSIKDNLSDEIILNEARIIANPHELDNLAEHHNIQTSTLTNFKKIINGNINLDELKSILHVPISIIYDCNYTKSIEEITDDYKTAIKNFHKKNGNKISEKIKKLSNEITYIDRIKFHIILFPVPDKKEIMSKINQIFRSYRNAN

SEQ ID NO: 54873 - protein, 706 aa, Campylobacter jejuni subsp. jejuni ATCC 33560
MLTNEQIFDECVKIYENLNDNNKETEAKEKLFYLLDEIQDKALYPPILNHLIRQFGLYPYMNQDTSILTDRFLLECFKTDIGEDEPKVLHREQSRVLKRLLSNESLILSAPTSFGKSFIIDALIAMKKPKNVLIIVPTISLLDEARRRLVRKFTPDYNIITTSGAAPKENNIFILTQERVLEYLDFIKANRIDLFIVDEFYKIVGDITRSDILQNAIKQVSSYSKQSYYLCPNVKQFKENSLKYQFLKNIEKVSIDFNTVILNIHDLSHKKEKKEYILKNILNENKNQKTMIYVKSKPESREVCKYIKEYVTTNNDQLNNFSNWLKKHYWQDWDFANYLANGIGQHNSAMHRFIQQLQVKLFSENEYMNIMATTTSLIEGVNTATKNIIIWNDSVEGNKDKLTSMQYKNIIGRCGRMFKYFVGNVYLLESNKETLKNEQETMEIIPQEEFLYRNDLETFDVKTEMEKNLKNLLNNENKFHQIMSKMKNYTILMDLESIVTIVKNAELFEKSIRYLNSDKPDEWGFIKKKEIQEIVFEILNEKSKNAYFKIIDYGKYNYCGVKQTIDNINKKARQEWYKIDINKYFNIERIISFDIASFFNDLNQIMQILYPEKKIDISSFVTKLSNVFLPSVVYTLEEFGLPRIISKKLHQCGFIDFENNDLTIEQALNKFKECTAIDTVNILKENSLYDDFEDYILNYFYDGLGQ

SEQ ID NO: 54874 - protein, 314 aa, Campylobacter jejuni subsp. jejuni 140-16
MQGKEIENITTINTYVKNKDNSNFTIMLNETLCRQYHHFLLSISNQFESKKWKMKNFRNFIINNLKECALTEQERQSLAGNEGEILDKAISKLKIDDKSGEVGEIFLHGIMREYYNALSIAPKIFHKQSRNMEALGFDSVHLTIENQECHLWLGESKLYDNLNGAITNVIKSIKDNLSDEIILNEARIIANPHELDNLAEHHNIQTSTLTNFKKIINGNINLDELKSILHVPISIIYDCNYTKSIEEITDDYKTAIKNFHKKNGNKISEKIKKLSNEITYIDRIKFHIILFPVPDKKEIMSKINQIFRSYRNAN

SEQ ID NO: 54875 - protein, 701 aa, Campylobacter jejuni subsp. jejuni 140-16
MLTNEQIFDECVRIHENLNDNKETEAKEKLFYLLDEIQDKALYPPILNHLIRQFGLYPYMNQDTSILTDRFLLECFKTDIGEDEPKVLHREQSRVLKRLLSNESLILSAPTSFGKSFIIDALIAMKKPKNVLIIVPTISLLDEARRRLVRKFTPDYNIITTSGATPKENNIFILTQERVLEYLDFIKANRIDLFIVDEFYKIVGDVRSDILQNIIKQVSSYSKQSYYLCPNIKQFNEKSSKYQFLKNIEKVLIDFNTVALKTHDLSHKKEKKEYMLKNILNENKNQKTMIYIKSKSESKKVCKNIKNYINATDNQLKSFSNWLKKHYWQDWDFAECLANGIGQHNAAMHRFIQQLQVKLFSENEHMNIMVTTTSLIEGVNTATKNIVIWNDSVARDKDKLTSMQYKNIIGRCGRMFKYFVGNVYLLESNKETLKNEQETMEIIPQEEFLYRNDLETFNTKTKMEENLKNVLNDKNKFHQIMSKMKNYSILMDLNNILTIVENAELFEKSIEYLNSDVPDEWGFIKKKEIREIVFKVLNEKSKNAYFKIIDYGKHNYDGVKQTINNTSKQERYKINISQYFDIEKAISFDIASFFNDLNQIMQILYPEKGIDISSFVTKLSNAFLPSVVYTLEEFGLPRIISKKFHQCGFIDFENKDLTIEQALNKFKECTADDIINILKEKNLYDNFEDYILNYFYEGLGQ

SEQ ID NO: 54876 - protein, 314 aa, Campylobacter jejuni subsp. jejuni 1893; identical to SEQ ID NO: 54874

SEQ ID NO: 54877 - protein, 701 aa, Campylobacter jejuni subsp. jejuni 1893; identical to SEQ ID NO: 54875

SEQ ID NO: 54878 - protein, 314 aa, Campylobacter jejuni K5; identical to SEQ ID NO: 54842

SEQ ID NO: 54879 - protein, 704 aa, Campylobacter jejuni K5
MPTNEQIGEKIFDKCVEIYEILNNDKEAEAKEKLFYLLDEIQDKALYPPILNHLIRQFGLYPYMNQDTSILEDKFLLECFKANIGEDEPKVLHREQSRVLKRLLSNESLILSAPTSFGKSFIIDALIAMKKPKNILIIVPTISLLDEARRRLVRKFYNYNITTTTQQTNLENNNIFIFSPERAVEYFSFINKENIRLDFFIVDEFYKISKDYENERFAPLQNAILKYTSISDQRYYICPNIDKIKNENSILCKGMKFECLDFNTVFIHINKCYKNKDFKKEEKILEIVKKDEKTLVYTQSQSNIKKVCEILVENTIIENSNALLENFAKWLSKYYGEHYLNDTLKIGVGIHHGRLHRCLSQLQVRLFEGKDLLKTIVSTSSLIEGVNIPAKNLILWDKKNGAKNINHFTYKNIIGRSGRMFKYFIGEVYLFESPNEDDNQEKILDVEIKSESLSINDEINNEIPDNIQVEVENNQLEIIKLIGRDKFNLLKKETLLKNDLGVIIKIIQILQSKDFNSEIFTYLFNDEPDKWYILSRIASIREFHCKNIGDINTVELVKKLSQNWTKSLPELIKDMRIDLDDFFKFENHVAFKIASLFSDINTLQKILYPEKEIDISSFVTKLSNVFLPSVVYTLEEFGLPRIISKKLHECGFINFENKELTLEQALDKFKEYTADDIINILKEKNLYDDFEDYILNYFYEGLGQ

SEQ ID NO: 54880 - protein, 314 aa, Campylobacter jejuni subsp. jejuni
MQGKEIENITTINTYVKNKDNSNFTIMLNEILCRQYHHFLLSISNQFESKKWKMKNFRNFIINNLKECALTEQERQSLAGNEGEILDKAISKLKIDDKSGEVGEIFLHGIMREYYNALSIAPKIFHKQSRNMEALGFDSVHLTIENRECHLWLGESKLYDNLNGAITNVIKSIKDNLSDEIILNEARIIANPHELDNLAEHHNIQTSTLTNFKKIINGNINLDELKSILHVPISIIYDCNYTKSIEEITDDYKTAIKNFHKKNGNKISEKIKKLSNEITYIDRIKFHIILFPVPDKKEIMSKINQIFRSYRNAN

SEQ ID NO: 54881 - protein, 400 aa, Campylobacter jejuni subsp. jejuni
MLTNEQIFDECVRIHENLNDNKETEAKEKLFYLLDEIQDKALYPPILNHLIRQFGLYPYMNQDTSILTDRFLLECFKTDIGEDEPKVLHREQSRVLKRLLSNESLILSAPTSFGKSFIIDAPTSFGKSFIIDALIAMKKPKNVLIIVPTISLLDEARRRLVRKFTPDYNIITTSGATPKENNIFILTQERVLEYLDFIKANRIDLFIVDEFYKIVGDVRSDILQNIIKQVSSYSKQSYYLCPNIKQFNEKSSKYQFLKNIEKVLIDFNTVALKTHDLSHKKEKKEYMLKNILNENKNQKTMIYIKSKSESKKVCKNIKNYINATDNQLKSFSNWLKKHYWQDWDFAECLANGIGQHNAAMHRFIQQLQVKLFSENEHMNIMVTTTSLIEGVNTATKNIVI

SEQ ID NO: 54882 - protein, 310 aa, Campylobacter jejuni subsp. jejuni
MQGKEIENTTAINTYVKNKNDVTFEICLDSVMDDSCSRFLLSLINDFEEGEWRFEKFNQYIMNALAETALSKTEREALASKEEYYSIIQRSVANLNKKEGEIGEIFLYGIMKKYYNALPIVPKIFYKQNTNDNAKGADSVHLTIENKECHLWLGESKFYTDITNAISEAIKSIKDFLVKDKLNKEKSIIMDINDVESFIKDKISKESIDKIKRVLKQDTSIDELKNILHIPISIIYQCETTKTYSELSEEYKQKIVNFHQKKAKQVITKITNELNNVHKIEKIKFHIILFPVPDKEKIKRDFAKKLEAAK

SEQ ID NO: 54883 - protein, 700 aa, Campylobacter jejuni subsp. jejuni
MTSEQIFDKCVEIYEILNDNNKETEAKEKLFYLLDKIQDKALYPPILNHLIRQFGLYPYMNQSTSILEDRFLLECFKTNIGEDEPKVLHREQSRVLKRLLSNDSLILSAPTSFGKSFIIDALIAMKKPKNILIIVPTISLLDETRRRLVRKFTPNYNIITTSGATPKENNIFILTQERVLEYLDFIKANRIDLFIVDEFYKIVGDTRSDILQNAIKQVSSYSKQSYYLCPNIKQFDEKSLKYQFLKNIEKVLIDFNTVALKTHDLSHKKEKKEHILKNILNENKNQKTMIYIKSKSESKKVCKNIKNYINATDNQLKSFSNWLKKHYWQDWDFAECLANGIGQHNAAMHRFIQQLQVKLFSENEHMNIMVTTTSLIEGVNTATKNIVIWNDSVARDKDKLTNMQYKNIIGRCGRMFKYFVGNVYLLESNKETLKNEQETMEIIPQEEFLYRNDLETFNTKTKIEENLKNVLNDKNKFYQIMSKMKNYSILMDLDNILTIVENAELFEKSIEYLNSDVPDEWGFIKKKEIREIVFKILNEKSRNAYFKIIDYGKHNYDGVKQTINNISKQERYKINISQYFDIEKAISFDIASFFNDLNQIMQILYPEKEIDISSFVTKLSNAFLPSVVYTLEEFGLPRIISKKLHQCGFIDFENNDLTIEQALNKFKEHTADDIINILKEKNLYDNFEDYILNYFYEGLG

SEQ ID NO: 54884 - protein, 283 aa, Campylobacter jejuni subsp. jejuni
MCFDYAINDLCNKFLLSLINDYEEGKWRFEKFNDYIMNTLAETALSKAEKDALREEPFSLIKDSIKNLNKGEGEIGEIFLYGIMKKYYNALPIVPKIFYKQNANDYAKGADSVHLTIENQECHLWLGESKFYKDINKAINEAIKSIKNLLVKDKLNKEKSIIMDINDVESFIKDKISKESIDKIKRVLKQDTSIDELKNILHIPISIIYQCETTKTYSELSEEYKQKIVNFHQEKAKQAITKITNELNNVHKIEKIKFHIILFPVPDKEKIKCDFVKKLEVAK

SEQ ID NO: 54885 - protein, 714 aa, Campylobacter jejuni subsp. jejuni
MRFRQKTRGSQMTSEKIFDECVKIYENLNDNNKETEAKEKLFYLLDEIQDKALYPPILNHLIRQFGLYPYMNQDTSILEDKFLLECFKANIGEDEPKVLHREQSRVLKRLLSDKSLILSAPTSFGKSFIIDALIAMKKPKNVLIIVPTISLLDEARRRLVRKFYSYNIITTTQQTDLKNNNIFIFSPERAVEYFSFINKENIRLDFFIVDEFYKISKEYGNERFAPLQNAILKYMGISDQRYYICPNIDKIKNENSILCKGMKFECLDFNTVFIHINKCYKNKDFKKEEKILEIVKKDEKTLVYTQSQNSIKTVCKILTKNIIIEKSNALLENFVKWLSIHYGEYYLNDILKVGVGIHHGKLHRCLSQLQVRLFEEKDSLKTIVSTSSLIEGVNIPAKNLILWDKKNGSKKINHLTYKNIIGRSGRMFKYFIGEVYLFESPNEDDNQEKILDVEIKSESLSINDEINNEIPDNIQAEVKNNQLEIIKLIGKDKFNLLKKETLLKNDLEVIIKIIQILQSEDFNYEIFTYLFNDEPDKWYILSKIASIREFHCNNINNTSNINNIELVKKLSQNWTKPLPKLIKDMGIDLDDFFKFENHVAFKIASLFSDINTLQKILYPEKGVDISSFVTKLSNVFLPSVVYTLEEFGLPRIISKKLHECGFINFENKELTLEQALDKFKEHTADDIINILKEKNLYDDFEDYILNYFYDGLGQ

SEQ ID NO: 54886 - protein, 283 aa, Campylobacter jejuni subsp. jejuni; identical to SEQ ID NO: 54884

SEQ ID NO: 54887 - protein, 714 aa, Campylobacter jejuni subsp. jejuni; identical to SEQ ID NO: 54885

SEQ ID NO: 54888 - protein, 314 aa, Campylobacter jejuni; identical to SEQ ID NO: 54830

SEQ ID NO: 54889 - protein, 708 aa, Campylobacter jejuni
MPTNEQIGEKIFDKCVEIYEILNNDKEAEAKEKLFYLLDEIQDKALYPPILNHLIRQFGLYPYMNQDTLILEDKFLLECFKANIGEDEPKVLHREQSRVLKRLLSNESLILSAPTSFGKSFIIDALIAMKKPKNILIIVPTISLLDEARRRLVRKFTPDYNIITTSGAAPKENNIFILTQERVLEYLDFIKANRTDLFIVDEFYKIVGDNRSNILQNAIRQVSPYSKQSYYLCPNVKQFNENSLKYQFLKNIEKVSIDFNTVILNIHDLSHKQEDKKDKLKNILNETKKQKTMIYVKSKPESREVCKYIKEYVTTNNDQLNNFSSWLKKHYWQDWDFANYLANGIGQHNSAMHRFIQQLQVKLFSENEHMNIMVTTTSLIEGVNTATKNIIIWNDSIYNNENKLTSMQYKNITGRCGRMFKYFVGNVYLLESNNEILKNEQETMEIIPQEEFLYRNDLETFDVKTEMEKNLKKLLNNANKFHQIMAKMKNYTILMDLESIVTIVENAELLQKSIRYLNSDNPNTWGFIMSENIQKVVFRILNDKSKDAYFKIIDYYKYNYCGVKQTIDNINKKAGQEWYKIDINKYFDIERIISFDIASFFNDLNQIMQILYPEKKIDISSFVTKLSNVFLPSVVYTLEEFGLPRIISKKLHECGFINFENKELTLEQALDKFKEHTADDIINILKEKNLYDDFEDYILNYFYEGLGQ

SEQ ID NO: 54890 - protein, 314 aa, Campylobacter jejuni; identical to SEQ ID NO: 54872

SEQ ID NO: 54891 - protein, 706 aa, Campylobacter jejuni; identical to SEQ ID NO: 54873

SEQ ID NO: 54892 - protein, 317 aa, Campylobacter rectus RM3267
MSVKFMNPTFTNYSEPEFEVITDECLSCNGDIIDKHYFLIIANDYESYKWRYDKFIDFLLDYISHDALSAKEREACINKPGSMLRKSLRNLRTVQKNQQDEIDEKGGEIGEILLYGIMKKYYNALPVVPKIFYKQNKNDYAKGADSVHIVIEDNDKFSLWLGESKFYKNIDDAINNAIQSVNNGLQDDKLKKEKSIITNISDLDELLKDNTNLLEQIKTKLNDNRSLDELKPFLHIPIFLLYECSLTKQNKEFNKEYQDKIIENTKKNTKKIYKRLKDELKNISYIDRIYFHIIFFPIPDKNKIIEDVNKSMEGFND

SEQ ID NO: 54893 - protein, 684 aa, Campylobacter rectus RM3267
MTEENIFNKCARIFQINNKTEQRNETIKLLNEIDQSQYMPIVNHLIREVGLYPYMQYDSCKWFDKILINSFTINIGEKEPVTLHLKQSEILKQLIEGNDLILSAPTSFGKSFIIDALINFKKPDNVLIIVPTISLMDETRRRLNKFSKQYNIITTSNADIKDKNIFVFPQERAVGYIDKIKEIGLDLFIVDEFYKILSSDNRALTLKIVISKLSKISKQKYYLCPNISKINLSLFGINRMKYVKLDFNTVFLNIKKEICKSKKNKDNLVLNIINNNKNKQNLIYVNQPSTADKLATFLSSGFKKSDSKILQNYEKWLIKNYFKDWPLADSVSKGICIHYGKIHRTITQMNVKLFNENQIFTTICTSSLIEGVNTSAENLIIYSNKIDRKDPFDNFTYKNIIGRSGRMFKYFIGNVYILEDTPKEEEKNLELSPIVDDIFKMDEELQITEELNTKANKIKDEIYNCVEDKNKVDLILKLIKSGKINSNMEDVVYILKKLINLDPNAFNYLKTNEISQWSAFKYFMSSKHHIDFNHLEIIMKSWNKTIPELIKELKIDNILKYFELENKVTYNLSAYFSDINELQKIIFSKQNIDISDFVNRLSSLFMPAKVLQLEEYGLPRMISKKISNLKLLPIDNNEITITELLDHFRCISKEKLINKLIEAELLEPFDQNFIDYFYDGIMIM

SEQ ID NO: 54894 - protein, 224 aa, Campylobacter rectus RM3267
MYHEAKKLFRKWRQQEITDKNKSTSGEMGEMILWFLMEAVLESPQIVAKMDLKTNRQMESFGSDGIHMKIIDDVLNIFFGEAKLYNDVGKAIDSIFESIEKFHKDKMWEHEYNMVTTHFKYLKEGEKQKVFDFISGKIKSQDIKINHACLVGYNWSEYKKLDDQIKRQEFIDAFKTKYQKDTTRLARLIQLRFDKFSKKQFHFEVFFLPVKSVQELRDKFNEEL

SEQ ID NO: 54895 - protein, 825 aa, Campylobacter rectus RM3267
MNVLIEKLVKYDIVNYLSGLNIKQDNNLEQFSGEEILQLCKYASLLALSDKDDEQMLSYEISTKLFINFYEKYPTLYSIVFSILSRLGNFPNRDLLKKYKPSEEFRSQSLLIDLERMAREKENQLILQNNEQIFLTDFQKRFFDVLTDRHFFSVSAPTSAGKSFIFTLAIVKRLLKNPNEVIVLIVPTRALIKELSEKIIKKLKHYNLFEKVDVRILPILEDKSNDKGRVYVLTQERLSTLLEENIKINTCFIDEAQEIQNNRGVVLQNTIELLIKRNHDINLFFASPLIKNPEYFNKLFEQKFDNEYFIENISPVGQNILLLSEIKNKPKSVFIENIDFNSQRKNLGEFKLDFKFRKNEKIISLAKQICREDELTLIYCNDPGEAEKRALLLTEKINNIDTDDEIIGLINFIKEDIHKDYSIIQCLKKGIAYHYGYMPSSIRAEIERLANIGKLRFVFCTSTLLQGVNLPAKNIIISRPNKGKNQPMNRADFLNLIGRAGRLLYEFQGNIWCIEPNQWELKSFEGNKLQEIGAYFETSLLTKTDEIIEIAKDQNNDSNEVAVFGKFYLDFIINEQNIDQFKEHISYEKIQNLFDISKLIAHQLPDNIIRKHYSIHPARLQKMYVYFKENSSNDLNEFIPKKAYQKHTNDNLKLIFKLIDLILFNKGNENKQYELFSFIASSWMHDKPISQIILERNKYTKENINSTIREVLEIIEKQIRYKYVIATHAYLDILKLALLERGKDFNVDLIPNLPLYLECGTSDKTILSLISLGLSRLTSIKLKMSKKFRCDEPTVTNCFYALQKIDIKNLNIPEVCKHEIMGLIL

SEQ ID NO: 54896 - protein, 312 aa, Helicobacter muridarum
MNDYTFTKYKDKDKVDFEVLIDEWLINTSANHAMLSLVNDFESNQWRSKKFRNFIINNLKEVALNKKERDALSGNEGDILERAISKMHIDNLGGEIGEVFLYGIMKNYYNALPVVPKIFYKQNPNDNAKGADSVHITLEENAYHIWLGESKIYSDITRAISEVVESVYELLATDKLKKEKSLITNLNDIDGYLSDSNNLHKTSITELKNILNDRTSLDEMKKILHIPISIIYECDITKQHLQNYPVCLDNNYKNLIIELHRNQCSKLSQKIISKLNDIPLIEYIKFHIMVFPIPNKKELVAQINKIFEAHRQ

SEQ ID NO: 54897 - protein, 690 aa, Helicobacter muridarum
MMTNEQIFDECKRIYTLEDKEKANELFRLLDKIGDKQAYPHVLNHLIREVGIYPYINQDTAIFSDRLVCECFKADVGENEPKILHREQSRILKRLLEGENLILSAPTSFGKSFIIDALIAIKKPSNILIIVPTISLMDEARRRLTLKFGGEYHIITTSGSQLKDKNIFIFPQERALEYFENLREKSLDLFIVDEFYKMSNKDRRTHILHNIVNKFKNIAKQKYYICPNADDIEDKSKNKIFLAGLKKEILTITTVALNKFDLSKETGSKELKIQNLLKNEIGKSLIYVSTKPNSKKLCKILLKFIKAGNEELNSFSQWLQKYYAREWDFATNIKNGIGQHNSAIHRYIQQLQVKLFSENPSMNIMVSTTSLIEGVNTAARNIIIWNNQVANDSLNSFTYKNIIGRGGRMFKYFVGNIYLLDNENKIEEKEVEKIDINPDEEFLYRNDLENPDLESKKLIEQKLFSLIKDKQKFQKLISYIKNYKIIMNIENVLQIIESVNEIMKSIKHLNNDNPDSWGLLEVKSVGNIFSNNDKKLDRAYKNIKVFAKYNWNGTSTLLNNSTINIDDYFNIEKIIVFDIASFFNDINEIQQILYPDKHINISPFVSKLSNAFLPSVVYTLEEFGLPRMLSKKLHKYNFINFENNDLKIDEALEKFKESNVEEIINLFKKYKDFDGFDEYILKYFYNGLGK

SEQ ID NO: 54898 - protein, 367 aa, Xanthobacter autotrophicus Py2
MTKASQIPVPDLLDTLLFSCEPIGRRRGKGIFFDAKGDRAFGSRMRNLLSVSAKAVCRMINIAFETLIDDSLSKITNVAQLKALLNKRVLSFVNDFEDGRWLSSRFQSYLWDNIAQTALSERERLALADQSHSALVAAARNLRLTDKDEVGQGSEIAEVFLYGIMKNHYKALPVVPKIFYKQNSQDNAKGADSVHIVVSDDGEDFTLWFGEAKFYNSIADARLDSVVNSVYSSLDTGKLKKENAIITNVSDLDQLVMAEALRAKIKAALSSQVSIDHLKPKIHVPILIIHQCAETAKCAELSDQYRQAISAHHTERAEAYFLKQLSGSSKVHKYGNIQFHLILFPVPDKKAIVDTFLGAVSFYKGAA

SEQ ID NO: 54899 - protein, 703 aa, Xanthobacter autotrophicus Py2
MMELFAACSEVNDLIEGGNDLAARNMLIKLLDDLDRSKTPYPQVLNQLVRSAGLFPYLQLENASWDQKFVHEAFAVDVGNRTATLHREQATVLSKLLGGKSIAVSAPTSFGKSFIIDAFIAAKRPDTVVIIVPTIALMDETRRRLYKKFARDYGIITAPDAPLEARNILIFPQERAFGYINKLKKIDLLVIDEFYKASIVHDKERAPSLIKAIVLLSRLAEQRYYLAPNIKKLEDNVFTRDMEFLELLDFNTVFLEKHEIYKDIGGDAQRKSEALLSIIAPRSQKSLVYAGTYTEIKKITDLVVGRMNKVDRAHTNHFARWLRENYQQNWVLADLVERGVGVHNGRMHRCLSQLQVLLFEHEKGFDSIVSTSSIIEGVNTSAQNVIIWKSKLGQNNLKDFTYKNIIGRGGRMFKHFVGHIYLLDSPPKDEDTQLQIEFPDKVLGGLDETQDRESLTERQIERIIEYKRQMSDIVGADNFARIQRDNLLQDSDADFLLQVASDMKDNPDDWKGFGYLNSSKPSDWDRMLYKVIALKPSGWDAPHGRVVAVVKALAENWTTNMPTMLWKLSGNGIDVEGFFQLERTITFKLSALLSDINELHRMIVNSSVDIGGFIGKISHAFLPPAVHSLEEYGLPRMISRKLHQARYIDFSQTELDLRSALNIFRRNGLEAALRVESLTAFDRYILRFFFHGITPDDVASAPV

SEQ ID NO: 54900 - protein, 254 aa, Pseudomonas aeruginosa ATCC 700888
MRNAVVDYAIPRSKLADAKARDNRFNSTEAVAELIERAKRSFTDLANTGEGGEMLLFLLAERFLKLPQILCKMDLKTDTRVHYHGADGVYAGVTAEGTLKLYWGESKVYADASAAIRDCLNSLSPFLIEPEHEEAGRERDLMLLSDKADLSNPALTDALKKYFDRSSVMSKRVQYCGVALVGFDAPFYPKDNAKAVAEEIVEASRTALTGWSNRIGERLKLEKLDQMEIELFCVPLPSAEGFRAAFLKAMGIKE

SEQ ID NO: 54901 - protein, 866 aa, Pseudomonas aeruginosa ATCC 700888
MSLADLQSWLLQEGVRDDLDAITRLTVRNELDNLAPDTSVQSDEPIDWPRLLLAGSILARSDQRGDQEAALRVATAAVSLTDDQALKDAGAVLMGKLSNFRAITLATDRKLVAAGLDGRLGIALRLEAQRREMDRSVLVQSSGAWLQVNDFQQRFWINAAGDSWLSASAPTASGKTFLVLQWLIDQVVAGEARVAVYLAPTRALVSEIETNLKSILGSSEEIEVSSLPLPDKYKAARAGSARVILVFTQERLHLLANVLGDMFLIDLLIVDEAHKIGDNQRGVILQDAIERATRANPKLKAVFISPATQNPEELLTDAPLGVHTVAVDSDSSTVLQNLIVATQVPRKSKLWELTLRQQGSTLPVGVLQLASTPEGVKKRLAFIAAAVGERGGTLVYANGAGEAEEVADLISQLLPKLPTTDPELSELAELARKGVHQDFRLAPLVELGVAFHYGNMPSLLRLEIERLFRSGKIRFLVCTSTLIEGVNLSCRTIVVRGPRKGRGHPMEPHDFWNLAGRAGRWGDEFQGNIICIDPEDTQAWPAGVPGRARYPIKRESDAVLELGDGMAGYLANRGLSDLSSIEDKDKFEQVGAYLLTTFMRLGSISAASLAKRHDAESIAKLDQALGALAEQIEISVDLAARHPGVSAVGLQHLLEAFRAYPGDVENLLPADVASFDSYDRFVTIMGRVNDHLFLAFNPPARIRLYALIVVKWLKGYSLARIIRDSIDWHQKNDKPFSLPGLIRGTMELVEQIARFRAPKYLSAYMDVLYLHLREIGREDLIDDGLDIGTQLEFGVSSTTLLSLMELGLSRMSAVALYERIARDDLNRDECLAWISERMSQFRAMDIPAIIIREVRERLTLPGESTT

SEQ ID NO: 54902 - protein, 287 aa, Pseudomonas aeruginosa M8A.1
MKKLYKRFSKLAIKFESDVLCSGLQKDPYHLTYENGAYRQDELVKVIRGALPHFALTSEEYQRLKDDDDVDEMYRLAFSRISKAKKDKKGDYGELLLFLILKTFYDADRLVTKVKLRSSVKDQIKGFDCAHFTVDENEEVKLWLGEVKFYKDFSKALDDVVGEIERHTQGQYLKDEFSILCPNVEVNHEVPVSEKIIEMLDGTISLDDVRIVIPALITYETAMFNGFSKLDDAFKAKMAKQIEGKFDLIDKREIKQNVNIEVFFILLPLADVGSIKEKLEAMEAVFA

SEQ ID NO: 54903 - protein, 727 aa, Pseudomonas aeruginosa M8A.1
MSIYQVLADRAYSRLVGTDALAMRNSEAFDYIKYLEDIYKLLQSESYYSVAVRELCFACEVADDSDSLAKSILQQCIKASRIFLYEEMLRKRGVDISEENGLLDLAQNAFYSIDGEILLTKEQKDLFDLFMRKRRLVVSAPTSFGKSRIVREIITHCSYNSIAVVVPTNALLSETYQAFREDVRLSEYGLIFSTHIEPPEGKVIYIFTPEKFDVYTDEHKISYDFFVFDEVYKVDAEDRRSSVFSNCLYKAYLKKCDYYLIGPYFKGFSKEYLERTDGHFVKFETDIVQKETVNYYDGVAIYDGRTLPARESKDARLTQVLSKIDGQSIVYVGRKDSAETRAKFIAKSRKLEKKDDGLFELIEYIKKNISSEWHLIDFLKVGVAFHHAGVPKYIQSEIVDLFNAGVLDVIVCTPTLTEGVNTSAKNVIFYDTTKADIALTGFEVKNVVGRSGRFGQHFIGRAIFLESHEEQRDMGEIFFPIFDYDSLLPEDNIQISYGDLSAKAREQREEINSIVGSKNVPIEILRQNKYVPFDNQLRLIEYLRSNPDIRLELKGALNPPNKRQVDLIIELVHEILFADSDKRRAWSTGNISRFVKFHIYHNPSIKQMIKEHSAAKEDTRIRNVLDLVYTYFEYALPKYIKSLENIYNFVYHEKVSFSLFITRLQYGSTEPQDILLADAGLPRSIISVLSDRLSGVKDIEEIRRRIRGAGAMDGLSNIEKRMLKRRL

SEQ ID NO: 54904 - protein, 254 aa, Pseudomonas aeruginosa BL21; identical to SEQ ID NO: 54900

SEQ ID NO: 54905 - protein, 866 aa, Pseudomonas aeruginosa BL21; identical to SEQ ID NO: 54901

SEQ ID NO: 54906 - protein, 542 aa, Pseudomonas aeruginosa BWHPSA016
MDVVMEPNDAGGVAAKHGFIFQDCVAAYYVTQMLRDKAIQRVRCEVTDDIDVVYDNFVEFVQVKTTNKAHWARSDLVVLSRGDGKAKIPHSSILHKSMQSEPELTVPRKFKIVTEHPVNVSLEYLRISRDERNGKPGRDELIDYLNSKTSNFVATSGVDVATWVDAMYWEVFRTMREIELMGIRNIRNAAYELHGVTLSTEATAEDIWRGILDTVTRKGALSRKIHSADSKSYLRADLNAWFQTLVEEDQKHAGRKVYVKRQLPHILVPFRSTLVTPCAKRSGLVLHQKYSLKRYRYQYIADNVCKWLDEVFLRPNELADIHKLSIVEQRQRLRNTVFASLADVRSFLGRVLLHATIRQLHSSQPIPCLLYLESQGKEKILENVHIVRRDPEGDQLWVGFSELVTAVNIIKRLPEIRQQLYDEIEACFSEARGKILDIKDDAYLLHHDIDVILDESNSFDEHLDRFRFVLFIGYDSSLLTDPETPGHEDKLEDETAALFEAFVDDLQRNPIFAKLTIDVFIYPAPSLDALTQLVDRKVREAV

SEQ ID NO: 54907 - protein, 726 aa, Pseudomonas aeruginosa BWHPSA016
MNEVYQAAKMSLDSDGFSAFRYLSAINSLLSNPVSTSLGRDLTIRALGARDKFTGHVGILRNMVRKAGLFPYLKKEFSEHSPSDRVALNLYRTPFSADFVFHSMQFQVFDLLKAGRNVVLSAPTSMGKSAIVDSLLGLRSFKRVVLVVPTVALADETRRRLQERFGDTYQIIHHSSQKSHRDWVVYVLTQERVNERDDIEDIDIFVIDEFYKLAFRQLKKGITDFKDERVIELNIALSKLLKVSRQFYLTGPFVNSIRGLTELGYDHAFITADFNTVAVDVQTYGVDANDDEGKLKALAIIAPQCKGSTIIYCKSSGVAGKVARELVRLGYGQPFQDAHVEWVSKEFDPDWDYTYALKNGIGLHFGGLPRALQQYTADRFNAGDLRFLLCTSTIIEGVNTIAKNVVIYDNRNGNTGIDKFTHGNIKGRAGRMGVHFVGKVFCLEDVPEDNLNQEVDVPLGIQGADTPLNLLASAQPDHLSEYSQDRCEAAFAQDRFSIDLVKKHSYFRMEQFEQLYSMVEMLREEEFDSLVFHWSPAPGFLTALAKISSRLVPKAFSTNGLQTKTHDAILAKLTSYQKAESYSAYLKSQIEHTKQWSKVDEKVNLSTALNNDLKLVSNTFGYTIPKVLGLLEDVVRLHAIKKGIRSTIDYSYVRMSFENLHLPPGVNALEEIGIPIQTLHRMSKLLNFPEGASVDELADYLRQNERAWRSMGHVDQSFVRRALGAA

SEQ ID NO: 54908 - protein, 254 aa, Pseudomonas aeruginosa X13273; identical to SEQ ID NO: 54900

SEQ ID NO: 54909 - protein, 866 aa, Pseudomonas aeruginosa X13273; identical to SEQ ID NO: 54901

SEQ ID NO: 54910 - protein, 254 aa, Pseudomonas aeruginosa S54485; identical to SEQ ID NO: 54900

SEQ ID NO: 54911 - protein, 866 aa, Pseudomonas aeruginosa S54485; identical to SEQ ID NO: 54901

SEQ ID NO: 54912 - protein, 278 aa, Pseudomonas aeruginosa VRFPA08
HILVPFRSTLVTPCAKRSGLVLHQKYSLKRYRYQYIADNVCKWLDEVFLRPNELADIHKLSIVEQRQRLRNTVFASLADVRSFLGRVLLHATIRQLHSSQPIPCLLYLESQGKEKILENVHIVRRNPEGDQLWVGFSELVTAVNIIKRLPEIRQQLYDEIEACFSEARGKILDIKDDAYLLHHDIDVILDESNSFDEHLDRFRFVLFIGYDSSLLTDPETPGHEDKLEDETAALFEAFVDDLQRNPIFAKLTIDVFIYPAPSLDALTQLVDRKVREAV

SEQ ID NO: 54913 - protein, 664 aa, Pseudomonas aeruginosa VRFPA08
MVRKAGLFPYLKKEFSEHSPSDRVALNLYRTPFSADFVFHSMQFQVFDLLKAGRNVVLSAPTSMGKSAIVDSLLGLRSFKRVVLVVPTVALADETRRRLQERFGDTYQIIHHSSQKSHRDWVVYVLTQERVNERDDIEDIDIFVIDEFYKLAFRQLKKGITDFKDERVIELNIALSKLLKVSRQFYLTGPFVNSIRGLTELGYDHAFITADFNTVAVDVQTYGVDANDDEGKLKALAIIAPQCKGSTIIYCKSSGVAGKVARELVRLGYGQPFQDAHVEWVSKEFDPDWDYTYALKNGIGLHFGGLPRALQQYTADRFNAGDLRFLLCTSTIIEGVNTIAKNVVIYDNRNGNTGIDKFTHGNIKGRAGRMGVHFVGKVFCLEDVPEDNLNQEVDVPLGIQGADTPLNLLASAQPDHLSEYSQDRCEAAFAQDRFSIDLVKKHSYFRMEQFEQLYSMVEMLREEEFDSLVFHWSPAPGFLTALAKISSRLVPKAFSTNGLQTKTHDAILAKLTSYQKAESYSAYLKSQIEHTKQWSKVDEKVNLSTALNNDLKLVSNTFGYTIPKVLGLLEDVVRLHAIKKGIRSTIDYSYVRMSFENLHLPPGVNALEEIGIPIQTLHRMSKLLNFPEGASVDELADYLRQNERAWRSMGHVDQSFVRRALGAA

SEQ ID NO: 54914 - protein, 280 aa, Pseudomonas aeruginosa BWHPSA046
MVVKYPDPLLEVRACCIESPPFTSLCVGYEGGVWRSKALADHLFQWIPYVALDQESQLSMGSHNFLELLQRATAHIYNTKKTENRGEIGEILLHIACVTSFNTSPILCKLILKTSSNDTVKGFDGVHVLVKDDKVELWLGESKFYSDPRSAIREAVKSIKEHILPDFLNTEKAMIIGHIGHNIPKKEEITRLFKRQTSSDELLRISVFPILIAYESKSVASFTELTDRYYEELLIESEALRQYFADQSKNMPLRFQIIFVPIESKSDVISKFDKRLESFS

SEQ ID NO: 54915 - protein, 716 aa, Pseudomonas aeruginosa BWHPSA046
MSILEELKNLKQSDFLSSDQVFEAIFLAGSLLNDSDRESSEPLDIAVRLLAARQNGQTPNSCSDAIEYLAEECGLYQYIDKNKFSLVTQSIIESHAVILGKKFYLHAKQMQALLHLLSGKNLILSAPTSFGKSILVDAFISIKRPHTVVIILPTIALIDETRRRLMSSFREHYTILTSATKSYNKEKPSIFILTQERFILRDDVDYIDFLFVDEFYKLDPDREDSRYEPLNIALYKALKITKQSFMAGPNIKDIEIGPKWTGKFTFLQTDFSTVSVNIIDRSRSENRLNTFLQDLRGIRTGSSLIFTASPGSAQNLLRITMLKEFGHASKIGSSLGDWIARNYHSEWSLANGVRRGLATHHGRLPRSLGQLFINLFDKGVINTLFCTSTLIEGVNTSAANVFIYDKKINRTNFDFFSFANIRGRVGRMMQHFVGNAYLYHEPPEEIETNVIVPVLADPGNSTDYILMNVDYESLSADGKQRQDELLEQTGLTEPVLKEHGGLGINMLILLREKIIEVMARSPNGLIWSGMPSNAQRRTLAELVVFVAKSKNERFGLFTYKQVSWAWSQLSYYQKTADFLSWFTIKFSAEEIEESIDRAFQFLQACEFKFPQKVMAIESIVKSLYPKSKIDYSFYAAALESWFRPSWMKQLDEIGVPLPLSERLSIYLRNPDSSEEAIQQISKLNTREISEIDVIDRYLIRNILIDTKGVGVQLKLA

SEQ ID NO: 54916 - protein, 308 aa, Pseudomonas aeruginosa 3579
MVKLAEINKLIAVEPEDYKECIDSIEHTQSTKNLKTILRFHHLKFDGNGRPMSRALAELLYQYIIHYCISAKNRSSPITAKESAQLTKEARKLFRHPDVTDTSPDRTGEAGETLLFFLMESIIQAPQIVSKMELKTNRKLEANGSDGIHARWNSEDQIVDFYFGESKLYQNIDAAINSALESIESFHADEIYKHEFTMITKHFKYADPEVQKAVTEHIKLGEPGPDARINHACLIGYNWNAYENQNNKSSRELSAEFKEKFLLETSSIAEKLDNKLNGFTRKHLRFDIFFMPFPSIQNFRNEFNEALD

SEQ ID NO: 54917 - protein, 723 aa, Pseudomonas aeruginosa 3579
MLLSLERLAREVENTTEDGITLTDFQHKFYTNLETQKSLSISAPTSAGKSFILNLDLIRRLKTGKEENIVYIVPTRALISEVSARIRKTVKDREIAGIVIRTAPFPVKETAHLKNVIYVLTPERLLSLLKPENNKKKITSIFVDEAHEIQKGNRGITLQNAVDLALGLHPYASVLFASPLINNPGYFLSLFGRQDQGLFFTETRSPVSQNILLISEAPRQPNKIQLSLLAANKNIDLGTTPVNFRFRGSKFRQRAEFANEITLSNESTIIFANGPGDAETVAEELLTIDREYKPSEEVKDFISFIKSEVHEEYPLARTLEQGIAVHYGDMPSIVRAGIEDLFKSTEIRFLCCTSTLLQGVNLPAKHIVIENPHSGDKPMTRSDFLNLSGRAGRLLQEFHGNIWCIRPSDWSESSYTGEKLQEIKSSMSKLMDDGGELINKLVSGEIGEDSKNLAEAGFSRLYQETRTLGEEEIILKYKTEDNLETLTKNLDHIKSLTITLPQEILDSHSSLRPDHLQVLYDKLFGAIYTEQFSLINPFQQGGYKRMCSAIEIISEVFGWAENPKYRNFIAYQAHQWATGTPIGSLIKSRVNFRKRENESEKTSTIIRQFLKVIETEIRFKLVKYFSAYEDIIKHCLIEKGFSEESAKQAPYHTFLEFGSCSPIELSLMSLGFSRFTAIRLKNAVNWGNSEEIEDYLFALSKINLSNINMPRVCIKEIRDILGQ

SEQ ID NO: 54918 - protein, 308 aa, Pseudomonas aeruginosa 3578; identical to SEQ ID NO: 54916

SEQ ID NO: 54919 - protein, 723 aa, Pseudomonas aeruginosa 3578; identical to SEQ ID NO: 54917

SEQ ID NO: 54920 - protein, 280 aa, Pseudomonas aeruginosa 3576; identical to SEQ ID NO: 54914

SEQ ID NO: 54921 - protein, 716 aa, Pseudomonas aeruginosa 3576; identical to SEQ ID NO: 54915

SEQ ID NO: 54922 - protein, 336 aa, Pseudomonas aeruginosa BWH055
MNGVQDNDKTDAEIVQDALEKLLDKSPLGKFVKLTIRSEDPTTPLTTLMHIGFKENLGNTLALADFLWTQALNYALTRRRREQIRARLEDAPPGDISAIAAPVNAARDAFIQFHKDYPSRASEVGEVLAYCIAVNDLGAAQVAAKMSLKTSGNMPVHGLDGIHAKVEAGALYVFFLESKLSQSANAGVKDYAESVAGFGSNLKQYLLEYSIVRDLGNLDSLTGAERDLALACFDVMDSPDTVERRERSVGVILYKENQFEKLSPVKQGQPVGFHEAEFVAAYASQLAHHQNAALKHLAAGNVDTNKCQVYFVAVPDVDELREQFYQRMGYIPKVKE

SEQ ID NO: 54923 - protein, 868 aa, Pseudomonas aeruginosa BWH055
MSTFAQDLSRRLTGHASFWTYLGQLQGAGAARTLARPLDDAPTLDIDKVLKLLYCASVFVQTDADELKRLAQAIVLNTLLLHEDGELRERSLHVLTELGNFPGLSYAERAYGAGDQTLLGRMNRQVSQALNTVAINGLPVALTDYQKQVWDRLPITRALAISAPTSAGKSYVVIEHLCQQAEKHQHFTAVYIAPTRALLSEVQQKIQLRLKGRDEIRISTVPSLDPLQRTCQVFVLTQERLQVLLSIYGAAFNVVVVDEAQNLSDHARGMILQDCLQTLMSRSSTTQLVMLAPGATGLPEIAKAIGVDALRPEFTGVSPVLQNRIVVSKVKGSPNEMRLQLLRGPEERVEIGNLVSSLGLDNKATRLAAIALELGGGEGSLVYETGPREAEKTALQLMNELRRRPPDPQDQALLDLSEFIKEHIHPEYQLAAMVTHGVAYHYGRMPSLLREAIESSFKQTRTGLRYLVCTTTLAQGINLPARNVFIDTPKRGRGENLDPALLWNFAGRAGRLSQDIVGNVFLLDYDEWDTRPMDDFVPFEVKSAITTTLSQQFDRVMGAVRGNMPVALPWNAEATRIKACAGLLIAKAAEGISDKFLASVLPPDRQDSAAEVSESAVGAAQSIGLPASLLHANWTIDPYGLRRLYDRLLEKIDSDDLSDVIPLNPREAPEGLYQSIFKRILRTVDKQQGNFGALVAGLAIQWMKGMPYPVILKYWVKRARLAEERDAQKAAEAGTRPKRPRTVDALIREAFDLIEDVVRFRFVQLGKAYRDLLVLALQEKGLHKRVPEVYDFALALELGVSTETGTAFVELGLSRIAASALEDLFPSSSMTVAEARQALRTLDVVANKLNPIIVGELDRLGLRDPIEG

SEQ ID NO: 54924 - protein, 280 aa, Pseudomonas aeruginosa BWH052; identical to SEQ ID NO: 54914

SEQ ID NO: 54925 - protein, 716 aa, Pseudomonas aeruginosa BWH052; identical to SEQ ID NO: 54915

SEQ ID NO: 54926 - protein, 321 aa, Pseudomonas aeruginosa
MADARTTVFDGLLDPITGIDNVLKEVAGDPKLEQPRLIYLRMHEDEPQLALLAELLTDLLVDYALPLTKRRRANQAGTTSHSGGSTAAHSRLVREARQLLLKFTEQHKARFGELGELLSYAVAVHYMGAAQVGSKMALKTNSNMPVHGVDGLHVKANEDGTITFFVLESKIVPNATDASRDMIESIFEYQADRAKLLNELRLVNDMSNLDALEGAQRDEAKSYFDAYSNTGNHLKRRDVHLGSLVISEEAYKDKLAYDPNADHDAHEKHLESLYKAKHQRFRDNLTRQAQARNVNLAKCEVFLIAVPDVDEFKRAFAALNP

SEQ ID NO: 54927 - protein, 877 aa, Pseudomonas aeruginosa
MTSFATEVSGDIRQNAAFWKDLAGLRAMGIRSTLPSEHDSKAGIVGPALGDDGLARLLNSASIFALADDEESRDLAQQIAVFASLAFDSPEVRGAAVHILSGLGNFPGLKKVEPEISEGLGFHTHLRSALLKELASVEIDGSRISLTDFQLDVWEILKSSAATAISAPTSAGKSFVVLEHLAETAIQAEHFVAMYIAPTRALLAEIQGKLERRLAKISSELRITTIPVPDPEHRAKQIYVLTQERAQLLLSAIDLADAVDLVIIDEAQAIGDDSRGMILQDVIEKIHKASPSARFLFLAPGATGFALVGESVGLNNLDVMETGLSPVVQNRISVNFPPENEHVVHLDLVTADRLDSIGSYTFNRGFALDDDQKLAAVAEEFGASGRSLVYATGAKNAEDLSKLLALNRKDRDTASLNELAKFIEQHVHKRYSLARFVRRGVAFHYGNMPSLLREGIETSFREGHLDYLCCTTTLFQGVNLPARNVFIDTPTRGNRGELLEEASLWNFAGRAGRLGEEVVGNVFLVNYEKWEHKLLTERKPFQLKVAFKDTIENDFNAVVELLDAAAEPKPDEERKRPAPRTTAAAGLVLFRAAQGSLESLLKRPNLSLTSEKREQLSASTDRALANLGLPESVLASSWMLDPVALASLLERLRQGVHKKEFAKLMPVNPSSDAYAVYNAIFRRLYKHLGRAKLTGDENKGTRGYVNHVTVTALKWMRGDALTQLVNEAVRFKLSAAKQSTRKTPEQTVVDGAIRDMFVTIEQTIRFTLVQWAKAYVDLLKFVLVEKGYAERVAEVYDFSLALELGVSTTTGRSLIEFGLSRITAAAVAGLITDSSLTPEQVKEWIRAQPEDMLSQLSGLVLAELHSKELLAPVAAED

SEQ ID NO: 54928 - protein, 315 aa, Pseudomonas aeruginosa
MSIITPADLESALTGNPEALEVHLTLVERDVPIDGHLVKIHCHCLSVDGNGRVQPHRLAEFMRNAVVDYAIPRSKLADAKARDNRFNSTEAVAELIERAKRSFTDLANTGEGGEMLLFLLAERFLKLPQILCKMDLKTDTRVHYHGADGVYAGVTAEGTLKLYWGESKVYADASAAIRDCLNSLSPFLIEPEHEEAGRERDLMLLSDKADLSNPALTDALKKYFDRSSVMSKRVQYCGVALVGFDAPFYPKDNAKAVAEEIVEASRTALTGWSNRIGERLKLEKLDQMEIELFCVPLPSAEGFRAAFLKAMGIKE

SEQ ID NO: 54929 - protein, 866 aa, Pseudomonas aeruginosa; identical to SEQ ID NO: 54901

SEQ ID NO: 54930 - protein, 315 aa, Pseudomonas aeruginosa; identical to SEQ ID NO: 54928

SEQ ID NO: 54931 - protein, 866 aa, Pseudomonas aeruginosa; identical to SEQ ID NO: 54901

SEQ ID NO: 54932 - protein, 315 aa, Pseudomonas aeruginosa; identical to SEQ ID NO: 54928

SEQ ID NO: 54933 - protein, 866 aa, Pseudomonas aeruginosa
MSLADLQSWLLQEGVRDDLDAITRLTVRNELDNLAPDTSVQSDEPIDWPRLLLAGSILARSDQRGDQEAALRVATAAVSLTDDQALKDAGAVLMGKLSNFRAITLATDRKLVAAGLDGRLGIALRLEAQRREMDRSVLVQSSGAWLQVNDFQQRFWINAAGDSWLSASAPTASGKTFLVLQWLIDQVVAGEARVAVYLAPTRALVSEIETNLKSILGSSEEIEVSSLPLPDKYKAARAGSARVILVFTQERLHLLANVLGDMFLIDLLIVDEAHKIGDNQRGVILQDAIERATRANPKLKAVFISPATQNPEELLTDAPLGVHTVAVDSDSSTVLQNLIVATQVPRKSKLWELTLRQQGSTLPVGVLQLASTPEGVKKRLAFIAAAVGERGGTLVYANGAGEAEEVADLISQLLPKLPTTDPELSELAELARKGVHQDFRLAPLVELGVAFHYGNMPSLLRLEIERLFRSGKIRFLVCTSTLIEGVNLSCRTIVVRGPRKGRGHPMEPHDFWNLAGRAGRWGDEFQGNIICIDPEDTQAWPAGVPGRARYPIKRESDAVLELGDGMAGYLANRGLSDLSSIEDKDKFEQVGAYLLTTFMRLGSISAASLAKRHDAESIAKLDQALGALAEQIEISVDLAARHPGVSAVGLQHLLEAFRAYPGDVENLLPADVASFDSYDRFVTIMGRVNDHLFLAFNPPARIRLYALIVVKWLKGYSLARIIRDSIDWHQKNDKPFSLPGLIRGTMELVEQIARFRAPKYLSAYMDVLYLHLREIGREDLIDDGLDIGTQLEFGVSSTTLLSLMELGLSRMSAVALYEKIARDDLNRDECLAWISERMSQFRAMDIPAIIIREVRERLTLPGESTT

SEQ ID NO: 54934 - protein, 315 aa, Pseudomonas aeruginosa; identical to SEQ ID NO: 54928

SEQ ID NO: 54935 - protein, 866 aa, Pseudomonas aeruginosa; identical to SEQ ID NO: 54901

SEQ ID NO: 54936 - protein, 315 aa, Pseudomonas aeruginosa; identical to SEQ ID NO: 54928

SEQ ID NO: 54937 - protein, 866 aa, Pseudomonas aeruginosa; identical to SEQ ID NO: 54901

SEQ ID NO: 54938 - protein, 325 aa, Burkholderia cepacia
MNRKSPVSGSDVSKHIRRLIGRHLVDERIRRLTVDTGHDAEFNAYFLYPAFRNGKPTVGPLIEMLMGEITAFCIAKEERRKAKLADKNLPYDAPAMDRLARRARRLFMDARQNQSRSGEGGELLLFVLIEHFLQAPIVLSKMRLKTNANMPVHGTDGVHAFWDDERNTLVTVFGESKLHKSFSSAVADAAESLEEFVKNVGGRYDHELLLTLNHIDLDGFPKDIKEHLIKFLNPFETAEGNRRLERFAVLVGFDAKQYNEVASLSLQEAEEKFRQLYESGAKRAIGTASSNLSMRGIDLASVDLFMFPIPSVDDFRGQFERALSE

SEQ ID NO: 54939 - protein, 842 aa, Burkholderia cepacia
MATRVAQAPRFKIAYEALQRASLSDVVGKDALLSVDVVYKLAQSALILAQASDTKNWMLAQDIAYALASLHLTEEQREVCSHVLATLGNFPAADFLLPESTSKALPWALQLDEGLRKADNTIEVMGQKAVLTDFQADIWNGLKSNRYLSVSAPTSAGKSFVLQAFILDALESYDGFQDIVYLVPTRSLIQEVSASLGKSLASLGEKVVVSSVPLIDDELNHAQSRVLVYTQERLRTALDRSDLEPAIIIVDEAQQIADDERGMLLLNCLEEAIRRSPDVRLLFITPNSKSASSMNGLLDLKRLLSIQSDLKPVRQNLIYVKFQARAKEISLRLHRPGLEPLEIGTYKAQRRFLTKDKRLIDAAIELGGGGQSLVYVGGPDSAEKIALAISKHRTDAVPASADLKVLSEFVAEHVHPEYALVSSVLTGVGYHYGHMPSAISSAVEQYFRENKLPYLVCTSTLLQGVNLPARNIFLHKPTKGKGKPINGSDFWNLAGRAGRMQKDTHGNVFLIEYEDWESKPVDENERREVVSSLSHALKSRQGEIVDYARDPKHPSGSKDYQFVESVFCRLFIDAKLDRFDETIRRATFGQDVSDVREVKRAIYEQLDKVTLPIEIIAKNNLISPIRQQALFDFFEGSIKRGRYRNLIPPHPKGESAKERMTEIMRISRTYLEGVENKQENFFGWFSLLWMNGTGLKQIIQRQIDHEIKTREENGDETPVKSGTVIRETLKSIDNFLRFHYVKYLGCYINILQYALAKRGINAASEIPAVPLFLELGASDPVMIQAMSLGLSRVAAKEVSRLFRSAPRSPAALRLRLRSMNRELLTLPRLVLAELQKFGLYRA

SEQ ID NO: 54940 - protein, 320 aa, Burkholderia cepacia
MTKANNSFAALLDPIHGVDNVLKEVTATPLLEQPRLLFVRMQEHIPQVDALAELLVDQLVNYVIPLRKRREAFAQSSNSSTGGDMAAVSRLRREAKRLLVTYNQKHPGRYGEVGELIAYVVAVRYLGAAQLGAKMALKTSSEMPVHGVDGLHGSQADDGSVLFYLLESKLIPSAADASREMVDSIAEHQADRGRMLNELRLVSDLSNLDSLQGDAREAAKSFFNSYTGDGSHLRRRDIHVGSLVFSESAFQDKLPRDLKKPPEIHEEHLEKLYAAKHKAFSKNLKNQADAKGVDLGGCIVFLVALPDVNEFKRIFAELNT

SEQ ID NO: 54941 - protein, 875 aa, Burkholderia cepacia
MSTFATEVAIEIRREPGFWSDLAELRAVGIRSTVLQENQQVRVEGPVLAEKALARLLNTASVFASATDEQSKELAQQIAVFASLTSSDDIVREASIRILSDLGNFPGLRKLEREHPVDLGFETHMRSGLLRELNTVDMAGARVPLTEYQLDLWRSLDSSAATAVSAPTSSGKSFVVLEHLSERAIASERFGAIYIAPTRALLTEIHGKLEKRLSSISDSIRITTIPVPDPESRPKQIYVLTQERAQFLLSTVAVAGLIDLVISDEAQSLGDDSRGMILQDALEKLRESNPAARFLFLAPGASGLQLIGDSIGLPDINVKETTLSPVVQNRISVGFSDLDEHVVRLDLVTPKRLEPIGTYHFQRGFALGDDTKLAAVALELGASGRSLVYATGAKNAEDLTALLALNRQPGTSKGLSDLAKFIEQHIHKQYSLANYVRQGVAFHYGNMPSLLREGIEAAFKRGELDYLCCTTTLFQGVNLPARNVFIDTPTRGKGAALDEASLWNFAGRAGRLGEEVVGNVFLVNYENWETKPLTERKPFAMQAAFKETVEADFGAVVELLQAAVDKAPILERDRASEDRITAAAGLILFRSSQKTLDGLLGRRGLSLTTEQKDTLTALAEQALASLELPASVLTTSWMLDPVALAGLLQRIRELVRHRDFSKLMPSNPSGDSYTVYNSIIRRLYKHLGGMNLSGEEGKRQRGYVSHVTVTALKWMRGEPLTQLVAEAVKYKKKVAQQTNKRPLTQAAIDGAIRDMFTLIEQTIRFKLVQWAKAYVDLLKYALAQEGLDEMVTQVYDFSLALELGVSTRTGRSLVEFGLSRITAAAMASLITDSSLSADQVRGWFLQQPASLIQQLSPLVVAELRERGLVAIEYSA

SEQ ID NO: 54942 - protein, 320 aa, Burkholderia cepacia; identical to SEQ ID NO: 54940

SEQ ID NO: 54943 - protein, 875 aa, Burkholderia cepacia; identical to SEQ ID NO: 54941

SEQ ID NO: 54944 - protein, 312 aa, Burkholderia cepacia
MEQFFAPLIGPNFIGARVRHLTRHTKDLPEVNAHFLYLAFQNDRPAIDALVDALKYCILPFCTTKEELAKAKRADEAFPYGSPEIQRLLETAKRRFILSTKGPSKSGEGGELLLFAFIEHFLQAPIILSKMRLKTSARMPVHGADGVHARWDSKNNRLVIIFGESKVHASCPSAIKAAAKSVGDFANNVNDRKTYELQLTTDHIDLDGFPEGAKTELLRYLHPFATQEANRREDRFAILLAYESAVYGELEDVDSAELAFVERYREDLEHVLGHAKLHLKEHKVSLRHVDLFLFPLPNVQTFRDQFKDALRV

SEQ ID NO: 54945 - protein, 851 aa, Burkholderia cepacia
MRFVSEFRLQLAREVAGHPDFKTAYQELQWHSLASLLGRKAKLDGEKSRKLVQSALIFAQSPDADLHIVAQDIAYCLAALKISAEAKAICAHILATLGNFPAGDFVSDAAAAVEFLPWQLAASETVRRDANSVVVRGETVLLTDFQMSVWRELHERQYVSVSAPTSSGKSFVIQTFLKDFISSSDRNLDVVYVVPSRSLIHEVQANMAQELPDVVVQSTPRAPIEHAVSQSRVFVFTQERLRTALEQEDFGLDVLIVDEAQQIGDGARGILLHSCLEEVIRRFPATQILLITPGAQSGAPIGRLLQLKGMTDLQTHLRPVRQNLIYADFEEARKGDYLSLSLQQREGGRLHIGRLTANACHSDFERLVETVRLVRDRGQSLVYASSKVPAEATAIALAELAETTDEPDRRLGELAAFIRRHVHPDFVLADCVERGVGFHYGNMPTNITKALEDYFSNGLLNTLVCTSTLLQGVNLPARNIFICNPYKGQGVPMSVDDFWNLAGRAGRLQKDTHGNVFLVSYDKWKSKPADEEPAKNVIPALSKALTIDRRPVVTYAENPEHTSGNKKTAFAESVFSRLLVDAKSGVLMETIEHAAPDVAHGAVARLINAVERYVDEVTLPVSLLKRHGMISPVRQQQMFNVLRAAVADGRKDELIPLHPMGGGEARERLEFILHHIHKYFEGRDNKAHRFYGWFSLSWMEGKSLRDIIEYQLKHAREKAQKNGQRREVPAGDIIKYVLHEIEETLRFKYVKFLSCYLDLLRHALLVEGEDEIEFLPIPLFLELGACSKTMVSCMDLGLSRIAAREVMDLLKSKELNAVVVRRRLSQMPTRAREELSPLVVREIQRLKLWQR

SEQ ID NO: 54946 - protein, 484 aa, Pseudomonas fluorescens NCIMB 11764
MSNALTDEYKLDNVFILEAYDDLGEPISTGSCFSVGASIFFTSWHVVKNAYTLRIFQSRDDYFRQEFHAAKCVFYDKETDFAILSSDSLTIKSKIEIGIYKAELNDEVKAIGYAAEKSRLHFPITSKISNVFDFSTTYKYDFEFGKPAELDKANGLSGGPVFFKGYAIGLLALQTVGSALQAVSFHTIFERPSALEAIESQGLVITGGDEISYDRPDHPESPFVVSIDCAASDPNIKGLDIGFDLGEWRSQNLIDQTLNWIEDYALTPKQKKALGQHNFKRIQSAKRNFQIGNPAAMADLFLHIAIRQNYKTIPIISNVITVDGESVFSCSHIVIYRGKVELWLGISAMEVSMEQTVKEAIHRVDSIIRSGGIQDRLVVILSELDPTWPYIKKLEKLSNSNLKLTDKIDKIIIPMFLSSNADLINNYDPSNFSNSFQKDIDECRERVAGAYNARIVPLINLRIFLFPVDNIHELHTKFVKEFEF

SEQ ID NO: 54947 - protein, 723 aa, Pseudomonas fluorescens NCIMB 11764
MNTEIYNNLRKQIDNSAFTGWQRLFVELINLYNLHDDNQFLIQDLTLRCLERRGEFKQLHGLLNILISELGLFPYLDPDLMTSKDSIRMNIFKSPIAGDITFHLKQAEIYYRIVNGDNIVLSAPTSFGKSLVIDALISSEEYDNIVVVVPTIALMDELRKKFSKYKENYKIITQSSQEPATKNLYIYTQERVLECKNLERVDFFIIDEFYKLAPLNTSDYRSDRLNLAFHKLFKMCSRFYMLGPNINGLAEGIEDKLNCNFVKYDNYKTVVANEYRYIIREDGNDKEKDIDRDAHLVNILQKIGQNEQTLIYCKTPKRAASLVKKIMKLRENQEIRKGEFSDWLRETYHDDWSMADAVERGIACHHGRLPRVVSGYVVEAFNEKLINILVCTSTLIEGVNTNARSVIIYDDCIRGTTQLDSFTFNNISGRSGRMFEHFVGDIHVIGRKPSAELPWIDVPIVTQDDSASRPMLLSIIDELSTEQRASLSRYTTQQYVPITLLNKHLGVPPERIIKFAEALMEKCGAWNSIMAWTGKFPTSEQLRHLCNIMFDHFAISRMGGGCVKSKKQLFYRVLNIVNRKEDKDLIQSEYDFWSPRNAEYEIDDAVQSVFDFKRNLIGYNLPKIILAINDVQRLIFSRFNYRCGDYAAFAHSLEAMFLPPSIVALEEFGIPTRVAQKIYQISNVGEDATVDLILEQVRSHPGLYISKFDDFEKTLLNRAIQYL

SEQ ID NO: 54948 - protein, 308 aa, Pseudomonas fluorescens FH5
MVKIAEIKSLITVNSNDYTACIDSIEHSDTISSIRTKLRFHHLKFDGNGRPMVKALAGLLYNYIIDYCIAAKNRPTPITFKDAARLTKEARKLFRHPDITDDSPDKTGEAGEALLYFLIEAIVQAPQVVAKMELKTNRKLEANGSDGIHVKWNADDQLVDFYFGESKLYQNIDDAISSAIKSIDSFHADEIYKHEFTMITKHFKYADKEVQDAVTEHIRLGEPGPGARINHACLIGYNWDAYSSAPGVSHPVLTNEFRARFSKETNLIASKLEKKLLGFSRSHLCLDVFFIPFPSVQEFRNEFNAALD

SEQ ID NO: 54949 - protein, 299 aa, Pseudomonas fluorescens FH5
MQKLMDDGGSIIHSLMTGEIDADKKDFAEAGFSRLYREVIENEESEIIKKYQTVENSEVLAQNLRHVQNLTITLPQEILESHSSLRPDHLQMLYDKLHGAVYTEEFSLLNPYAVGGYHRMVRAIDMISDVFQWAESQKFRSWVCYLSHQWVTGTPINVLIRDRVNYIRRQDNFSTKTSTIIRELLGIIESDIRFKLVKYFSAYEDVISYCLKNKGLSEDEARQAAYHTFLEFGACSSVELSLMSLGFSRFTALRLGKMLDWGDSVEVEDFASVIARSNVDSLKIPRVCIKEIKEILGQQ

SEQ ID NO: 54950 - protein, 538 aa, Pseudomonas fluorescens
MEPNDAGGVAAKHGFNFQDCVAAYYVTQMLRDKTIQRVRCEVTDDIDVVCDDFVEFVQVKTTTKAQWAKSDLVVLGKGAGNKKIPCSSILHKSMDCEPVLTVPRKFRIVTEHPTNVTLEYLLINRDERDGKPGRDDLIDYLNSKTSNYVATSGVDVATWVDAACWEVFRTMREIELLGIRNIRLASYDLHGVMLSTEASAEDIWRGILDTVTRKGALSRRIHSVDSKSYLRSDLNAWFLTYVEEDQKRAGRKVYVKRPLPHILVPFRNPLSTPCAKRNGRVLHQQYSLRRYRYKHIVDNVCKWLDEVFLRPNELADIHKLSVVEQGQRLKKMVFASMADVRSFLGRVLLHATIRQMHASQPIPCLLYLQGEDEEKILENVHIVRRDPEGDQLWVGFSELVTAPNITKRLTEIREQLYEEIDNCFGDARGKILDIKDDDYLLSHDIDAILDESNPFDAHLDRFRFVLFIGYDSTLLTEPETSGHEDHLEQETAALFEAFVDDLEHDPTFAELAIDVFIYPAPSLETLTQLVDKKVREAV

SEQ ID NO: 54951 - protein, 740 aa, Pseudomonas fluorescens
MTEIYDAAKLSLGSDGFSAFRYLSAVNSLLSNPVSTSLGRDLTIRALDARDKFTGHAGILRNMVRKAGLFPYLKKEFSELSQGDRIALDVYRTPFSEDFVFHSMQFRIFDLLKAGRNVVLSAPTSMGKSAIVDSLLGLGRFNRVVLVVPTVALADETRRRLQERFGEVYQIIHHSSQECRRERVVYVLTQERVNERDDIKDIDLFVIDEFYKLAFQQLKNGTTDYKDERVIELNIALSKLLKVSKQFYLTGPFINSIRGLTELGYEHTFISADFNTVAVDVQTFGVDANDEEGKLEMLATIAPQCKGATIIYCKSSSVAGKVARELVRLGYGQPFQSEHIDWVAEEFDPEWDYTYALRNGIGLHFGGLPRALQQYTADRFNAGDLRFLLCTATIIEGVNTVAKNVVIYDNRNGTRGIDKFTHGNIKGRAGRMGIHFVGKVFCLEDVPEDNLNQEVDVPLGIQDEDTPLNLLASAQPDHLFEYSQDRFEAAFAQDRFSIDLVKKHSYFRMEQFEQLYSMVEMLSDDDFESLVFHWSPAPGFLTTLATICSKLVPRAFSTNGLQTKTPDNILAKLTNYQRAESYSDYLKGQIEYTKQRIKDDEKRVRTGQKRNKADEKLTLSSGLNNDLKLVSNTFGYTIPKVLGLLEDVVRLHATKKGIRSKIDYSYVRMGFENLHLPPGVNALEEIGIPIQTLHRISELLEFPEGAGVDELADHLRQNEQAWEFMGFVDQSFVRRALGAV

SEQ ID NO: 54952 - protein, 312 aa, Pseudomonas fluorescens
MNPDDLASALTGNPEALEVHLTLVQRDVQVEGNLVKIHCHCLSVDANGRVQPRRLAEFMRNAVVDYAIPRSKLAEAKERDNRYNSTEAVTELIERAKRSFTDLTNTGEGGEMLLFLLAERFLKLPHILCKMDLKTDTRMHYHGADGVYAGVTSDGTLKLYWGESKVYSDPSSAIRDCLSSLSPFLIEPESEDAERERDLMLLSDKADLSNPILTAALRKYFDKSSPMSKRVQYCGVALVGFDASFYPKDEAKAVADQISEASRAELSGWSKRIGERIKLEKLDQIEIELFCVPLPSAEGFRAAFLKAMGIKE

SEQ ID NO: 54953 - protein, 862 aa, Pseudomonas fluorescens
MSLADLQSWLLEEGVRSDLEAVTRLTVRQELDNIEPTDPPMSVTSIDWPRLLLAGSILARSDQRIDQGAALRIATAAISLADHQAVKDSGAVLMGKLSNFRAVDLAVARKLLETDLEARLGTSLRLEAQRREMEHSVLVHSTGTWLQVNDFQQRFWNNATGDNWLSASAPTASGKTFLVLQWLIDQIVTGDSQVVVYLAPTRALVSEIETNLKELLGNTKNIEVSSLPLITKYKTARAGGARVVLVFTQERLHLLANVLGDAFSVDLLIVDEAHKIGDNQRGVILQDAIERATRANPKLKAVFISPATQNPGELLTDAPTGVKTTAVDSDSSTVLQNLIFATQVPRNSKLWKLDLRQQHSELPIGILKLASTPAGLKKRLAFIAAAAGERGGTLVYANGSAEAEEVADLISQLLPKSEAIDVELSQLAELARKGVHDDFRLAPLVELGVAFHYGNMPSLIRLEIERLFRSGKIRFLVCTSTLIEGVNLSCRTIVVRGPRKGKGHPMEPHDFWNLAGRAGRWGDEFQGNIICIDPNDEQAWPTGVPDRARYPIKRESDAVLELGDDIVDYLYKRGLPATLDIDSKDKFEQVGAYLLATFMRLGSISESNLAKRHDPVFIAKIDDALESLAQQVEIGVDLAVRHPGVNAIGLQHLLEAFRAYPNDVENLLLAEVSSNDSYDRFITIMGRINKHLLPVFTPETRINIYSLIIVKWLKGYSLSRIIRDSIDWHEGANKAFKLPELIRSTMELVEQIARFRAPKYFSAYIDVLHLHLREINREDLIDDGLDIGTQLEFGVSSTSLLSLMELGLSRMTAVALYEKISRDDLSREGCIEWLQERANQLHAMDLPTIIIREITELLTSLD

SEQ ID NO: 54954 - protein, 310 aa, Pseudomonas fluorescens
MDFEVLIDSSFINLNIDPKLIPIENKHVLSIINDFEDGDWRYEKFSNFIWDNIAQTALSHQERKNLEHKSQSTLKRAAENLRLTDKEQDISKGSELAEIVLYAIMKHKYNALPVVPKIFYKQNAQDNAKGADSVHIVLEGDDDFSLWFGEAKFFNSIEDSRLPSIITSVGNSLKTDKLKKENSIITNIADIDLLEINDQLKKKIKDSLSHQASIDTLKPKINIPILLLHECGITSASTEISDDYKEKIIAFHSERANSYFKKQIKSLANIHFYEKIKFHIILFPVPEKEPIIEAFVSDAEHYKKPKKKQD

SEQ ID NO: 54955 - protein, 705 aa, Pseudomonas fluorescens
MEIFEECGRINNLITEGNEFSARNELIKLLDYFQRQKLEYTPLLNNLIRQTGLYPYLELGSSIWQDRYVHESFKVDTGAPELVTLHREQSLLLSKLLSGKSVAVSAPTSFGKSFVIDSFISIKKPKNIAIIVPTIALTDETRRRLQRKFGLDYKIITTSDQELSDQNIFIFPQERSISYVDKIDVLDMLVIDEFYKASSVFDKERSPSLLKAILKLGDKATQRYFLAPNINKLKDNIFTKGMEFCSLDFNTVFLEKQDLYKEIGKDETKKSQELLRILDSTTGKTLIYAGTYTNIEKLSTLILSNRNKQNTKLLSNFSKWLAKNYDPNWGLTNMVLRGTGIHNGQLHRSLSQIQIKLFEEPDALQTIISTSSIIEGVNTSAQNVILWSNLSGKGRARITDFTYKNIIGRGGRMLRHFVGKIYILEEPPKETDNALNLEIPDELVSDLESRVASEELTPEQIAKIIAYREEMSELIGEKSYKDIKNNSMLQSSNSFLIMDIVKDLKNNPASWNGLGYLNSQNPENWERLLYKVIRLQPAGWGTDYTKVVEFVKILSQNWAKTIPELLQQLNDIDVGVDDFFKLERTVTFKLAALFNDVSIIQKEILGDSAQDISPFVSKLSHAFLPKVVYQLEEYGLPRNISKQIHHAGLIDFNSEELNIYQAIDKLQTLNTQGLNHLIGELDEFDLYILDYFFDGVETQTRNSKP

SEQ ID NO: 54956 - protein, 537 aa, Pseudomonas fluorescens
MVLINIPSNKGGPAARQGFKYQDHVAVSFILKMLRDSSYQHVECETADDIVLVSRQSGETVNEYIQVKTTEGDSKWNQSEATALDSGRADTSLLQKSLLCDCRPGKALFRMVTKRDTAKALSCFKLELEKRTQPDLATSRGAALAKKFKKTRSPMGRDFCYWADNFVWQICGDVDALESVNLRKLAEIIDIQGSWPTHKQQQAIYAEFLSWADDAATANVISESIQKVITRADAMDRLDALLAAADSKNITYSKPYKSKPPPFLVEFHAATDEGLLRSLTGYDVQYDFGEWRHRELAEHLVQWLPEFCLQASEIVNFQVHHAQTILSKAIATFTQNGMERDKLIAELILHVILRNKENSEPIACKVFFASKTGLSEFGNAHIVQRSGEVDQLWLGLARMITVGTMAQTVAQVCSTLDSTINKAALTNEREIIISLREPNHLRSNSEELNKALERNAPAEEMLKVLCFPVLLAYDSDALSSGYLSDYIDRLKHEINDHYSSLKVHLPKKMDQIRIAVFLVPIESIQNLIKEFNSRCRV

SEQ ID NO: 54957 - protein, 714 aa, Pseudomonas fluorescens
MKYEVVKERLERLGEDSSSRIELLQAISVAVNRGNPEWEGRDLVIRALDKFALFGEVEQSLLLSMIRAVGLFPYITPYLDGISISDRLAYEVHRVDGVEAGMVFHRLQAHVFSLLMQGRNVVLSASTSVGKSLVIDAVLAQEKFRKIVVIVPTIALIDETRRRLVKRFKQRCNVITHPTQEADDARVNVYLLTQERVLQRDDLQDVGFFVVDEFYKLDLCSDSETGSRAIDLSLAFHKLARQGAQFYLLGPHIQNIHGLDAYEYNFIPSNFSTVAVDVEYFNLPTNGDARKDKLLELCRKIATPTLIYSQSPASANKVAQLLIEKGGFSPLAQTQDIAQWIAKEYHPQWNVAKAISLGIAIHHGGVPRALQQYFVKLFNEGTIKHIICTSTMIEGVNTSAENVIIYDRRVSNTPFDFFTFKNISGRAGRMNRYFIGKVYMLEAPPEEKDLTVDYPIGLQNEDSPMGLLMKLEPEYLTDISRQRLDRAYATPLLSTATLVENRHIPVDRQIEIAESIIRNLAVSRRMLTWKGNPEQNQLEYVCTLVCDHLQTKLMDYGIISGPQLAFHINSVRMEKDFSAYLQNAIDTNRAGTTASEAINLRLKFIRNVLCYRLPRDFMAISKIQADIFTQRNIEPGDFSFFSEQMENLFHDPLLTALDEYGIPTQVSTRIKSSILPSDNLNDLLNKLRHLAIRLDGMQLSPFERNIMKWAIAEM

SEQ ID NO: 54958 - protein, 537 aa, Pseudomonas fluorescens; identical to SEQ ID NO: 54956

SEQ ID NO: 54959 - protein, 714 aa, Pseudomonas fluorescens; identical to SEQ ID NO: 54957

SEQ ID NO: 54960 - protein, 543 aa, Pseudomonas marginalis ICMP 9505
MVRITSPSNKGGPAARQGFKYQDHVAVSFIFKMMRDSSYTQVECETADDIVAVFKYAGQLVNEYIQVKTTEGDHKWNMEEVTKLDGTKADSSLLHKSLKCDVRPGPARFRIVTQRDVAKILDGFKTELDKRNLPDTTTARGKALLKKFKRFTSPQNRSFADWADNCVWQVYGDVEALEAVNIKALSKLAEDFGNRPNNTQMQAIYDEFLEMADKAATANVKTAASEKIILREPALAQLKQLLDAADDQSTATAKPYKKRPDPFLIEFHASTDEGLLQSFSGFDVRYALKAWRHDGFAKHLVEWLPEFSLKASEIVNILAHNAEAMLARSINAFSDCDLPRDRLIAELILHAILRSRQNSEPVACKVFYKSGGKLSEFGNAHIVQIPGQDDQLWLGLARLIEADTMDATLAQICGVLDATISETVLSSEREIIINLREPLHHQPKADAFNQALHRNSSVDDMLNVLCFPILLTYDSHVLSSGWLADYVNNLRKEIEAHFSTFTTQLPENIKQVKVMVFLVPMESIEKLTNAFNARCKTLEDLQV

SEQ ID NO: 54961 - protein, 713 aa, Pseudomonas marginalis ICMP 9505
MNYETIKNSLAKLSDEGVSTVDVLLAINAIVNRSNAEWEGRDLVIRALDKFALFDAVEQSLLLNMVRAVGLFPYITPHLSNMALSDRLAYEAHRVEGVEPGMVFHHLQAHVFSLIMQGQNVVLSASTSVGKSLVIDAVLAQRRFKKVVVIVPTIALIDETRRRLVKRFRDFNLITHPSQEAVPDVTNVYLLTQERVIQRPDLDDVEFFVLDEFYKIDLGSNKDESSRAVDLSLAFHKLAKTGAQFYMLGPHIQKISGLDGYEYHFIPSDFSTVAVDIQNFNLGMRSEERTQKLLELVRTLESPTLIYCQAPASANRVAEYLIQDGGLIPVPETQEIAAWISKHYHPEWNVARAIALGIGIHHGGVPRALQQYMVKLFNEGVIKRIICTSTMIEGVNTSAENVIIYDRRLKMSTLDYFTYKNISGRAGRMNKYFIGKVFMLEAPPIEQGLTVEYPIGHQDETSPIGLLMQLENEYLTDISRGRLQDAYANPLLSPATLIENRHIPIERQVEVAKTIISDLPDGQELLGWKGIPEPNQLNYLCELVYILEGKNLMDYLISSSSQLAWHINELRNQKNLPAYLSEAVENRWENISASEAVNLRLRFIRNMMCFRLPRDIMAIHKIQVDVLEQHGYEPGDFSFFAEQLENMFLDPLLTALDEYGIPTQISTKIKHLILPSEHLNDLLAKLRSLSRRVESLQLTAFEKGLMQWAVADM

SEQ ID NO: 54962 - protein, 247 aa, Pseudomonas putida CSV86
MEWLPEFALNYSELEEIGHYNAIRMTKKAAKIVYQSEKYGLRGEFGEIFLHIAIRQVYKTLPAVSKIYYKSSANETVKGFDAVHVVKGRDGLELWIGETKFYNDITRAIYDVCKEIVDHLATDYLRTEFILIQNKIDPEWPEAESLKKLLSSNVSLDQVFKKACIPILLTYDSQAVEGSSESNSDYLNCLKAEVAIAYKNLREKLGAQYRDKFGSDLPVTVHVILIPLKDKKELISAMDTRLKALQL

SEQ ID NO: 54963 - protein, 715 aa, Pseudomonas putida CSV86
MMDINEVRAALKGERLVESPFYLVSNIAKICVENVELGRELVIRALDSELILVHGYREIVDELAMQVGLYPYVESLSDLSLRSAMMHAAHRADGEMSDFVIHSAQAKVLRKLMAGESVILSAPTSFGKSLLVDLLISAKDFSNIVLIVPTLALVEETRRRVSRFVDRYSIVTSANQKIEGRNIFVLAQERFLSIEGKLPSIDFFVIDEFYKLSISGEGDRATLLNQAFLALSRTGAQFYLLGPSIKAIPEEVYNKVECSFVVENFQTVAVELHHIKKKPNKALALAGLLDRLDGQTMIYCQSPSSTRTVLSEYLENRELQQTGDEELIEAAGWTAKHYHHDWLVSVGLKYGIGIHHGRLPRSLGRFMIRAFEEGKLKILLCTSTLIEGVNTAAKNVIIYDNKLNRQPLDFFTFNNIKGRSGRMFRHFVGNVYLFEAPPEEDLPFVDIPALNPTDATPSSLLLQMSKDDLPTGLEEKVERLTKQNFLPVAILKAHSGIEPEYLIDTAKYLHELDIRSLMQCSWVARPTYDELRFSSEIIWEKLGGAQSARRAAMRTSSMMTKWIWDLFRLKSVPVFRKQKIINQMEYGSAADEAVENVLAFIRGWASFNYPKYLSALNDIAAFVLAARGLSGCNYIPFAASIEHLFQPDSFSSLEEYGLPTEITERLMQRSLFGKDESLDVVIQRLRGPELKRYADGLFEKRIIEDFQSGIGVKKN

SEQ ID NO: 54964 - protein, 289 aa, Pseudomonas putida S610
MNHPEQFLSLVVHEIDAAGDDLALCAGFERGVWRRDQLANHVMEWLPEFALNYSELEEIGHYNAIRMTKKAAKIVYQSEKYGLRGEFGEIFLHIAIRQVFKTLPAVSKIYYKSSANETVKGFDAVHVVKGEDGLELWIGETKFYNDMTRAIYDVCKEIVDHLATDYLRTEFILIQNKIDPEWPEAESLKKLLSSNVSLDQVFKKACIPILLTYDSQAVEGSSESNSDYLNCLKAEVAVAYKNLREKLGAQYRDKFGSDLPVTVHVILIPLKDKKELISAMDTRLKALQL

SEQ ID NO: 54965 - protein, 718 aa, Pseudomonas putida S610
MMDINEVRAALKGERLVESPFYLVSNIAKICVENIELGRELVIRALDSELILAHGYREIIDELAIQVGLYPYVESLSDLSLRSAMMHAAHRADGEMSDFVIHSAQAKVLRKLMAGESVILSAPTSFGKSLLVDLLISAKDFSNIVLIVPTLALVEETRRRVSRFVDRYSIITSANQKIEERNIFVLTQERFLSVEGKLPSIDFFVIDEFYKLSISGEGDRATLLNQAFLSLSRTGAQFYLLGPSIKAIPEEVYNKVECSFVVENFQTVAVELHHIKKKPNKALALAGLLDRLDGQTMIYCQSPSSTRTVLSEYLENRELQQTSDEELIEAADWTAKHYHHDWLVSVGLKYGIGIHHGRLPRSLGRFMVRAFEEGKLNILLCTSTLIEGVNTAAKNVVIYDNKLNRKPLDFFTFNNIKGRSGRMFRHFVGNVYLFEAPPEEDLPFVDIPALNPTDATPSSLLLQMSKDDLPAGLMEKVERLTKQNFLPVAILKAHSGIEPEYLIDTAKYLHELDIRSLMHCSWVARPTYDELRLSSEIIWEKLGGAQSARRAAMRTSSMMTKWIWDLFKLKSVPVFRKQKIINQMEYGSAADEAVENVLAFIRGWASFNYPKYLSALNDVAAFVLAARGLRGCNYIPFAASIEHLFQPDSFSSLEEYGLPTEITERLMQRSLFGKDESLDVIIQRLRGPELNRYADGLFEKRIIEDFQSGIGVKKIKQT

SEQ ID NO: 54966 - protein, 316 aa, Ralstonia solanacearum
MSTITATDLESALTGNPEALEVHLTLVERDVPIDGHLVKIHCHCLSVDGNGRVQPHRLAEFMRNAVVDYAIPRSKLADAKARDNRFNSTEAVAELVERAKRSFTDLANTGEGGEMLLFLLAERFLKLPQILCKMDLKTDTRMHYHGADGVYAGVTPEGTLKLYWGESKIYGDASAAIRACLNSLAPFLIEPENEEAERERDLMLLSDKADLSNPALTDALKKYFDKSSVMSKRVQYCGAALVGFDAAFYPKANAKAVAEEIVKASRSELTGWSNSIGERLKLEKLEQMEIEVFCVPLPSAEGFRTAFLKAMGIKEQ

SEQ ID NO: 54967 - protein, 866 aa, Ralstonia solanacearum
MSFADLQAWLLQEGIRDDLDAITRLTVRNELDNLAPDPSAPSAAAIDWPRLLLAGSILARSDQRADQEAALRIATAAISLTDDQALKDAGAVLLGKLSNFRAIALAIDRNLLAVGLDGRLGVALRLEAQRREMDRSILVQSSGAWLQVNDFQQRFWIDAAGDRWLSASAPTASGKTFLVLQWLIDQVIAGETRVAVYLAPTRALVSEIETNLKSLLGSTEAIEVSSLPLPDKYIAARAGGARVILVFTQERLHLLANVLGDVFSIDLLIVDEAHKIGDSQRGVILQDAIERVTRANPRLKAVFISPATQNPEELLADAPDGVQTIAIDSDFSTVLQNLMVATQVPRKSKLWTLILQQQASTLPVGTVQLASTPAGLKKRLAFIAAAAGERGGTLVYTNGAGEAEEVADLISQLLPKLEGIDPELSQLAELARKGVHQDFRLVPLVERGVAFHYGNMPSLLRLEIERLFRSGKIRFLVCTSTLIEGVNLSCRTIVVRGPRKGKGHPMEPHDFWNLAGRAGRWGDEFQGNIICIDPNDTQAWPTGIPSRARYPIKRESDAVLELGDGMADYLSERGLSNLSSIEGADKFEQVGAYLLTTFMRLGSISTANLAKRHDATSLAKLDQVLGSLATRIEIDVDLAARHPGVSAIGLQRLLDAFRSHTGNVENLLPAEVASNDSYDRFVTIMGRVNDHLFPAFAPESRIRLYALIVFKWLKGYSLARIIRDSVEWHQDAGRPFKLPDLIRSTMELVEQIARFRAPKYLSAYVDVLHLHLREIGREDLIDDGLDIGTQLEFGVSSTTLLSLMELGLSRMSAVALYEKIARDDLSREECVAWIAERVGQFQAMDIPAIIVREVRERLTLPGDVAT

SEQ ID NO: 54968 - protein, 341 aa, Pseudomonas stutzeri DSM 10701
MTQLPEPLPSLEDILAKLLDESELDSVLNCAVDDQFGTTPPRLSLLHLRFSEDKPNLQNLADYLCSAAMNYALSRKRRDVFFAELSKSKKSSLSLIPRINKAVRDAFIEFREAHPNRASEVGEVLAFCIANHYLQAAQLIAKMSLKTSPNMPVHGLDGIHAAVKNGSLTVYFLESKLTKTAAKGLKDFAESMKTFDEKPKQYSREYELVCNLGNLDVLPENEREHLLQYLDVYSPASSLKRERAVGVVCYSEEKHYANCLPVDDGDVLKHEHHFAGLLAADHGYHQKYLLTQLSKNEVAPEKCSVYLVAVPCIATLRKSFYAALGIPPIMDELDDTNAKEA

SEQ ID NO: 54969 - protein, 885 aa, Pseudomonas stutzeri DSM 10701
MTTFARQLSERFVQNPNFTAALADLQSAGAVSTLAEGLESLENAPDFAELTRLLYCASVFAQADNESLLSLAQNIAFNALLVSKDPGILERSAYILAEIGNFPGVRYLKDRFGAPSSSLMGLVHDKVSQELNTVDVGGHKIALTDYQKRVWDRLERGDDLAISAPTSAGKSFLVIENLARKMEQAARSACVYIAPTRALLAEVLAKIKRRLELFPDIRVSEIPTFEAVEKQVFVLTQERFQMLLAATAEGFDMIIVDEAQNLSDGSRGIILQEAIEQAIQRRAQTHVVMLAPGADGFKEAVESFGLSGVDEITTSVSPVLQNRISVSGVPESSRLDFRLLGQDKGQYIGSVTPAKAQTSNEARLVTVALNFGSEGGSLLYAKSPSEAAKLAKNLHRGLKSKHGSRQLNNELAEFIRDHIHPEYNLITLVEQGVAFHYGQMPALLRDAIEVAFKKQHLKFLVCTTTLFQGINLPARNVFISTPKRGRHEKTTLKPALLWNFAGRAGRMTEDIVGNVFLIDYEQWDERLMDEAVPFKIEPSLGKTITEHAPTILDVLRKNPPPGLPREELHQQVQSAAGLLITKARQGHLDDWVSRVAPDLDGLDSFSLRNAAQQAAASLAIPTPIMTANWSLDLFALNDLLDCFQKHITKGTIDKYIPSNPTDLGAKAFASYRDIFNLMFKLLKGFDGNFGAYVSPIAVRWMEGTPYPVILKQAITFEQERLAKRLSNEEALRKTGAQIKQSRRLKVDKNAVINRTFETIENIVRFQLVQMGKAYVDILAHALRNAGDSERVNRIFDFAMALELGICSTTGRALMELGLSRIAASEMQRILGDQNLSMTKVRDALESLPLQEMNLNPFILEELRAIRLQLRSGPDISGAQEGATHQ

SEQ ID NO: 54970 - protein, 543 aa, Pseudomonas syringae pv. syringae B64; identical to SEQ ID NO: 54960

SEQ ID NO: 54971 - protein, 713 aa, Pseudomonas syringae pv. syringae B64
MKYETIKNSLAKLSDEGVSTVDVLLAINAIVNRSNAEWEGRDLVIRALDKFALFDAVEQSLLLNMVRAVGLFPYITPHLSNMALSDRLAYEAHRVEGVEPGMVFHHLQAHVFSLIMQGQNVVLSASTSVGKSLVIDAVLAQRRFKKVVVIVPTIALIDETRRRLVKRFRDFNLITHPSQEAVPDVTNVYLLTQERVIQRPDLDDVEFFVLDEFYKIDLGSNKDESSRAVDLSLAFHKLAKTGAQFYMLGPHIQKISGLDGYEYHFIPSDFSTVAVDIQNFNLGMRSEERTQKLLELVRTLESPTLIYCQAPASANRVAEYLIQDGGLIPVPETQEIAAWISKHYHPEWNVARAIALGIGIHHGGVPRALQQYMVKLFNEGVIKRIICTSTMIEGVNTSAENVIIYDRRLKMSTLDYFTYKNISGRAGRMNKYFIGKVFMLEAPPIEQGLTVEYPIGHQDETSPIGLLMQLENEYLTDISRGRLQDAYANPLLSPATLIENRHIPIERQVEVAKTIISDLPDGQELLGWKGIPEPNQLNYLCELVYILEGKNLMDYLISSSSQLAWHINELRNQKNLPAYLSEAVENRWENISASEAVNLRLRFIRNMMCFRLPRDIMAIHKIQVDVLEQHGYEPGDFSFFAEQLENMFLDPLLTALDEYGIPTQISTKIKHLILPSEHLNDLLAKLRSLSRRVESLQLTAFEKGLMQWAVADM

SEQ ID NO: 54972 - protein, 314 aa, Pseudomonas syringae pv. aptata
MLELLEESALDKVVNCAVPANHTPDATHPRTTLLHVKFSEDKPQVDRMAGFLWGQCVNYALSRRRRLAFKQKLLDSTGADLSEIPNLVDVVKNVFIKFRKEYPSRASEVGEVLAYCVATQHLKAAQMAAKVSLKTSSNMPVHGLDGIHASVENGVLTIYFLESKLSGSANSGAKEYAESIAGFLNDEKQYLHEYSLVGDLGNLDTLEGEARTLALAHFDVMGNPEIQRRERSVALICYSEKKHFKNSIPIADGSPDIHEKHFSENYAKDLDHHQTAASKHLKNNGVDPRKCQVFFVAVPDVNKLREKFYEAMGK

SEQ ID NO: 54973 - protein, 868 aa, Pseudomonas syringae pv. aptata
MNSFANELSNKLSSHEIFWGLFEMLQSAGAVSTLPDGVYEEFDSLSENDIAKLLYCARVFAQSDLEKFKSISQSIALSCMLISQEPLVLEKCSRILTELGNFPGLGYAEQHYGIGSESLIGTLQRRLAQEINTVQVGGQRLPLTDYQKNVWDQLAGTGSLAISAPTSAGKSFLVIEHMCRLASENSSFCAVYIAPTRALLSEVLQTVQVRLLDMENIRVSSVPSLDPENDNKQVFVLTQERLQVLLAISDMSFDLVIVDEAQNLSDGSRGMILQECLEQVLQRSKITKIIMLAPGAEGFFETAKVIGLNDLRSLTTSVSPVQQNRIVVHKVRGKNELKLELLTGRRILPLGQLATERGMDIPATRLAAVALELGSSGGSLVYSTGPSDAEDIALQISLARKNVEDIRLLELADFIEKHIHPDYKLALQVRNGVAFHYGRMPSLLRESLEEGFKSGALKFLVCTTTLFQGVNLPARNVFIDTPTRGRGTSLDPALLWNFAGRAGRMRKDIVGNVFLVDYDEWPEKPMSEFVKFKIKPAIQETLTTSHFQVLDALSGNMPKRSRFDESSGKVTASAGLLIARAAKGDVGEFIARILPDVEKERVGSLVTAAIAAAESLQLPSIILTSNWMVDPFGQKRLYDKIVSKINADECDDLIPINPHEPGASSLYGGIFHRILKSVYGQEGNFGGYVSSLAIPWMKGMPYPVILNTAIKKEVKRIDKKTAEYFEKKILDPKSRVRQPKALDSSQVIRKTFDLIEDVVRFQFVQLGKVYIDLLSLALCNEGYPELVSDIFDFSLALELGISTQSGRSYVELGLSRIAASALDQIYPNSKLTISEARAWLWDLDVQNLKVGRVILEEIQKLGLIRSEA

SEQ ID NO: 54974 - protein, 157 aa, Bradyrhizobium japonicum USDA 6
MLKLYWGESKIYKDAATAIKDCLASVAPFLIEPEHEDAGRERDLILLSDKADLSDPALTEALKRYFDKMSPMSKRVKYCAVALVGFDAAFYPGDRAQAIADEMKEAARIELKKWSSTIGTRLKKEKLEQVEVELFCLPLPSAEDFRAAFLKAMGQTV

SEQ ID NO: 54975 - protein, 838 aa, Bradyrhizobium japonicum USDA 6
MSLNDLQGWLVAEGLREDLDQLTLHTVVAELDNIVPPTDKAASFDWPRLLLAGSILAQSDQRTYQDAALRIATAAITLSDSEAIKDSGAVLLGKLSNFRAVSLATERGLLTADVEGRLGMALRIEAQRRQMDQSILVQSSGRWIQVNDFQQRFWSQADNYQWLSASAPTASGKTFLVLQWLIDQIRSTEMHVAVYLAPTRALVAEIEANLVSLLGARSGIEVSSLPIREKHDKAHEGGSRAIFVLTQERMHLLANAIGGAFKVDLLVVDEAHKIGDNQRGVILQDAIERASRSNRTLKLVFISPATQNPQELLADAPEGAHTASFESDVPTVLQNLIVAEQVPRKPKLWKLSARKHASLLPLGVVQLGSSPGSLKKRLAFIAAAAGERGGTLVYANRASDSEDIADLISQLIPEVPSDPELLELADLARKGVHPRYRLAPLVERGVAFHYGNMPSLIRSEVERLFRSGKIRFLVCTSTLIEGVNLSCRTIVLRGPRKGVGHPMEAHDFWNLAGRAGRWGDEFQGNIICIDPQDAQAWPDGVPERARFPIKRESDAVIEQGESLADYLDRRATTDLAEFEDPNQFEQVASYLLATFLRQGSIAQSSLAKRHNPAIIERLEASLANIAAQIAVGPDIAARHPGVSALGMQRLLEAFRNYKGDVENLLPAAVDSQDSYDRFVTIMRRINQYLFPAFTPDGIIPLHALIVVQWLKGFSLSRMIERNIDYHRRNGRSFKLPVLIRSTMEMVEQIARFRAPKYLSAYVDVLNMHLAAIGREDLIDGDVDIGTQLEFGVSSRTLLSLIELGLSPLSCDAIDCLFDCPSSSIATDASRFVGVSPTI

SEQ ID NO: 54976 - protein, 344 aa, Bradyrhizobium japonicum USDA 6
MDCGGLGGYNYGLTRLGADGRTNKGVGRLSTITATDLTSALTGNPEALDVHLMLVERDVLIEGHSVKIHCHCLTVDGNGRVQPHRLAEFMRNAVVDYAIPRSKLAAAKARDAKYNSTEAVAELVERAKRSFTDLAKTGEGGEMLLFLLAERFLKLPQILCKMDLKTDTRLHYHGADGVYAGVMPEGIPKLYWGESKIYKDAGAAIRDCLASLAPFLIEPEHEETDRERDLVLLSDKADLSDATLTDALKKYFDKSSVMSKRVQYCGVALVGFDAPFYPKDDVKAIAEEIVEASRAELAVWSKRIGERLKSEKLDQMEIELFCIPLPSADGFRAAFLRAMGIKTE

SEQ ID NO: 54977 - protein, 332 aa, Bradyrhizobium japonicum USDA 6
MAAGERFSATLLANAGGGSWLSASAPTASGKTFLVLQWLIDQLSAGDTRVAVYLAPTRVLVSEIETTLQGLLGKTKRIEVSSLPLRDKYEAARAGGAQVILVSTQERLHLLANVLGDAFSIDLLIVDEAHKIEDSQRGVILQDAVERASRANSKLKVVFISPATQNPEALLTDAPDGVQTVAVDSDAPTVLQNLIVANQTPRKPKLWNLTVRQQGSTLPVGTLQLASTPAGLRKRLAFIAAAAGQRGGTLVYTNGAGESEDVADLVSQLLPQPGSIDPELAQLADLARKGVRPNFRLAPLVERGVAFHFGNMPSTRHRGASRDWPPKWTRAA

SEQ ID NO: 54978 - protein, 290 aa, Bradyrhizobium japonicum SEMIA 5079
MERDVLIEGHSVKIHCHCLTVDGNGRVQPHRLAEFMRNAVVDYAIPRSKLAAAKARDAKYNSTEAVAELVERAKRSFTDLAKTGEGGEMLLFLLAERFLKLPQILCKMDLKTDTRLHYHGADGVYAGVMPEGIPKLYWGESKIYKDAGAAIRDCLASLAPFLIEPEHEETDRERDLVLLSDKADLSDATLTDALKKYFDKSSVMSKRVQYCGVALVGFDAPFYPKDDVKAIAEEIVEASRAELAVWSKRIGERLKSEKLDQMEIELFCIPLPSADGFRAAFLRAMGIKTE

SEQ ID NO: 54979 - protein, 274 aa, Bradyrhizobium japonicum SEMIA 5079
MLVSEIETTLQGLLGKTKRIEVSSLPLRDKYEAARAGGAQVILVSTQERLHLLANVLGDAFSIDLLIVDEAHKIEDSQRGVILQDAVERASRANSKLKVVFISPATQNPEALLTDAPDGVQTVAVDSDAPTVLQNLIVANQTPRKPKLWNLTVRQQGSTLPVGTLQLASTPAGLRKRLAFIAAAAGQRGGTLVYTNGAGESEDVADLVSQLLPQPGSIDPELAQLADLARKGVRPNFRLAPLVERGVAFHFGNMPSTRHRGASRDWPPKWTRAA

SEQ ID NO: 54980 - protein, 316 aa, Bradyrhizobium japonicum
MSTITATDLTSALTGNPEALDVHLMLVERDVLIEGHSVKIHCHCLTVDGNGRVQPHRLAEFMRNAVVDYAIPRSKLAAAKARDAKYNSTEAVAELVERAKRSFTDLAKTGEGGEMLLFLLAERFLKLPQILCKMDLKTDTRLHYHGADGVYAGVMPEGIPKLYWGESKIYKDAGAAIRDCLASLAPFLIEPEHEETDRERDLVLLSDKADLSDATLTDALKKYFDKSSVMSKRVQYCGVALVGFDAPFYPKDDVKAIAEEIVEASRAELAVWSKRIGERLKSEKLDQMEIELFCIPLPSADGFRAAFLRAMGIKTE

SEQ ID NO: 54981 - protein, 332 aa, Bradyrhizobium japonicum; identical to SEQ ID NO: 54977

SEQ ID NO: 54982 - protein, 316 aa, Bradyrhizobium japonicum; identical to SEQ ID NO: 54980

SEQ ID NO: 54983 - protein, 332 aa, Bradyrhizobium japonicum; identical to SEQ ID NO: 54977

SEQ ID NO: 54984 - protein, 316 aa, Bradyrhizobium japonicum; identical to SEQ ID NO: 54980

SEQ ID NO: 54985 - protein, 332 aa, Bradyrhizobium japonicum; identical to SEQ ID NO: 54977

SEQ ID NO: 54986 - protein, 316 aa, Bradyrhizobium japonicum; identical to SEQ ID NO: 54980

SEQ ID NO: 54987 - protein, 332 aa, Bradyrhizobium japonicum; identical to SEQ ID NO: 54977

SEQ ID NO: 54988 - protein, 541 aa, Rhizobium leguminosarum bv. trifolii WSM1325
MNITPLVDPYAASDAGGVKARQGFTFQDHVAASFLLDMLSDPALLQVECETGDDIALRWLRNGADVTEYVQVKITDGESNWNLTEICERRAKRVGTSLVEISLGTDKFPVDALFRFISIRDVNHTLRPLKTPRDRRFQPHVVDALTKLGTQISNKLRGVTSPNGKSVPEWVQACLWQVPGEKEAVQQKNINRIHRLFESEGEAIFASASAKIYEGLVTIARNAGDVSMVDHPAKKAISKQAMKGWWDETIRDARRLNRTFMKVYQVQTTNFFAALHDVQESTIRRSLASYDAEFDGGEWRNLELAKYLAGWIPELILPPRMLAQCNHLQARELLAKTSQALKDKNIDYEDLLSQAMLHAILRHHYSSEPTLCKLHSVSPDQSDCMNGHVVFDPAGDQLWLGHARITVSDNWDAVTTLLSSELDALVHQDFLRKERDLIIQFREPQYLKETTLTKVFQEFAKLDDIVSILNIPVLVAYDSSVLEAGFAADYVEKLKAEVADSYQELKSKLSSKLTDIRVHVFLVPIYDSVQLADNFKRSLEN

SEQ ID NO: 54989 - protein, 713 aa, Rhizobium leguminosarum bv. trifolii WSM1325
MLLEDLRSFLTTGFGPEQAVLVLGAVNTLVNSQRTHDLGREMVIRCLAKKDLFPPGLLPLLESLVGSVGLIPYLSKDVSTFEEQLMLEAHRTPAIGKVDFFHTLQLQIYRELRSKRNVVLSATTSVGKSAIVDAIIASGDHKHLTIIVPTIALIDETRRRIIETFGSRYAIVTHPTQVSSRDKATVFVLTQERALNRDDLQDVSFFVIDEFYKLDLQMEKSIERAVDLNLCFHKLSSNGAQFYLIGPHVDGINGLASKREFLFLPSHFSTIALDIVQYGLPRDGGEREEKLIELCEELTSPTLIFCQSPGSAKRAAETLLEAEGLLPETDLTWPAVEWLEKEYPEEWIVTHALRRGVGIHHGSIPRALQQYMVKAFETGAIKFLICTSTLIEGVNTVAENVIIFDKRIKNTGIDYFTFRNIAGRAGRMRRYFVGRVYVLEEQPEPDTCVIEVAVGTQSETTPMSLLLDLEDDDLTPASKTRVESVTRESPLSLETLRANRRVHIEKQYDIYDAIWRDTSLLGRPLAWRGVPDSPQLLAVCNLIVDYLDSEILKGYQIFSGKQLQAKLYSVENSKSLREVIDDFVEHRRRDASVSDAVELALRFLRKYVGYTFPQSLMAISHIQGDVLRKIGVEPGNYEFYAAKAESLFMERGLFALDEYGIPPETAIRFAPVAREYPTLDSAIELVKRMDLRGVDLTKFERDLIDDLRASLLS

SEQ ID NO: 54990 - protein, 281 aa, Methylobacterium extorquens DSM 13060
MPIQYPDPFLEIRIDHLDLPLPLRGLCAGYEGGQWRSSQLADHLFNWLPYAALNQEHQLSFGPSNFVELIKLAAAHIYHTKKTASRGEIGELLFHLICILHYGTVPVICKLLLKTSSNDTVKGFDGIHLVPMQNGFELWLGESKFYLDGKDAIREAVASIKEHIAPAFLKTEKAMVIGHVGEDIPHRDEVIKLFKSQTSSDKLIEKSVFPVLIAYESRTVAGFDNLCQDYVDKLTKELEELRAYFSDKASDIKLRFRLVFVPMNKKKDVIDSFDQKLVPFL

SEQ ID NO: 54991 - protein, 707 aa, Methylobacterium extorquens DSM 13060
MTSLATLRSIGSDRRLTADDIFEAVFAAGSILNEDDREASEALEIAIRLLEARRNGQIPDGCMDAVEYLAEECGLYPYVNLNNFGHLTQSVIEAHAIKLDEKVYLHAKQMKVLLWLLAGDNVILSAPTSFGKSLLVDAFLAQKRPHVVVMILPTIALIDEARRRLAKNFRDSYRIITTVTEVYNEAQPTIFILTQERFLQREDNVRISLLFVDEFYKLDPGRDDGRYETLNLAVYRALPKARQVFMAGPHIRNIDLGPNWTGSFRFSQTNYRTVTVNVVDRSAKKEKLQTFLADLRGVGEQNSLVFTAVPGSAQNLMGDIIEAGINYPSELGAKLGDWIAENYHRDWQIGRGAANGIAVHHGRLPRSLGQLFVRMFDDGHLKLLICTSTLIEGVNTSAANVFIYDKKINKTDFDFFSFANIRGRVGRMMRHFVGNAYLYHEPPAEIETRVDVPVLSDPGSSTDFIVMNVDRAELSAAGKERQDRLPAESGLPREILQKHGVLGVELLSEVYSRIIVELRQRPNDYLWTGFPDREQRKALASLVLHIAHTRRDTPGLHSPGQIGWAWSQLGAIRTFSGYLRWFARHFGKDGDPSSGVDTAFQFLQACEFIFPRSIAAIEALVAHAVPDAKIAYGPFIVSLENWYRPVWMKQIDEAGIPIPLAERLRKHIGDVADKDAAIAAIRALDFDALPEFGEIDRFIIDQALMAA

SEQ ID NO: 54992 - protein, 197 aa, Acetobacter pasteurianus NBRC 101655
MLIEWVLKAPIVACKMYLKTSQQMPVHGVDGIHLGYEADTLIMHWGESKLHQTLPSALDDISSSITEYLKDPSKYANEVRIIRSNLNLGTLEEEARQAIKNYFNPYKPESNKLLESYACLAGFDSKLYESVAHLDHDECETVFQAAYEKRIDSACKLIADKVKAAGLNRFRFSYFLLPFPSVNEARAKFQARLWGTK

SEQ ID NO: 54993 - protein, 859 aa, Acetobacter pasteurianus NBRC 101655
MSLVGELAAEIWAESEFHADLALLGAANIRAELRDGGLIEASETFEVERLRRMMQAALVFAESNEHRYQDAAQRISTATLRLAGPAAKDLFAMVQARLRNFPALRTSADLPIPPLHAPMSLQYEFVERRLKQTIVASDTSEHVLTPFQLESWNLLAGGSSGALSGPTSAGKSYVLLLYLIERFRAGELRTAAYVVPTRALINQVSDDAAAALAGRGVRDVSITSVPVDLSSPDAGKVLYVLTQERLDALLVANSSLRLDLILVDEAQMISDGSRGILLESVLDRVENGDDQPQIVFSGPLINNPDYFGDLFRFKAFGTSVSKRSPVTQNIVFLDYAEAPDPQVSVKVLAEVESVPVATVNLPIRLHTDLDRLSYMSVLFGRAGSSIVYAGGKADAEKIAIKIGFNLPENQAQAGELAELIGFVKKHVHKEYALVDTLEKGVGFHYGHMPSLLRKQLENQFRERKIHYLVCTSTLLYGLNLPARNIFLEKPSTGRGHAISGPDFWNLSGRAGRMGQELEGNVFLIDYEKWESQPLAEARGVSVSSALKAAVVDQGSELLAFLNDPSISSDTNLAFEITLGKLVLDQRLGRLGQTLDRYARLADAETLVAIHKRIEQISAMTDIPTEVLNSNIGVSIFRQNDLLNYMIKRLKKLAPEELIPAHPLGDFKEVLDNHRRAFRRIHTYLLNYAGRDGSHNFFAPLALRWMRGDPLPILIDSAIRYHRDKKSGKSVARIIRETMENVEQELRFRYVKYFTCYNAILRVALVRVDKADYVKNIPEIPLFLEVGGSSGVMINLMALGLSRTSAESLAEYITDKEISLPDLRVWLQQLRVKTLDISPICMREIQAIIDDSVGPDIAEE

SEQ ID NO: 54994 - protein, 321 aa, Acetobacter pasteurianus NBRC 101655
MTEIRALAPLSLEDFQQAIEAKPDTLQIHLDLVERNVEIAGCKVRIHCHCLKVDADGRVNMTRLAEFIRTAVIDYSIPHDARQRAKERDNREGGFAAAIELYHRAIGTFTDLKTSGEGGELLLYLLAERFLGLPQILCKMSLKTSAQVHYHGADGVYADVDADGILNLYWGESKIHSNAAKAIRECLSSLKPFLDEEEGEAAKRERDLVLLSERADLGKPELNASLRRFFDQTDPLVTRKRYRAVALVGFDSDYYPAAGKKCGTNDIVDASKEALKQWSKNVGNRLVLEKLTDCQIEFLCLPLPDAEAFRAAVLTSLGLAK

SEQ ID NO: 54995 - protein, 879 aa, Acetobacter pasteurianus NBRC 101655
MSEEELIDWLIAEGVASDLGTLSQINALQELENVEPVKAIGEAMTAIDWNRLLLAGSILARSQKRIPREAALLIATSAMTLAEHGPTRDTAALLFEQLSNKLAVVLAQRKNKVAINLDTRLGVSARLELTRNRLKNSVILEADGRFLEVNAFQQSFWIGAQDDGSWLSASAPTACGKTYLVLLWLLDQVRSKRARMVVYLAPTRALVSEIETNLKSMLTSASIGTDQMQVSSLPLTDHYLAMRDGGPPLIAVFTQERLHLFANALSDKMEVDFLIIDEAHKIADTKRGVILQDAVERVVRASPKVRAVFISPATQNPETLLEDAPAPVERRVVESDAPTVLQNVLFARQVKRQTTKYSLAVRCRDASEDIGILSISDRPMGLRKKIAFIAEALTGHRSGTLIYANGPDEAEKIAFLLNQGSFQGAIDPELAALADLSRKGVHPDYVLAPLVERGVAFHYGNMPSLLRSEIERLFKSGKIRFLVCTSTLIEGVNLSCRMIVLRGPKKGSGKHMLAHDFWNLAGRAGRWGDEFQGKIVCIDPDDKEAWPQGVPKRARYEIKRETDAVMETPGEILSFLSARASMPIEEVGRASKLEQVSSYLISTFLRVGSIAGAAFAKRHDPDFVAELDEVLAKLCKANSLPPTLVARHPGVSAIAMQSLLEYFSQYSGELEDLIPAATEDEEAVESMMFIMKTINDHLYPAFKPDGLLYGHAVTVQRWLRGWSLARMIKTRIKNLQRSGKTVSIPKICRQTMEIVEQTARFAAPKYIAAYMDVLKVHLKAIGRVDLVREDFDIGLALEFGISSRTLLSLIELGLSRMSAVALYEIIAMDDLNQRACRDWMRAHADTLEGAGIPFIIIRELREKLLNETLVISPPPAQDA

SEQ ID NO: 54996 - protein, 183 aa, Gluconobacter oxydans DSM 3504
MSLKTNREMPVHGADGIHAKFCQESGKIFLYWGESKLYSNITAAISSAVDSISESLDPEKMQHEIDLVQRNIDFSGLNGSAREAFLRYLDPFDESYNDRDDITTCLIGFDFKAFAAITPADATKAEEKFIILAQKELKEIAPKLAQKLHEAGLGGRPIEIFFFPVPSVQEFRDLFQAKIGWKK

SEQ ID NO: 54997 - protein, 845 aa, Gluconobacter oxydans DSM 3504
MQELIEKVWENPLFHNASHRIQLAWLRQELGTDAELLDLEEANRLMRAAAILACSTNQEHRKIAFRVATCTYEIFRTKSLPFDQALRVVLARLGNFPSIMTRKDVASSGKNLPLTLATEEAASAESRRVIFNKKNIYLTDFQHTLWVNLLNKKRIALAAPTSAGKSFVLQHYISSIFSNNTNNSVIYIVPTRALIAQVAEDLVEQFRDFEEEKPEIITIPIDNETPLPKNAIYVMTQERVQLALIAHKNFFAHIIIVDEAHSISEGARGVLLQWVIDDLLHRKNNSQILFASPTIRNLDVFGRLFDIKDVVEFSSVEPTVAQNFLITKIDSATKGKISIQTVGDGRSPLSHVADLTLNQNISSRIDKLVHISATLGHGQSNIIYANGAAEAENIAILLMDLFIDRPDKESLLALSELAKETVHPNYILVECVKKGIAFHYSNIPTHLRRAVEDAVSNGQIDYLICTSTLLQGVNLPAKNIFLCSPERGRRKAIESTDFWNLAGRAGRLLREFQGNIFLIDYDNWKKKPLDGPKDSIIVPAIENTIKNHEDILLSVINDDSVGKITDTENFETVFVRLFSDHMRGNLDRTLTRLGITEDTIEFKTIFDALTLAEQKITIPPSIVRKNPGISVHKQQRLLDILNNYISHSSASAKILIPKHPRESDAYKSYEAILEICYQSLLDHDTSKIKIYRFHALIARKWMLGTSLSQIIDDQIKRSPQKIIRTTIRDTLKLIENDIRFQAVRLFGCYNTLLTYALDKAGLIDLASSIPSLPLYLEIGASDKTMISFISLGLSRVTAMKLNALSARKDLDVSGALHWLRTRPLESFGLSPLLLSEVRAILLLAH

SEQ ID NO: 54998 - protein, 314 aa, Acinetobacter baumannii Naval-72
MDDLKTIDWLSLRSAEHEWVNEHLRAHPIIEKDKFITRLHSIDFSGTQQDLTALVEAVADSIEKYVYDSKQRERFEKRGVNAFRKAVSFFGETNPDMDGKYGELLLYILAEAILGIPLVSHKITLLTNVNDQVKGGDGIFFGNYRNEISILIGESKIHQSFSNALDSSLSSLDRFHQNYSTSALDHELFIARSNISQNFNLEQMEKLFDAFTPGSREYKACNKAHPVLLVFETNEISNIEKRAKNREDACSLFSAWAQKRIESAVKLLEEKLNNYSELEKIYLDFFLIPLNNVSHFKHSLYKAIHGVEYNSQGK

SEQ ID NO: 54999 - protein, 859 aa, Acinetobacter baumannii Naval-72
MDTTYSDAISHPIFIEVFDKLLINLFLLNRQQEEAPEISINNIKKATWLASIAALGEGDKEKNLACSFGALLHLFDTGNEVYTKACYILQSRTGNIISSSHLPKIFKNKKYDEDFGSLLNIELAGNRAALEYKFSDDTEVYFTKFQAKLWDSLVNGNNIAISAPTSAGKSFVIKKYISELITNKQKDIIYVVPTKALINQVSNELHYLLKSKANVYTTYRETVKDKSSIFVLTPERTLKLFQDKNFKDPALVFIDEVHNIEDTSRGAVFENSIYKMVNKWSESQFVVAGPYIDKLSQSISDIANIELVNHQTFSSPVFQLKVSLTLQPNCKTANYKIASPTGNILKGELDLKRSLYSKVKSNKGDAIAAIMELFDPSDLNIIYAPRRKDAETWAQKIAPVVGSANPDIVNGADQKIKDLIEFLAEEVHPKYSLIRTLRLGVAYHHAGLPDIARLEIEELYSESLIKNIVCTSTLVQGVNLPADRLIIINPKVDKEEMSDFEFFNLIGRAGRVNTKLYGEVYCIDILDEQWGESRLTTDKTKSVSSATITSINNNRDNLPNVISLSREEIEEFDKNGLYSLVSYLRSLYKVDENHFKKMINSSELSRESKEDISSQLEELSLNLKIPDEIIAKNPFIDPVLQNIFYEDILRNGVESWLITRKPIDTSGLRSKEAHFSEQSYYYQFWSVLARLNEIFNFESEINNSYDDYIGIGLLVKDCHSWMLGKSHRFFIENKLSEVHPEESKVDKAARYVTKHISKNITFITVKYLMLWSEVVSSFLTEEQKELNSYILNLPSMLEMGSYDPAVLELMSVGINRSIALRIKPLIRKNEGNSIEEVLGTLDRKNMSPLFNRYLQRAGF

SEQ ID NO: 55000 - protein, 314 aa, Acinetobacter baumannii 532279; identical to SEQ ID NO: 54998

SEQ ID NO: 55001 - protein, 859 aa, Acinetobacter baumannii 532279; identical to SEQ ID NO: 54999

SEQ ID NO: 55002 - protein, 482 aa, Acinetobacter baumannii 263903-1
MSVISLDHFKLNSIYVIEAITESGLIKRGTCFSISKKILLTANHVIDINPKYIRIYLSSDDYSKGNYIESKCIYCNKELDIAIIEILDFELNHHINLYSTNVGIDNEVLSCGYPAEKDIFYEPIKVKISNDLTNVTTSNYSFEVTQATTVTNYSGMSGSPVIYNNDCIGILVYQQGKNTLYGISIKDVLKDINILNIINENFIKYKIQNGIDYNPPKHPLSPFKYCVNCNASDPNIKGIDIGFEFGEWKINNFSETVYDWIIDYALTLKEQKNFNGSDRQLFKFAKDNFLLNNLDALGDLCLHIAIRETYKTIPVMNKLFDINNKTFSCTHAVLNFDSLELWIGASSVNRTLEEVIESIVKNIEYIVDIRSLKNRLFALTNQIDDSWPHKEKLERLSDANLSIDERFDKIIIPIFLMHDSDLINNFDKENFIKLFEDHVLECRNLLKSNINDGLVKLVDLRVFCFPVSDIQKINDELYKELS

SEQ ID NO: 55003 - protein, 721 aa, Acinetobacter baumannii 263903-1
MSDWYKEARDKLENPHFSDWDNFLISLINEFNTHKNKSLIQDIVIRTLERRGEIERDFILDHLLGELGLFPYLKNKELTSKDTFRTSFFTTPQDKDKVFHIRQAEVFYRIMNGENIILSAPTSFGKSLIIEALVSSHMFNNLVIVVPTIALIDELKKKLYKYSDYYKIVTQANQTSSKKNIFIFTQERVLESKSISSVDFFIIDEFYKLAPTSTNDERCDSLNLAFKSLYNKCKRFYMLGPRINGLFEGIEDELRCSFLKFDHFATVATNEIYFDINTNGRDADIDIERDKFLIPLLKSKGRDEQTVIYCKSPKRASALLSRILNKNILEINDNNNEFADWLSYTYHPQWSLVEGLKHGIAYHHAQIPRAVGSTIVDLFNESKINILICTSTLIEGVNTNAKNIVIYDDCITRKTKLDMFTFNNIAGRSGRMFEHYVGNVYIFGRKPQAELPYIDVPIVTQSENISDSLLLHLGDEVNSSNKERVKKFYEQEVLPLSILLKHQGIDPNKMINFAEDLVSNLTDWNPYMCWDGIYPNKKELKHISFILFNYFNISSMAGGSVRTEAQLNKKIIDIIDKKEDSTLIINDYNFRRSREHDYTIDDAVQSVFNFKKNLVNYNLPKILYAISDIQEYIFNKYGLKYGNYKIFASNLENFFFPSAFNALEEFGIPNQVSKKIFDEINLEDLENIDSILDFFRGKNSNRYSFLSDFENDFLQRVIGYL

SEQ ID NO: 55004 - protein, 314 aa, Acinetobacter baumannii; identical to SEQ ID NO: 54998

SEQ ID NO: 55005 - protein, 859 aa, Acinetobacter baumannii; identical to SEQ ID NO: 54999

SEQ ID NO: 55006 - protein, 314 aa, Acinetobacter baumannii; identical to SEQ ID NO: 54998

SEQ ID NO: 55007 - protein, 859 aa, Acinetobacter baumannii; identical to SEQ ID NO: 54999

SEQ ID NO: 55008 - protein, 483 aa, Acinetobacter baumannii
MIAELSIDYKIESVYLIETILIDGSVERGTCFSISNNILVTANHIILNPKEIKIFLSSDDYYNNKYIQGVYLYGNDSLDIAFIQLIDHELTHSIELYATSVNIDNQVFACGYPAEKEHYFSPIKVAITNNFDHMISKEYSFEVSQSITISNYKGMSGAPILYEGTCIGVLVVQQGNNTLYAISVKDLIKNDHIKNIITENNINIKIQEGINYKSPEHPISPFKYCINCNIDHPGIKGIEIGFTFKNWNINNFTESAYDWIIDYCLSFKEQANFLGKNKRSLFKFARMKYPKDDLDALGDLCLHIAIRESYKTIPIMSKVFDINNKTFSCTHVVLNFDSIELWMGASSVNTNIEDAIKSAVANIEYIMDITSLKNRLFTLTNEIDESWPHQDKLKRLANPSLDLEDRFDKIIIPVFLMHDSDLIKNYDKNSFLNLFNQHIQECRSYLKNHINSEIISLLDLRVFCFPVLNSMTLNEALLAELNS

SEQ ID NO: 55009 - protein, 721 aa, Acinetobacter baumannii
MNNWYNTSLRNLNNQEFNNWDQFLVSLIEEFNSHQNNFLVQDIVIRALERRQEIQNNFILDHLLGELGLFPYINYTNCSSKDKLRKEIFTTPQDDSKVFHIRQAEVFHRIMSGENVILSAPTSFGKSLIIEAIVSSLEFNNIVIVVPTIALMDELKRKLSKYNEYYKIITQINQQSSNNNIYIFTQERVLEYKDLFPIDFFIIDEFYKLAPTSENDERCDRLNLAFKKLYSKCKRFYMLGPKINGLVSGITDELRCTFLKFDSYITVATNEYYYSIPTKGKDSELDLVRDKNLFSILKSIGRNEQTVIYCKSPKRVSSLLLRILNSGLLKKDDINNDLAEWLASNFHKDWSLVKGVQYGIAYHHAQLPRAVASLIVDLFNSSKINILICTSTLIEGVNTNAKNIVIYDDCITKRTKLDMFTFNNIAGRSGRMFEHFIGNVYIFGSKPQVELPYIDVPVVTQSDNASDALLLHLGDEVTEDNKNRIKKFYDQKILPISILIKHQGVNPNTLIELAEAIIKNIKNWNNLMCWDGIYPNKYQLQHLSYLLFRFFNITSMASGSVRTERQLYRKLIDIIKKVDDKELIKQEYNYWKKKDSTYTIDDAIQSVFSIKKNLISYNLPRLIYAINDIQEFIFNLYNLNHGDYKAFAVSLENFYLPSAINSLEEFGIPHQISRKIFEHHFFDDPDNIDLVLNHLDKVNNITYSYLSPFEYTFVHKALSYT

SEQ ID NO: 55010 - protein, 316 aa, Bordetella bronchiseptica 253
MSTITATDLESALTGNPEALEVHLTLVERDVPIEGHSVKIHCHCLSVDGNGRVQPHRLAEFMRNAVVDYAIPRSKLADAKARDHRFNSTEAVAELVERAKRSFTDLANTGEGGEMLLFLLAERFLKLPQILCKMDLKTDTRMHYHGADGVYAGVTPEGVLKLYWGESKIYGDASAAIRACLNSLAPFLIELEHEEAERERDLMLLSDKADLSNPALTDALKNYFDKSSVMSKRVQYCGVALVGFDAPFYPEADAKAVAEEIVKASRTELTGWSNSIGERLKLENLDQMEIEMFCIPLPSAEGFRAAFLKAMGFKEQ

SEQ ID NO: 55011 - protein, 866 aa, Bordetella bronchiseptica 253
MSLADLQSWLLQEGVRDDLDAITRLTVRNELDNLAPDPSAPSATAIDWPRLLLAGSILARSDQRRDQEAALRIATAAISLTDGQALKDAGAVLLGKLSNFRAIALATNRGLLTADLDGRLGVALRLEAQRREMDRSILVQSSGAWLQVNDFQQRFWSNAGGERWLSASAPTASGKTFLVLQWLIDQVIAREARVAVYLAPTRALVSEIETSLKRLLGNTEEIEVSSLPLPDKYRAARAGGARVILVFTQERLHFLANVLSDVLSIDLLIVDEAHKIGDNQRGVILQDAIERATRANPKLKAVFISPATQNPEELLTDAPDGVQTVAVDSDFSTVLQNLMVATQVPRKSKLWTLTLRQEGATLPVGTLQLASTPDGLKKRLAFIAAAVGERGGTLVYTNGAGEAEEVADLISQLLPKLRPVDSELLELAELARKGVHQDFRLAPLVERGVAFHYGNMPSLLRLEIERLFRSGKIRFLVCTSTLIEGVNLSCRTIVVRGPRKGKGHPMEPHDFWNLAGRAGRWGDEFQGNIICIDPEDTQAWPSGVPSRARYPIKRESDAVLDLGDGMADYLSERGLSDISSIEDTDKFEQVGAYLLTTFMRLGSISAASLSKRHDAASIAKLDQALGALAAQIEIDVDLAARHPGVSAVGLQRLLEAFRSYGGDVENLLLAEVASNDSYDRFITIMGRINKHMFLAFAPESRIRLYALIVFKWLKGYSLAKIIRDSIEWHQNTARSFKLPDLIRGTMELVEQIARFRAPKYLSAYMDVLHLHLREIGREDLIDDGLDIGTQLEFGVSSTTLLSLMELGLSRMSAVVLYEKIARDDLNREECVAWIAERVGQLQTMDVPAIIIREVRERLTLPGDIAS

SEQ ID NO: 55012 - protein, 340 aa, Bordetella bronchiseptica 00-P-2796
MEVYSVTFSFVVRLWETGRRYGGRLSTITATDLESALTGNPEALEVHLTLVERDVPIEGHSVKIHCHCLSVDGNGRVQPHRLAEFMRNAVVDYAIPRSKLADAKARDHRFNSTEAVAELVERAKRSFTDLANTGEGGEMLLFLLAERFLKLPQILCKMDLKTDTRMHYHGADGVYAGVTPEGVLKLYWGESKIYGDASAAIRACLNSLAPFLIELEHEEAERERDLMLLSDKADLSNPALTDALKNYFDKSSVMSKRVQYCGVALVGFDAPFYPEADAKAVAEEIVKASRTELTGWSNSIGERLKLENLDQMEIEMFCIPLPSAEGFRAAFLKAMGFKEQ

SEQ ID NO: 55013 - protein, 866 aa, Bordetella bronchiseptica 00-P-2796; identical to SEQ ID NO: 55011

SEQ ID NO: 55014 - protein, 340 aa, Bordetella bronchiseptica MBORD839; identical to SEQ ID NO: 55012

SEQ ID NO: 55015 - protein, 866 aa, Bordetella bronchiseptica MBORD839; identical to SEQ ID NO: 55011

SEQ ID NO: 55016 - protein, 202 aa, Bordetella bronchiseptica E012
MLLFLLAERFLKLPQILCKMDLKTDTRMHYHGADGVYAGVTPEGVLKLYWGESKIYGDASAAIRACLNSLAPFLIELEHEEAERERDLMLLSDKADLSNPALTDALKNYFDKSSVMSKRVQYCGVALVGFDAPFYPEADAKAVAEEIVKASRTELTGWSNSIGERLKLENLDQMEIEMFCIPLPSAEGFRAAFLKAMGFKEQ

SEQ ID NO: 55017 - protein, 866 aa, Bordetella bronchiseptica E012; identical to SEQ ID NO: 55011

SEQ ID NO: 55018 - protein, 202 aa, Bordetella bronchiseptica E013; identical to SEQ ID NO: 55016

SEQ ID NO: 55019 - protein, 866 aa, Bordetella bronchiseptica E013; identical to SEQ ID NO: 55011

SEQ ID NO: 55020 - protein, 340 aa, Bordetella bronchiseptica SO10328; identical to SEQ ID NO: 55012

SEQ ID NO: 55021 - protein, 866 aa, Bordetella bronchiseptica SO10328; identical to SEQ ID NO: 55011

SEQ ID NO: 55022 - protein, 202 aa, Bordetella bronchiseptica D993; identical to SEQ ID NO: 55016

SEQ ID NO: 55023 - protein, 866 aa, Bordetella bronchiseptica D993; identical to SEQ ID NO: 55011

SEQ ID NO: 55024 - protein, 202 aa, Bordetella bronchiseptica E010; identical to SEQ ID NO: 55016

SEQ ID NO: 55025 - protein, 866 aa, Bordetella bronchiseptica E010; identical to SEQ ID NO: 55011

SEQ ID NO: 55026 - protein, 340 aa, Bordetella bronchiseptica MBORD624; identical to SEQ ID NO: 55012

SEQ ID NO: 55027 - protein, 866 aa, Bordetella bronchiseptica MBORD624; identical to SEQ ID NO: 55011

SEQ ID NO: 55028 - protein, 543 aa, Bordetella bronchiseptica MO275
MVRITSPSNAGGPAARQGFKYQDHVAVSFIFKMLRDSNYSQVECETADDIVAVFHCSGELVNEYIQVKTTEGDSKWNLQEVIALDGIKADSSLLHKSLKCDVRPGLARFRIVTKRDVAKILEGFKTELDKRVLPDTTTTRGKALVKAFKTFTSPQNRDFAYWAKNSVWQVYGDVESLEAVNIKVLSQLAEGLGNRPNFTQLQAIYDEFLEMADRAATANVKTAAASKIILRDPALAHLKKLLDEADDKSTATFKPYKKRPDPFLVEFHASTEEEPLHSFSGFDVKYSLKKWRHENFAKHLIEWLPEFSLKASEIVNILAHNAEAILARSISTFSDSDLPRDRLIAELILHAILRSRQNSEPVACKVFYKSAGKLSEFGNAHIVQIPGQDDQLWLGLSRLIEASAMDATLEQICEVLDETISETVLSAEREIIISLREPLHHQPKADAFNQALHRNSPVDDMLNVLCFPILLTYDSDALSSGWLADYINNLKTEIENHFNNFITQLPEKIKQVKVMVFLVPMESIELLTKAFNARCEKLQELQA

SEQ ID NO: 55029 - protein, 713 aa, Bordetella bronchiseptica MO275
MNYETTKNELAKLAEEGTSTIDVLQAISTIVNRSNSEWEGRDLVIRALDKFKLFDAVEQSLLLNMVRAVGLFPYITPHLRNLAPSDRLAYEAHRVDGVEQGMVFHHLQAHVFSLIMQGRNVVLSASTSVGKSLVIDAVLAQRKFKNVVVIVPTIALIDETRRRLVTRFKGFNLITHPSQEAVPDTTNVYLLTQERVLQRSDLANVEFFVLDEFYKIDLTNDTDESTRAIDLSLAFHKLAKTGAQFYMLGPHIQKISGLDGYEYHFIPSDYNTVAVDIQNFNLSMRSEQRKGKLLELVTTLDSPTLIYCQAPPSANRVAEYLIQEAGLIPVPETQEIAAWISKHYHPEWNVAKAISLGIGIHHGGVPRALQQYIVKLFNEGIIKRIICTSTMIEGVNTSAENVIIYDRRLNTSTFDYFTYKNISGRAGRMNKYFIGKVFMLEAPPLEQGLTVEYPIGHQDESSPIGLLMHLENEYLTDTSRDRLQEAYANPILSPSTLIENRHIPIERQVEVAETIIRDLQNSRKLLCWRGIPEPNQLNYLCELIYNLEGKNLMDYLISSSAQLAWHINELRNQKNLPTYLRDAVENRRSDDTASEAINLRLKFIRNMVCFRLPRDIMAVNKIQADVFGTRNIEPGDFSFFAEQLENMFLDPLLTALDEYGIPTQISTQIKGLILPSEHLNDLLAKLKALAPSVERLQLTGFEKSLMRWAVAEM

SEQ ID NO: 55030 - protein, 255 aa, Bordetella bronchiseptica
MRNAVVDYAIPRSKLADAKARDHRFNSTEAVAELVERAKRSFTDLANTGEGGEMLLFLLAERFLKLPQILCKMDLKTDTRMHYHGADGVYAGVTPEGVLKLYWGESKIYGDASAAIRACLNSLAPFLIELEHEEAERERDLMLLSDKADLSNPALTDALKNYFDKSSVMSKRVQYCGVALVGFDAPFYPEADAKAVAEEIVKASRTELTGWSNSIGERLKLENLDQMEIEMFCIPLPSAEGFRAAFLKAMGFKEQ

SEQ ID NO: 55031 - protein, 361 aa, Bordetella bronchiseptica
MEPHDFWNLAGRAGRWGDEFQGNIICIDPEDTQAWPSGVPSRARYPIKRESDAVLDLGDGMADYLSERGLSDISSIEDTDKFEQVGAYLLTTFMRLGSISAASLSKRHDAASIAKLDQALGALAAQIEIDVDLAARHPGVSAVGLQRLLEAFRSYGGDVENLLLAEVASNDSYDRFITIMGRINKHMFLAFAPESRIRLYALIVFKWLKGYSLAKIIRDSIEWHQNTARSFKLPDLIRGTMELVEQIARFRAPKYLSAYMDVLHLHLREIGREDLIDDGLDIGTQLEFGVSSTTLLSLMELGLSRMSAVVLYEKIARDDLNREECVAWIAERVGQLQTMDVPAIIIREVRERLTLPGDIAS

SEQ ID NO: 55032 - protein, 239 aa, Eikenella corrodens ATCC 23834
MEWLPEFCLTASELKSLKPGNAFSMIKKAARMVYQTEKYKSRGEFGELFLHMILRQIYKSIPAISKIYFKDSVNHTVKGYDAVHIVQIDGKLELWLGEVKFYNNAADAIRDVIAEIQEHTKQDYLRNEKMLLANKIDPNSSFYPTLSKLLDQNTSLDELFDCACIPILITYDSGTLKKHNKTTDDFNKELEEEVLAIRQKIEEKMSNLNLPVKIHLFLLPLQEKSVLIQKLDEQLKRLQ

SEQ ID NO: 55033 - protein, 710 aa, Eikenella corrodens ATCC 23834
MILTKNEVEIKLKDSREINPDDAFLVLQSMCFLANKDPEDNEIQQLLLRVLDRKEEFSPFIEVVNGLIRHFGLYPYLDTNTITVKDAIAREIHRPSLLANDDNNQNIEDEGFVFHRVQAEVFQYLMDGENIILSAPTSFGKSALIDSLIESKKFDNIIIIVPTIALIDETRRRISVLKCDHKIITHASQELQSKNIFILTQERAIDFPDLPNFDIFILDEFYKLDPREDSERAMTLNHALYKLHKKSKQFYLLGPNIQNVPEGLPDRLQCKFIRTNYSTVVTELIRVGSNKDPFNDELLSLCNSIQGSTLIFCSSPNKARKITELLANHCTQIGEGLTDAADWVAENYHPDWTLVKGLRKGIGMHHGQIPRAIAHLCVKGFNEGKLPFLVCTSTLIEGVNTKAKNVIIFDNKIANKKFDFFTFNNIRGRSGRMFQHFIGRVYLFNDPPQEKLPLVEIPVFSQEENAEESLLIQLDKTDITERSWNRIQKYYDQDILDISVLRSNSGINPDLQINFANYLIVNRIELSILAWKSTPTYDQLEHLCCLIWKYFLKGKKFHKVSSGRQLAFKINQLRNNEIKEIISNEITQEKEPDEAVENTLSFIRQWAQFHFPRLAMAVCRIQNAVAERLGVAQADYSFFCAQVESLFTDSALVALDEYGLPLPLAEKLENMLNSNGSLDTALKNLSILNFDKLSLTIFEKEMLNDVKKSI

SEQ ID NO: 55034 - protein, 297 aa, Enterobacter aerogenes
MLLPIRVNKRFLNLFRTLTLDKAPRQSTVNLHVLNIESNSFVYNKLVEELRDLIVCYVHSNRRIAEFEKDYPSFSPKPYLEAIQKFRTYTSNEGELGELLLYAFLESGLNAPKLLSKMELKTDANDYIKGSDGIHLLEIDNNYQLIFGESKMYSDLLEGAREAFDSIADFKANGLGFERGLIDTHVINEMVTEEGYETIKSILLPSGNDGPNLDLSFGIFLGFELPVSDTQLSMKNNEFREWAYSFVKNNASRVIDTIEKRIIKHKLFGHDFHIYIVPFTDIDITRKKLIQEMLTIG

SEQ ID NO: 55035 - protein, 862 aa, Enterobacter aerogenes
MNEKDVARKIPLAQRLSMDAYTSSYFKEIYNYISVLYDNFLFNNNHTQKPVFVDTTKIEKALRFADILSHSPVETHRTKSFEIISKIAAFHSDDPYFKMIGSAVINRLGIFAADNLISQGVHLPLDREIESSIKKSFQKTSIDGLFFTDKQYELYQSLITSNTLSFAGPTSMGKSFVINEYIKNIVFGNAKKNIVLIVPTRALISQSTLKLKNELRDEIDGNQYKIVTTSYMLRGGIDHSKGYIFVLTPERLVSLISSSPDIIIDYIFVDEAQKLTIKNDTRSLVTYSAIEQTLNLNSNAKLFFSSPNLSNPEIFNDLFNRDHAKVYRSIEGATAQNLYFIDLLNNKFSYVDKNKLIDIDNVNQTYTSANDLIFQINKGKSKIIYTGGIDNTLSRTRDFLRYIKKLQSKKKPQNFDLASQVREFVHNGYELAEAIEYGVAFHFGNLPQAIRDLIEHHFKIGNIDYLFCTSTLLEGVNLPARSVFILTSKKGTRYFEPVDFWNLAGRAGRLAIELAGDIFCIKDESGTWNDKAVKKLILSNKNEIELTPSFYLNDSKRIKELEQIIKTGSTEGIQNSEFLRTLSDMVRIDTLRTDKANNLPLINYFRNNGNNDILHYALKSIDNINIPTHILLANSHIAINSQHSAFNSIRNYSIDELKLSWNPTNDEIKEKLALIFNIYQIDKYSKGLNRLNFNSIPYYAVILTKWMHGNTLSEIISDAIVYYISNRKNIYLSDKTQELFDQNNPIHITKLVNDTIKDIELKIGYQLQNYISHYCQLLSLVFENNPGANWSQFIEFGSNDPIVWQLQFMGFSRHCAIFLKKNFPKHLKYDQENNQLYILNRAEIKSKVKQNKLYWLEIQALL

SEQ ID NO: 55036 - protein, 297 aa, Enterobacter aerogenes; identical to SEQ ID NO: 55034

SEQ ID NO: 55037 - protein, 862 aa, Enterobacter aerogenes; identical to SEQ ID NO: 55035

SEQ ID NO: 55038 - protein, 297 aa, Enterobacter aerogenes; identical to SEQ ID NO: 55034

SEQ ID NO: 55039 - protein, 862 aa, Enterobacter aerogenes; identical to SEQ ID NO: 55035

SEQ ID NO: 55040 - protein, 297 aa, Enterobacter aerogenes; identical to SEQ ID NO: 55034

SEQ ID NO: 55041 - protein, 862 aa, Enterobacter aerogenes; identical to SEQ ID NO: 55035

SEQ ID NO: 55042 - protein, 297 aa, Enterobacter aerogenes
MEEDLSNNFKALIQSDFMECFVRMECDLNLDKNRIVNLYRLCLDGKKYNYVKIGDRLIDCIPSFSLSRKQLMRCRERNAFGKATLSAIRNFLKIERKTKISEMLLQGFLESYLHAPKLYSFDEINNAGFHGAHVKFNKNRNVELIHSAAFISNSLSDGVSYAIDVILKAFPELRSLDGLLGNTFLETNFTEDECQILASLLIPGESSYSQGYEDRLAIFIGYNHKIEESLIYENASRFPSLLEQKIILNVQQALEYRKEEINKLSIVNATIDCFFVPFDDVNKFNDEFIESLKNEEA

SEQ ID NO: 55043 - protein, 853 aa, Enterobacter aerogenes
MKKLDSFIIEKIFNSAYFKKLYKKIIKAYSALTIESENHFNISNTELRDIFRFIDLLVNSSNQNARMCAYHWISLLEPFSDKWGKFSLISSLVYSKLGLYALDFNDHALPFSQRLENEAKKSAQTFSNAYIFTDAQFDIYTDMLKSPYYSFSGPTSLGKSFILKRYIEEIIQNSTSNIVILVPTRALISQFSLEIKNELHELIENFNYKIVTHGSLASKSDAVIIKHIFILTPERLLNLFSQGKIVSIDYLFVDEAHKLSNNDDSDVRSLTEYNAIDSALFNNPNMKIVFSSPNIENPEVFLNLFGREKIYASRIIESPVSQNLYLIDFHRKEIKYFSNSECIDIESSSLYTLNKKSDFIYNIGSRHGSNMIYCSSRAKAVDSALEFYQIRLSENIVLSPLLIDSIKKISNYIHPEYYLAMFLMKRIAYHHGQLPQAIRNIVEELFRNGDIDFIFCTPTLVEGVNMPTRNIFINCDDKIRLIADAKKNPNKTLAFWNLAGRAGRYCKELSGNIFCLQDESNRWDNTDIFLEKTAHLTTTIDARIESKSGLREIERYLSDAETDISKRNQAIEYLANIMAVDTIRFKNNLKDSFVLRKFYDIHREELLSLAKLKANDILDIPIDIINSYKSLNFKIQRKVFDYVSVSPVNKKLPSLDYANILSVLELFYDLYRWGETETKYVKSKGQLTYFATLMNQWTNDYSINRIINENIDIKRTIVIERGQQPIPFDRNDINHVNKVIDDILYNIERILSFFFEKYFNHYYKCLAAILGEDNAGHNWATFLEYGSKNPLCISLQILGVSRHAANIISSSKELRKYLNFNEDSYEIISVNKKGLLNSLQKDSVEYGEVKIFL

SEQ ID NO: 55044 - protein, 190 aa, Enterobacter cloacae subsp. cloacae ENHKU01
MEAVLGAPQLVAKMELKTNSNDEVKGSDGIHVRWNEQDKLVDLYFGEAKLYKKVSSALDEALKSISSFHESEMYKHEFNIVTKFFKYANDEIKNAISELIVSGEPGPNIRLNHACLIGYNWHKFNKLKATNEQSLEQHFLKEFKNDFPRLKKLLEDKFISFPQKHLKFDVFFIPFPSVTDFRNEFNAALD

SEQ ID NO: 55045 - protein, 508 aa, Enterobacter cloacae subsp. cloacae ENHKU01
MHVDIGEFEIDFSFRGGKVQQKSSFAKFISDNGGAVIVFENDPSAAEDVALSLTEKLIIEDARPDYLEFIDFIKEEMHSDYSLAHCMEHKVAFHYGNMPSIIRSGIEYFFKRGDIQYIVCTSTLLQGVNLPAKHIILDNPHSGSNSMSRADFLNLSGRAGRLLHEFHGNVWCLRPDDWDAKVFEGEKLQVINSAMSDVMLDGGGIICNAIDGLLIDPIEKDLADVAFAKLFHEIRRDDLQSEYFLRNDKSEEYHEVLEYNFNKISMMKINVPDELLRMNIGIRPDYIQRLYDLFKESANLDDYSLYSPFKKGGKQRIDVAIEIIRDIFSWDISHQHSLWISMLAHKWMTGKSLSSLISFEVDRAFSLEERNKSEKDISFKRRKVSSTIRGVLKGLETQVRYNLVRYIKVYQDVLRFVMEERNEGAKAVLVENISAYLEFGSCNPVDLNLMSLGLSRSTALLVRKKVKLPPEGTPEDYLSFLRKVNFDKTSIPSYCMREIKDVLGDMKI

SEQ ID NO: 55046 - protein, 315 aa, Enterobacter cloacae BIDMC 8
MDSVEKLKSINWKELITNNHKWIESRLVNHPCESQAKIVSRIFTIPFSGVIQEHHHLVESMADAIEHYVFDKEALAKMKADGVTPFRKAAQFFGDTNPVKDGKYGELLLYILSEAILNTPMVSHKITNLTNLNDQVKGGDGVFFGVYRENLSILIGESKIYKSFSGALESAFDSLDRFTKSYTSGALGHELFMARTNISSNFDFETMELIYKAFTPGDDIYSECVKTHPVLLIFEDAEIKSIEEKAINKAEAERLFDAWLTKKKEAIKSDIDAKLIKYPNVKPCFLDFFLIPMTDVGEFKKSLYRAIHGIDYKEN

SEQ ID NO: 55047 - protein, 885 aa, Enterobacter cloacae BIDMC 8
MAKSTATTALNHQDFTSVFNLLIEHLFLKNRGKEEKYKISDEMIRRATWLASLGSSGNETDKNIASAFGTLLYLYDTSNDLYLKACYILQSRAGNIVSAKHLEGLFSQGNIIKHFSSSLDFELTSQKFLLEKRVSDNNYIYFTHFQRSLWDKLERGENVAVSAPTSAGKSFVIKRYIYDSVISANDGYFVYVVPSKALINQVGNEMSRELKDIATVMTTYKDSENDDLKIVYVLTPERCMRLLNENGKKAPKIVFFDEIQNLEDKSRGNVFENVIYRMTSLWQSTQFIMAGPYIINLHHSLNKIIDLNLVEQTTSTTPVLQLKVVLTVHKNKKTVNYKLISPVGDAVLGEYDIGKALYSKLSSSKGAALKHITSILDSDEQNIIYAPKKNLAEGWALAIAQTNNEDSELDEDNTDLVYDSRIDSLCSFLENEIHPLYSLVRCLKKGVAFHHGGLLDVARLEVEDLFADGAIRNLVCTSTLLQGVNLPADRMIVISPKIGDYELSHFDFLNLIGRAGRISTSLYGEIFCIQLVDEEWAEDKIESDETKEIQSSVLRKLNEYGESVVSYIDVYTKDIVDTQGELHAVNLASYLRGQFLVDREHYEKIISNSNLTLNQIRVMTNRLEALEDILNVPKDIIYKNPFIDPLLIDQLYFLVESEGVNKWMIDKYPRVKSGVADPNAEFQHMNYYNQYKSIILRLNDIFEIEKEINYKEDGVSRKSSHFVSIFKLVNDSHKWMQGRNYRFFIDDMITKKLINKGIPVDYKKVDGITNFVTTHINTNLTFILVKYLSLWADVVSSFMSEEERTLNAFFLNLSSMLEMGNYDPQVLEVMAYGINRSTAIELLKKQKINNEQTTWQYLVQYNLDKLSPLHRKYLQRAGFGSSKPA

SEQ ID NO: 55048 - protein, 300 aa, Enterobacter cloacae
MLLPIRVHKRFLDLFKTVHIDSSPQQSTLNLHILNIESNQFIYPKLVEELRELIISYVHSNRRIEEFHENYSRYSPKPFFEAIQKFRNYSSNEGELGELLLYAFLEAGLNAPKLLSKMELKTDSNDYIKGSDGIHLLETDDSFQLIFGESKLYADLLEGAREAFDSIVDFKANGMGYERGLIDTHVINEMVSEDGYEKIKSILLPSGNDGPDLDLSFGIFLGFELPIDSSILSMKNKEFREWVNESVKYHASRAVKTIQRKIKNNNLFGHEFHIYIVPFTNIETTRKKLIRDMLTIEGNL

SEQ ID NO: 55049 - protein, 856 aa, Enterobacter cloacae
MNELHSSKNVHLAARLAEDAFESPYFKETYKYIRTLYDETLFDWLSERKLEKTDNIKIAHALRFADILSHSSKETYRTYAFEIISKIATFKKNDPYFKFVGLAVINRIGIYAAEKLISEGVTLPFDREIDTIVKKSVQKIDEDGIYFTDRQYELYQLLKSSSTISFAGPTSMGKSFVINAYIKEIITSRTNKNIALIVPTRALISQNALKLKTEIINTSSINSYKVVTTSYMFDSKNPKGYIFILTPERLVSLISTIPELKIDYLFVDEAQKLTTKNDSRSLVTYSAIEQTLNSNPDTKLFFSSPNLSNPDIFNSLFRRKKSKTYRSTEGATAQNMYFIDLIKKDFSFVNTQERTLESVESDFTQFKIANDVIYKLNHGKSKIIYCGGIENTLERTREFIKYLKKRKNFKRQNTEIAAQIREFVHDNYELAEAINYGVAFHFGNLPQSIRDLIEHHFKMGNIDYLFCTSTLLEGVNLPARSVFILTHKKGISPLESVDFWNLAGRAGRLAMELSGDIFCIKDEEKTWDKKAIDNILLSDKNDISLIPSFYIEDKKRLNELHTIISTGETENIKNSEFLRTLGDMIRIDTMREEKHLPLIDYFRRSDKPEIILSAKKSTKKINIPLNILLANSHIAIDSQHHAFNKIKSMTINELKLPWKPTYEEIKSKLNLIFEIYQIDKFATGQNRLYSKSIPYYAVILSQWMYGNSLQEIISGAIIYKKNKYIYINKIKVPFDSSNPSHITALVNETIKDIELRVGYQLQNYISHYCQLMTHLLHGNPGANWSQFIEFGSNDPIVWHLQMMGFSRDSAVYIKRNFSKFLKINTESNKLTISNKSIIKDSIKKNRLYALEVQSLL

SEQ ID NO: 55050 - protein, 315 aa, Enterobacter cloacae; identical to SEQ ID NO: 55046

SEQ ID NO: 55051 - protein, 885 aa, Enterobacter cloacae; identical to SEQ ID NO: 55047

SEQ ID NO: 55052 - protein, 305 aa, Enterobacter cloacae
MDFDILIDQSLSTLFNDSINTINKNNKLISMINDFEDGKWRHQKFHRFIWDNILETALSNQEREAYIGGPSTSLAKAAQNLRLTDSEKDISKGSELAEIFLYGIMKHHFKALPVVPKIFYKQNTQDNAKGADSVHIVIEDDNNFTLWFGEAKFYNSIEDDRFDSIITSVNNSISTDKIKKENSIITNTKDLVSLVKNDGLRSKIMYSLSSKNSIDNIKPILNIPIFILHECPITENASSLSPEYKSSIIELHKERAKSFFKKHQIKIKNIHDYDKIKFHLILFPIPKKEQIINKFVETVRFHKEQ

SEQ ID NO: 55053 - protein, 714 aa, Enterobacter cloacae
MNNEITSATDNDGEHVAHVFSKCKEINDLINSDKEDEARNSLILLLDYHKKHKIHYTPLVNHLIRCTGLYPYIQAETADWNERLIYDLFKVDVGLNTPITLHREQSLILKRLLNGESLAVSAPTSFGKSFIIDAFISLNKPTNVLIIVPTISLTDETRRRLHKKFAAEYKIITTADVSISQKNIFIFPQERAISYLDKINELDLLIIDEFYKASENHDKERAPALLKAIMKFTKIAKQRYFLAPNISTLKSNPFTKGMEFLKLDFSTVFLEKHDLSKQINEDPQKKSSFLLDILENTAGKSLIYAGTYSNINKISAAILNNHKKSEVKLLKEFSDWLRLNYSQKWMLADIIEKGTGIHNGQLHRSISQIQIKLFEENNGLKNLISTSSIVEGVNTAAENVIIWQSKNGNRNLKDFMYKNIIGRSGRMFKHFVGKIYLLSPPPKEEDNELDLTIPNALVGDIDETEFKNDLTPEQISAIIAYKEEMQSLLGFETFNRLQSEGAFKSNDPFLIRDIAVDISMNPSDWLSISYLNSENPESWDYFLYKIIKLKPAGWGVEYNKFVSYVKIASYNWKLTIPEILRKLSKHNITINELFELERNLTFKLSSLLNDVNVLLNELIPNRNTDISPFIYKTSNAFLPPIVYQLEEYGLPRMITKKIDDALNLDLDNEELTLHTILDHLKTLNYVFGLSGLIGASMIEEYIMNNFFDGVTYSQ

SEQ ID NO: 55054 - protein, 315 aa, Enterobacter cloacae; identical to SEQ ID NO: 55046

SEQ ID NO: 55055 - protein, 885 aa, Enterobacter cloacae; identical to SEQ ID NO: 55047

SEQ ID NO: 55056 - protein, 315 aa, Enterobacter cloacae; identical to SEQ ID NO: 55046

SEQ ID NO: 55057 - protein, 885 aa, Enterobacter cloacae; identical to SEQ ID NO: 55047

SEQ ID NO: 55058 - protein, 305 aa, Enterobacter cloacae; identical to SEQ ID NO: 55052

SEQ ID NO: 55059 - protein, 714 aa, Enterobacter cloacae; identical to SEQ ID NO: 55053

SEQ ID NO: 55060 - protein, 305 aa, Enterobacter cloacae; identical to SEQ ID NO: 55052

SEQ ID NO: 55061 - protein, 714 aa, Enterobacter cloacae; identical to SEQ ID NO: 55053

SEQ ID NO: 55062 - protein, 305 aa, Enterobacter cloacae; identical to SEQ ID NO: 55052

SEQ ID NO: 55063 - protein, 714 aa, Enterobacter cloacae; identical to SEQ ID NO: 55053

SEQ ID NO: 55064 - protein, 539 aa, Enterobacter cloacae
MAITSTPSNKGGPAARQGFKYQDHVAVSFILKMLQDSSYLQIECETADDIVAVSRPNTECIYEYIQVKTTEGDTKWNLTEATALEKGRPDSSLFQKSLKCDTRLGIARFRIVSKRDISKPLQCFLIDIGKRVLPDDCTERGVKLVKKFPKTISAQKRDFKYWAENFVWQVCGETAWLEAMNVRVLSELAEQYGVVPSHRQQKEIYEHFLNWADDAATADVKTQSQMKIIARKEALECFSKLLDAVEASSSITAKPYKSKPEPFLVEFHSVAETALLRSLAGFDVEYDFGEWRCKELAEHLVEWLPEFCLRASEIANFQVHHAKTILAKSISTFTQAKMPRDKLIAELILHTILRCRKDSEPIACKVFYESEGKLSEFGNAHIVHQAGKADELWLGLSKMIPTGKMDDTLKEICSVLDTTISKAVLSSEREIIITLREPHHHLPTAEQFSKALSKHSPAQEMLKIMCFPILLAYDSDVLGRGYASDYINHLKNEIMAHYSELKSRLPPKVLQVKIAIFLLPIENIQRLVIEFNSLCRTGI

SEQ ID NO: 55065 - protein, 714 aa, Enterobacter cloacae
MNYEITKKKIHLIGSKGISTTEILVSISKIVNRGIPEWEGRDLVIRALDKIDFFDAVEKSLLLSMVRSVGLYPYIKPYLDEVSDDDRLAYEIHRIDNVEPGMVFHRLQAHVYNLLMQRKNVVLSASTSVGKSLVIDAILASKQYSKIVVVVPTIALIDETRRRMVKRFRSHCNIITHPSQEATLSLANVYLLTQERVLQRGDLDDVDFFVIDEFYKLDLENDSDEKNRSIDLSLAFHRLAKQGAQFYLLGPNIQNIHGLEAYEYNFIPSSFSTVSVDVYHYNLSSKGDARKEKLLELCSQLSSPTLIYCQSPASANKVAQFLINEANLPRVENTQDVADWIGKHYHPDWNISKAISLGVGIHHGGVPRALQQYFVKLFNEGAIKFIVCTSTMIEGVNTSAENVIIYDRRVNNTPFDFFTFKNISGRAGRMNRYFIGKVYMLEAPPLEKDLSVEYPVGSQNEDSPMGLLLKLEPEFLSDLSRQRLEQAYSTPQISAVTLIENRHVPIEVQVKIAEQILEDQHEHKHLLCWKGNPEQNQLEYLCSLVYEHLPHNLMEYGIFSGLQLAWHINALRSQKNFTEYLQQAIDDDWHNRTPSEAIGLRLKLIRNVISYRLPRDFMSISRIQADVLGRRNLEFGDYTFISEQLENLFQDPLITALDEYGIPIQISTKIKGMILPSDNLNEVLAKLRKLVVKIDKMQLSKFEKNILRWAIAEM

SEQ ID NO: 55066 - protein, 305 aa, Enterobacter cloacae; identical to SEQ ID NO: 55052

SEQ ID NO: 55067 - protein, 714 aa, Enterobacter cloacae; identical to SEQ ID NO: 55053

SEQ ID NO: 55068 - protein, 305 aa, Enterobacter cloacae; identical to SEQ ID NO: 55052

SEQ ID NO: 55069 - protein, 714 aa, Enterobacter cloacae; identical to SEQ ID NO: 55053

SEQ ID NO: 55070 - protein, 305 aa, Enterobacter cloacae; identical to SEQ ID NO: 55052

SEQ ID NO: 55071 - protein, 714 aa, Enterobacter cloacae; identical to SEQ ID NO: 55053

SEQ ID NO: 55072 - protein, 305 aa, Enterobacter cloacae; identical to SEQ ID NO: 55052

SEQ ID NO: 55073 - protein, 714 aa, Enterobacter cloacae; identical to SEQ ID NO: 55053

SEQ ID NO: 55074 - protein, 538 aa, Enterobacter cloacae
MESNDSGGVAAKHGFLFQDCVAAYHVTRMLRDKTIRSVRCEVTDDIDIVSDRYIDFVQVKSTGKTRWNVSDIVQNSKGADKKTIPCSSILHKSMQCESDLSLGRRYSIVTEEKVNKTLEYLTINPNARLDKPSRQELIDDLNKRTNNYLTDSGISVSDWIDAATWEVFSSLRELELLGIKNIRLASQDLHGVILSSETVAEEIWCRILDTVTRKGEHSRRIHSVDDKSYLRPELLEWFKQRVEDDQSRSGRKIYVKRDLPHILTPFRAPLASVCAKRKGQVLHQQYSLKKYRYKYIADNVCQWLDEVFLRPKEMSDIHKLTLIEKRERLKNSVFKSLNDVSEFLGRVLLHATIRQHHQSQPIPCMLYVEKAGAEKILENVHIVRRDPEGDQLWIGFSELVTDIDIAVRLPELRDRLYEDISDCIDTARRKILDIKDDNYLLRHDIDEILDGSQPFDAHLDRFTFVLFVGYDSRLLTEPETPGFEGDLEKETTALFEKFAADLIEDSPFANLCIHVFIYPAPSLERLTQLVDEKVREVV

SEQ ID NO: 55075 - protein, 729 aa, Enterobacter cloacae
MTEIYEQAKHSLQGEDFSSFNYLFAVNKLLSNPVSYDLGRDLIVRALDSRERFSEHTTILKNMVRKSGLFPYLKKEFTSLTPDDLRVLELYRTPFSDGYVFHSMQFHIFDLLKSGQNVVLSAPTSMGKSAIVDSLLGMGTLKRLVLVVPTVALADETRRRLQERFGDRYQIIHHSSQVCHSDQAVYVLTQERVNERDDIVDIDLFVIDEFYKLAFRQLKSGDIDHQDERVIELNIALSKLLKVSRQFYLTGPFVNSIRGLERLGYPHTFVSTDFNTVALDVKTFGIKANDDKAKLNALGEIAHVCVDATIIYCKSPTVAGQVARELIRLGHGTPTESPHVDWVSEEFDADWDYTVALRNGIGLHFGALPRALQQYTADQFNAGKLRFLLCTSTIIEGVNTIAKNVVIYDNRDGTRSIDKFTHGNIKGRAGRMGVHFVGKIFCLEEIPEDNLNQEVDIPLGIQDIDTPINLLASVQPDHLSEFSQDRFDEVFINDHVSIDLVKKHSYFRVEQFEMLQSMFEMMDDSEFSSLVFHWTPATNFLKTFAKIIARLVPHTFSRNGVPVKPTDVMIAKLAGYLSAESYSEYLKNQIVYARQRVSEGEKRTLSDALNNDLKLITNTFGYTLPKVLSLMEDVVKYHALKRGIRSKVDYTHVKMTFENFHLPPGVSALEEIGIPIQTLHRLVDLLEFSDQADVDGLCQYLRDTQDVWSQTIGFVDQTFIRRALGIEQH

SEQ ID NO: 55076 - protein, 305 aa, Enterobacter cloacae
MDFDILIDQSLSSFVTGGGPSQISNNSLLSIINDFEDGSWRYQKFHRFIWDNILQTALSNQEREALIDGPFTSLALASKNLRLTDSEQDISKGSELAEIFLYGIMRHHFNALPVVPKIFYKQNSQDNAKGADSVHVVIVDNNNFSLWFGEAKFYNSIEDGRFDTIITSVKNSITTEKLRKENSIILNTQDLYELVQDEKLKLKISDTLSSNNSMDNIKPLLNIPIFILHECPITENSHSLSESYKSSITEMHKERAQAFFKKHQEKIKDIYDYDKIKFHLILFPVPKKEIIIDKFVSTVRYHKEQ

SEQ ID NO: 55077 - protein, 719 aa, Enterobacter cloacae
MDNEFNKDCNGEYHAEPTLQDEYIFSHCQSINILIEQRNYNEARNNLISLLDYHKKNNLHYNPLVNHLIRALGLYPYLQTDTSEWHDRLVYDLFKVDVGLANPITLHREQSLILKRLLSGENLAISAPTSFGKSFIIDAFISLKKPNNVLIIVPTISLTDETRRRLHRKFSSQYKIITTADVDLSEKNIFVFPQERAISYLEKIEHLDLFIIDEFYKASEKHDRDRAPALIKAIMKFTKIAKQRYYLAPNISEITNNPFTKGMEFVKIDFNTVFLEKYDLSKEIKEDDTKKSKALLEILSNTDGKTLIYAGTYKNIEKISNLILKTEFSHEPYLLKEFSNWLKINYSQNWKLAKLIEKGMGIHNGRLHRSISQLQIKLFEEKHGIKNIVSTSSIVEGVNTSAENVVIWQCKNGSSNLKDFTYKNIIGRSGRMFKHFIGKVYLLSAPPQEEYNELDLTIPESLVGGIDEIEYKNDLTPEQISAIIAYKEEMRSILGHDTFNKLLNEGAFKSSDYLLIRDIAIDIASKPNEWANIAYLNSNNPDEWDYYLYKIINLQPAGWGGRYSKFVSYIKVASLNWKYTIPQILDTLSNDGITIDDFFEFEKNLTFKLTSLLNDVNVLLSELLPNKKTDISPFIFKTSNAFLPPIVYQLEEYGLLRMLTKKISITYKINFESESLTLHNIIDHLKGIESIIGLSTSMDASPMEEYILNNFLEGVTYNR

SEQ ID NO: 55078 - protein, 305 aa, Enterobacter cloacae; identical to SEQ ID NO: 55052

SEQ ID NO: 55079 - protein, 714 aa, Enterobacter cloacae; identical to SEQ ID NO: 55053

SEQ ID NO: 55080 - protein, 539 aa, Enterobacter cloacae; identical to SEQ ID NO: 55064

SEQ ID NO: 55081 - protein, 714 aa, Enterobacter cloacae; identical to SEQ ID NO: 55065

SEQ ID NO: 55082 - protein, 315 aa, Enterobacter cloacae; identical to SEQ ID NO: 55046

SEQ ID NO: 55083 - protein, 885 aa, Enterobacter cloacae; identical to SEQ ID NO: 55047

SEQ ID NO: 55084 - protein, 538 aa, Enterobacter cloacae
MESNDSGGVAAKHGFLFQDCVAAYHVTRMLRDKTIRSVRCEVTDDIDIVSDGYIDFVQVKSTGKTRWNISDIVQNSKGADKKTIPCSSILHKSMQCESDPALGRRYSIVTEEKVNKTLEYLTISPNARLDKPGRQELIDDLNKRTNNYLTDSGISVSDWIDAAIWEVFPSLREIELLGIKNIRLASQDLHGVILSSEIIAEDIWCRILDTVTRKGEHSRRIHSVDDKSYLRPDLLKWFKQRVEDDQSRSGRKIYVKRDLPHILTPFRAPMASVCAKRKGLVLHQQYSLKKYRYKHIAENVCQWLDEVFLRPKEMSDIHKLTFIEKRERLKDSVFKSLHDVSEFLGRVLLHATIRQHHESQPIPCMLYVEKAGAEKILENVHIVRRDPEGDQLWIGFSELVTDIDIAVRLPEIRDRLYEDISDCIDTARKKILDIKDDNYLLRHDIDEILDGSQPFDAHLDRFTFVLFVGYDSNLLTEPETPGFEDDLEKETTMLFEKFAADLIEDSPFANLCIHVFIYPAPSLERLTQLVDEKVREVV

SEQ ID NO: 55085 - protein, 729 aa, Enterobacter cloacae
MTELYEQAKNSLQGEDFSSFNYLFAINKLLSNPVSYDLGRDLIVRALDSRERFSEHTTILKNMVRKSGLFPYLKKEFTGLTPDDLRVLDLYRTPFSDGYVFHSMQFHIFDLLKSGQNVVLSAPTSMGKSAIVDSLLGMGTLKRLVLVVPTVALADETRRRLQERFGDRYQIIHHSSQVCNSDQAVYVLTQERVNERDDIIDIDLFVIDEFYKLAFRQLKSGKVDHQDERVIELNIALSKLLKVSRQFYLTGPFVNSIRGLERLGYPHTFVSTDFNTVALDVQTFGIKASDDEAKLKALAKIAHACVGATIIYCKSPTVAGRVARELIRLGHGTLTESPHIDWVSQEFDADWDYTVALRNGIGLHFGALPRALQQYTADQFNAGKLRFLLCTSTIIEGVNTIAKNVVIYDNRDGPRSIDKFTHGNIKGRAGRMGVHFVGKIFCLEEIPEDSLNQEVEIPLGIQDIDTPISLLASVQPDHLSEFSQDRFDEVFINERVSIELVKKHSYFRVEQLEVLQSMFEMMDDTEFASLVFHWTPATNFLKTFAKIIARLVPSTFSRNGVPVNPTDVMVAKLACYSNAASYSEYLKNQIDRARQWVSEEEKRSLSIAINNDLKLITNTFGYTLPKVLSLMEDVVKYHALKRGIRSKVDYTHVKMTFENFHLPPGVSALEEIGIPIQTLHRLVDLLEFSDQADVDGLCQYLRDTQDVWSRTIGFVDQTFIRRALGIEQH

SEQ ID NO: 55086 - protein, 315 aa, Enterobacter cloacae; identical to SEQ ID NO: 55046

SEQ ID NO: 55087 - protein, 655 aa, Enterobacter cloacae
MAKSTATTALNHQDFTSVFNLLIEHLFLKNRGKEEKYKISDEMIRRATWLASLGSSGNETDKNIASAFGTLLYLYDTSNDLYLKACYILQSRAGNIVSAKHLEGLFSQGNIIKHFSSSLDFELTSQKFLLEKRVSDNNYIYFTHFQRSLWDKLERGENVAVSAPTSAGKSFVIKRYIYDSVISANDGYFVYVVPSKALINQVGNEMSRELKDIATVMTTYKDSENDDLKIVYVLTPERCMRLLNENGKKAPKIVFFDEIQNLEDKSRGNVFENVIYRMTSLWQSTQFIMAGPYIINLHHSLNKIIDLNLVEQTTSTTPVLQLKVVLTVHKNKKTVNYKLISPVGDAVLGEYDIGKALYSKLSSSKGAALKHITSILDSDEQNIIYAPKKNLAEGWALAIAQTNNEDSELDEDNTDLVYDSRIDSLCSFLENEIHPLYSLVRCLKKGVAFHHGGLLDVARLEVEDLFADGAIRNLVCTSTLLQGVNLPADRMIVISPKIGDYELSHFDFLNLIGRAGRISTSLYGEIFCIQLVDEEWAEDKIESDETKEIQSSVLRKLNEYGESVVSYIDVYTKDIVDTQGELHAVNLASYLRGQFLVDREHYEKIISNSNLTLNQIRVMTNRLEALEDILNVPKDIIYKNPFIDPLLIDQLYFFG

SEQ ID NO: 55088 - protein, 311 aa, Erwinia amylovora Ea644
MTPFNSQQVIEERIKQSTLCSYLVGFDINDSGSSFYRIDPLVMKILSALHEFAYGFHEGSNTDNTDTLNKIIDAARSVYKIDEYQKVKDIYLNSGSIDDDIADKYLKRGEFGELILHLILRDFHNTIPLLSKIYFKDSIGHTVHGFDAVHIDPVSKTLWLGESKLYLDPKKGISDLINDVEEHFKTDYLNAEFTLISKKVRHSTETPLLEYWLDVLSSGGKLSDKLNKINIPLLCTYSCETFTKFGDENTIDFCEYYEEKINSLKKYFDTKYNHSLKSHLNIILLLFPVSNKTELVKKLHQKLSLIQQLGG

SEQ ID NO: 55089 - protein, 730 aa, Erwinia amylovora Ea644
MNNHNDEAHGVDELFECTFEEYKRCSHLIHSNEEIGRDRIIQLLENRKDYSSKLDFILADLVEAVGFYPYLEKENLNTSSTAQQIRIESSRSTNLGNKLFHEEQKYLLELIDSDKNVIASAPTSFGKSLLIEEIVSSLKYKNILIIQPSLALLDETRKKLSKYLNSYKLIVRTSQEFVKENKGNIFLLTSERVNEYHNLPKIDFLVIDEFYKFSSKRDDERHQSLNNAFIKIFKSSKPKFYFLGPNIDGITPGFSEKYNALFYKSNYTLVRCNNFNIYENFNGLFGKLGNKAKFKERILFELILKRQTEQTIVYCSSPNKARNLSKKLTSYLLSKSEFKLNECHFHLTEWIEKFISPEWSLIKSLNVGVAFHDGALPRHITSSLIDYFNSGLIKVLFCTTTIIEGVNTSAKNIIYFDETKGDVDIDYFDYSNIRGRAGRLMQHYSGNIFNFNPPPVREEIYIDIPFFEQNPLHEEILINLDDKDIKNKDTEEYKFINSLHPDEIALLSKNAINIRGQKNLLEHLFKFIVVDYSMLNWTSTPQYKQLLYCMDLCWTFLLKDHEKPKIMSASRLTKVTYDYGFSQNINTLVQSSYEYKVNLLKTITAEKKNKALDDAIRDSFYILRHWFQYKIPKLLLVLNELQSYVCRFLELEPGNYLFYSSLIENDFIPTHLNILIEYGIPKSAIQKISKYIPKDFSEEKVIDFIIKRKLYENGNLIPYEKEILLKNLKN

SEQ ID NO: 55090 - protein, 241 aa, Pectobacterium carotovorum subsp. carotovorum PCC21
MYIQIGGLRNLRRAILLTAINLFFEAIQKFRNYTSNEGELGELLLYAFLEAGLNAPKLLSKMQLKTDSNDYIKGSDGVHLLELDDGYQLIFGESKIYADLLEGAREAFDSILDFKSNGMAFERGLIDTHVINEMVSEECYEKIKKILLPSGDDGPDLDLSFGIFLGFELKIDSSQLSMKNKEFREWVNDSVKQHATRVVNTIQRKIINHKLYGHEFHIYIVPFTDIDVTRKKLIHEMLTIK

SEQ ID NO: 55091 - protein, 859 aa, Pectobacterium carotovorum subsp. carotovorum PCC21
MNELNLSKKIHLAARLAEDAFESDFFKETYKFISGLYDNSLFNCNSDVTLSESDNNKIAYALRYADILSHSLKENHRSCAFEIISRIALLKTHDPYFKFIGSAVINRLGVYAAEKLISKGVKLPLDREVDAIIKKEVQKTDEDGVYFTDKQYELYKLLKSSKTISFSGPTSMGKSFVINAYIKEIILKEELKNIALIVPTRALISQNALKLKIDLALYKDEVPYKIVTTSYMINSDERKSKGYIFILTPERLVSLISTIPSLMIDYLFVDEAQKLTTKNDSRSLVTYSAIEQTISKNPEARLFFSSPNLSNPEIFNVLFDREDARVYRNTEGATAQNMYFIDLFNDSFNYVNTEGMKLEKIDDISKKYKNANDIIYKLNNGKSKIIYCGGIDSTLERTRSFINYLKINKKKSNPLNLEISSEIRNFVHDNYELAEAISYGVAFHFGNLPQSIRDLIEHHFKIGNINYLFCTSTLLEGVNLPARSVFILTHKKGSSPLDSVDFWNLAGRAGRLSMELSGDIFCIRDDNKFWNKKAVDNILLSDKNNISLKPSFYIEDEKILNDLHRIIATGKMGDIKNAEFLRTLGDMIRIETMRDSKEPPLISYFQRSGKSEILLSAGKSTKNITIPMNMLLANSHIAIDSQHHAFKKIKDLSISELKLSWQPTYEEIKEKLNLIFDIYQVDKFATGRDRLYSNSIRYYAVLLFQWIRGNSLQEIISGAIAYKKNKNIYVKNVPVLFDSENPAHLTALVNETIKDIELRVGYQLQNYISHYCQLLSHVLQGNPGANWSQFIEFGSNEPVVWHLQMMGFSRDSAVFLKRNFSKYLKIDNELNKLVILDKEMIKRSFKKDGLHYLEIQSLL

SEQ ID NO: 55092 - protein, 538 aa, Pectobacterium carotovorum subsp. brasiliense
MESNDSGGVAAKHGFLFQDCVAAYHVTRMLRDKTIRSVRCEVTDDIDIVSDGYIDFVQVKSTDKSRWNISHIVQNSKGAGKKTIPYSSILHKSMQCESDVTFSRRYSIVTEEKVNKTLEYLLISPNARLGKPGRQELIDDLKKRTGNYQTASGISVSDWIDAATWEVFSSLRELELLGIKNIRLASQDLHGVILSSEIIAEDIWCRILDTVTRKGEHSRRIHSADDKSYLRSDLLEWFKLRVEDDQSRSGRKIYVKRDLPHILTPFRAPMASVCAKRKGQVLHQQYSLKQYRYKHIADNVCQWLDEVFLRPKEMSDIHKLTFIEKRERLKNSVFKSLHDVSEFLGRVLLHATIRQYHESQPIPCMLYVEKAGAEKILENVHIVRRDPEGDQLWIGFSELVTDIDISVRLPEIRDRLYEDISDCIDTARRKILDIKDDNYLLRHDIDEILDGSQPFDAHLDRFTFVLFVGYDSNLLTDPETPGFEDDLEKETTVLFEKFAADLIEDSPFANLCIHVFIYPAPSLERLTQLVDEKVREVV

SEQ ID NO: 55093 - protein, 729 aa, Pectobacterium carotovorum subsp. brasiliense
MTEVYEQAKYSLQGEDFSSFNYLLAVNKLLSNPVSYDLGRDLIVRALDSRERFSEHTTILKNMVRKSGLFPYLKKEFTGLTPDDLRVLDLYRTPFSDDYVFHSMQFHIFDLLKSGQNVVLSAPTSMGKSAIVDSLLGMGTLKRLVLVVPTVALADETRRRLQERFGDRYQIIHHSSQACHSDQAVYVLTQERVNERDDIVDIDLFVIDEFYKLAFRQLKSGDIDHQDERVIELNIALSKLLKVSRQFYLTGPFVNSILGLERLGYPHTFVSTDFNTVALDVQTFGIKANDEKAKLNALAKIAHACVGATIIYCKSPTVAGRVARELIRLGHGTLTESPHVDWVSEEFDADWDYTVALRNGIGLHFGALPRALQQYTADQFNAGKLRFLLCTSTIIEGVNTIAKNVVIYDNRDGPRSIDKFTHGNIKGRAGRMGVHFVGKIFCLEEIPEDNLNQEVEIPLGIQDIDTPINLLASVQPDHLSEFSQDRFDEVFINERVSIDLVKQHSYFRVEQLEVLQSMFEMMDDTEFASLVFHWTPATNFLKTFAKIIARLVPSTFSRNGVPVNPTDVMVAKLASYSNAASYSEYLKSQIDRARQWVSEEEKRSLSRAINNDLKLITNTFGYTLPKVLSLMEDVVKYHALKRGILSKVDYTHVKMTFENFHLPPGLSALEEIGIPIQTLHRLVDLLEFSEQADVDELCQYLRDTQDVWSRSIGYVDQSFIRRALGIEQH

SEQ ID NO: 55094 - protein, 308 aa, Pectobacterium carotovorum subsp. brasiliense
MTIINEVNKYVSVNKQDFDACIDVVEQSFCIKSLCAQVRFHHLKFDGNGRPMVKTLAEKLYEYIIDYCFSMQDRVEPLSPQQWLALAKQARSLFRHPKVTDNSPDKTGEAGETLLFFLMEAIIGAPQLVAKMELKTNSNDEVKGSDGIHIKWNEKDKLVDFYFGESKLYQRISSAMDSALKSIDDFHTNEMYKHEFIMATKHYKYAKDEVREAVRNLFISGEPGSDVRVNHACLIGFDWNGFDKFDYSSSIPINEQFLTELTNTMPQWVDLLDEKFSEFNRKYLRFDVFFIPFPSVVDFRNEFNKALD

SEQ ID NO: 55095 - protein, 840 aa, Pectobacterium carotovorum subsp. brasiliense
MNELYSRLVKVSINKMFGVESDFNISLSDIYQLLSYSSILSLSDIESDVKKAYDIVSRILEVGAEYNENIISACDLILSRIGNFPGRGLLRDKYNKGESPTLNLSLSLERIGRETENTYNDITLTNFQCKLLNSLKNNNYLSVSAPTSAGKSFVLSLAVIDKIKAYEKECIVYVVPTRALISEVSNKFRHECKQAGLSKVIIRTAPETIETNSIEQGLIYVLTQERLVSLLSNSYGNSHFHIDTLLIDEAHEIQKGKRGIVLQNAVELALEKHPYMQVMFSSPLISNPEYFFSIFRWRKDGKAFIETISPVTQNILLINQVRNNTKAISVKLNAEDKPIDLGIYELDFVLRDNRKIQKAKLAEFISRSGGAVIVFEDTPSNAEGVAINIAEIFGEVSLQNDFEEFISSIEEEMHEQYTLITCLRSGVAFHYGNMPSIIRNGIEYFFKRGDVKFIVCTSTLLQGVNLPAKHLVLENPHSGDEPMVRADFLNLAGRAGRLRYEFQGNVWCVRSDMWDNKSFEGETLQTISSAMSKVMEDGGSIISNAIDNVFSPNDDKELADVAFARFYQEVQRDGFQLPYFYELEGTESNEMLEYNYDKVIRMKINIPEELLKLNSGARPDYIQRLYDFFNQQDDLDDYILHSPYQKGGKARMDRAIDIIIDIFSWSVSPQYAKLISVMAHQWMTSHSLKSMINYKIRSSHDLSDLINRGESVDKIRRKTSSLIRDVLNTLENQVRYNLVRYLKIYRETLIYVLVSKGEKDKADKVENISAYLEFGSCNPTELSLMSLGLSRSTALFLKNKFNFPRDSSPEGLIEFLLTRNINSKNTPEFRIREIKDVLGI

SEQ ID NO: 55096 - protein, 481 aa, Pectobacterium carotovorum subsp. brasiliense
MSFENKNASYYIIAQFDSEGFLISRATSFNLDNENILTASHFIKESPGCVFRIFLTPDDYGKSNGKVIELKKNRPELDIAIFTCPWNCLSLTPSLGGYAIPVGAEVYVNGYAAEKGNIPSLFFSDIVTDLRAIDTSIYCYEITQCKKNTITNYSGVSGAPLLYKGTIIGIVLFQQKNNTLYCVSLEKIIPIISLDIGKDYFLISGEEVDYLAPKCPKEPFNLVCEINTNSPITKGLSVQFSFNRWNLSEFSKELSEWLVDYVISPSKLIDYENRTRAAVKVAEKHFVKVSEKEFLDLLLHIAIRKSFKTIPVINKIFTVGNELIPSCSHAVINSGRLELWLGVSGYEKNIADAISNVNDTISKLITADNISERFKLIINDVSKEWPLFEKLKKLGDNSLSLDKRVDKIIVPVFICYEASIVKDYKDEESFTDAFKKEILELQSGFTEKYRHSFIDKVDIRLFSFPLDSFQNILESFIKELS

SEQ ID NO: 55097 - protein, 574 aa, Pectobacterium carotovorum subsp. brasiliense
MDELKKKFHKYTVDSDEFVVKYKIITQVNQTHGKNNIFLYTQERVIEKEGFPVIDFFVVDEFYKLMPQGMDDYRSERLNIAFKKLLSLCSFFYMLGPNIKNINPLTLSKLGCRYIDESDFITVATNEYTFTIPPGNDTERDITRNEYLKKVMNNISGEQTIIYCKSPKRASVLANLLSEIIPLKKEHDLNSLSNWLKETFHPDWSQSKIIQHGICAHHAKLPRSIASLFVDLFNEKRINVLVCTSTLIEGVNTNAKNIIIYDDCITKRVQLDSFTYNNIAGRSGRMFEHFVGNVFFFGEKPTDGLNQIDIPIISHSDNVPDSLLLHYDEPYSEKIKGRLNKYFDQDILSVDVITKNSGVPPESQLEFANDLMENFQSWHKLMCWNNMPNSGQLNHINKIAEKYFNIKSFASGAVKSDVQLSRKIVSILKNETLKDIIDQDYEYFSEDDDSFTIDDAVLRNFDFRRKILGHYYPVIINAINNIQEYVFTKFGYKAGNYKAFILRVESLNVTPSLMTLEEYGIPISISLKANKIWKVKDSDSFDEAIDKIKSCSLSDDFKLSELELKILERNIIFL

SEQ ID NO: 55098 - protein, 308 aa, Pectobacterium carotovorum subsp. brasiliense
MTIINEVNKYVSVNKQDFDACIDVVEQSFCIKSLCAQVRFHHLKFDGNGRPMVKALAEKLYEYIIDYCFSMQDRVEPLSPQQWLALAKQARSLFRHPKVTDNSPDKTGEAGETLLFFLMEAIIGAPQLVAKMELKTNSNDEVKGSDGIHIKWNEKDKLVDFYFGESKLYQRISSAMDSALKSIDDFHTNEMYKHEFIMATKHYKYAKDEVREAVRNLFISGEPGSDVRVNHACLIGFDWNGFDKFDYSSSIPINEQFLTELTNTMPQWVDLLDEKFSEFNRKYLRFDVFFIPFPSVVDFRNEFNKALD

SEQ ID NO: 55099 - protein, 840 aa, Pectobacterium carotovorum subsp. brasiliense
MNELYSRLVKVSINKMFGVESDFNISLSDIYQLLSYSSILSLSDIESDVKKAYDIVSRILEVGAEYNENIISACDLILSRIGNFPGRGLLRDKYNKGESPTLNLSLSLERIGRETENTYNDITLTNFQCKLLNSLKNNNYLSVSAPTSAGKSFVLSLAVIDKIKAYEKECIVYVVPTRALISEVSNKFRHECKQAGLSKVIIRTAPETIETNSIEQGLIYVLTQERLVSLLSNSYGNSHFHIDTLLIDEAHEIQKGKRGIVLQNAVELALEKHPYMQVMFSSPLISNPEYFFSIFRWRKDGKAFIETISPVTQNILLINQVRNNTKAISVKLNAEDKPIDLGIYELDFVLRDNRKIQKAKLAEFISRSGGAVIVFEDTPSNAEGVAINIAEIFGEVSLQNDFEEFISSIEEEMHEQYTLITCLRSGVAFHYGNMPSIIRNGIEYFFKRGDIKFIVCTSTLLQGVNLPAKHLVLENPHSGDEPMVRADFLNLAGRAGRLRYEFQGNVWCVRSDMWDNKSFEGETLQTISSAMSKVMEDGGSIISNAIDNVFSPNDDKELADVAFARFYQEVQRDGFQLPYFYELEGTESNEMLEYNYDKVIRMKINIPEELLKLNSGARPDYIQRLYDFFNQQDDLDDYILHSPYQKGGKARMDRAIDIIIDIFSWSVSPQYAKLISVMAHQWMTSHSLKSMINYKIRSSHDLSDLINRGESVDKIRRKTSSLIRDVLNTLENQVRYNLVRYLKIYRETLIYVLVSKGEKDKADKVENISAYLEFGSCNPTELSLMSLGLSRSTALFLKNKFNFPRDSSPEGLIEFLLTRNINSKNTPEFRIREIKDVLGI

SEQ ID NO: 55100 - protein, 299 aa, Pectobacterium carotovorum subsp. carotovorum
MTMKLAPQLKNTHIIKDMLKKVNVSIFLSDGRRVETLLVYLPSVNGVINHTAFFDMIANELLHHFALTCQDIEKKLKRNGAHAADILFKKSLSKLSQQTAHGELGELILFTLVDVYLEAPKLLSKISLKTSPQMPVFGADGVHIQYVNDKIRVYLGESKLYTTFSNAATKAASSIEKAKSKYLDEFNLIDSYIDLPQLDENAEEELLSILNPFENKNIDDHIHSPCFIGFADKNLIESCLKGEDFLQCYINMAFNHIDDYYKKLEKRSVNIESSTLMILPFTDTEALVKDFITHLGIQK

SEQ ID NO: 55101 - protein, 844 aa, Pectobacterium carotovorum subsp. carotovorum
MSEFYTKLSNRIINNEQFKLGTSELFASYIKMLIGEKGTISKELAKNITTASQILYKSEDERYLKEGANLLSMLIDSCGIDYPEIIPIATHVFTSTGDFPNIELLEERFPEIQFKHNFLSEATFYFRRSLNNVETLNIILTDFQKRLWDDLQRGEDVITVAPTSAGKTHIILNYLVDSVLDSIDGAFAVIVVPTRALITEVSSKIYNLAKERKREKEIEICTIPRDGNFSDKTFFVMTQERLHEVLLRGDISFNYLFIDEAHNISDESRGVLLHLTLEKVLDNGTPQIIIGMPSPQYQNSFTSIFNDITFKKEITSHSPVSKLVMNVRPKGRNLEIDRLHTGDKVIIPKNFKEKKLADIVYRLGKNHSNIIYRNQTNYCESIAQDISNRIETISDNEALVEASEYIKHFIHEEFTLASNLLKGVAFHYSPLPTSVRIMVENLAKEGHVKYICCTSTLAEGVNLPAKNLFIQNPFFKKKYQSPERLEDVKINNITGRAGRMLQHFSGNVFLIEQDKWAFDDYFIESDKLKEEKIPTYFKLINDKTDDVMMALSGQYPREDEQYKFYSVANKLIKAYDNGSLDNTLSAPEVKLESDIIHRLKSNVEQAFLNLKVSSLILESNPTIGYIQQNKVYEFLMSGLDLHEWSLPHPKSEDLYDKLLKVSSKLVEYGVFIPSGNYTAKYICLISKKWIQGNSLKEMISEQIHWDNTSPSQDVNYEDEGVNEVKVNKSVRNVINVINSDVRFRLSNAIKCYYTLFVLAARMKRSDVQSVKLHYFLEIGASDERMMDLLNLGLSREASKEIDEKVPSGVPIKNLADLIRLLDSESISRIHIVIKKEIEHLVNRS

SEQ ID NO: 55102 - protein, 538 aa, Escherichia coli str. K-12 substr. MG1655
MESNDSGGVAAKHGFLFQDCVAAYHVTRMLRDKTIRSVRCEVTDDIDIVSDGYIDFVQVKSTGKTRWNISDIVQNSKGADKKTIPCSSILHKSMQCESDLSLGRRYSIVTEEKVNKTLEYLTISPNARLDKPGRQELIDDLNKRTDNFLTDSGISVSDWIDAATWEVFSSLRELELLGIKNIRLASQDLHGVILSSETVAEDIWCRILDTVTRKGEHSRRIHSADDKSYLRPDLLEWFKQRVEDDQSRSGRKIYVKRDLPHILTPFRAPMASVCAKRKGQVLHQQYSLKKYRYKHIADNVCQWLDEVFLRPKEMSDIHKLTFIEKRERLKNSVFKSLHDVSEFLGRVLLHATIRQHHESQPIPCMLYVEKAGAEKILENVHIVRRDPEGDQLWIGFSELVTDINIAVRLPEIRDQLYEDISDCIDTARKKILDIKDDNYLLRHDIDEILDGSQPFDAHLDRFTFVLFVGYDSNLLTEPETPGFEDDLEKETAVLFEKFAADLIEDSPFANLCIHVFIYPAPSLERLTQLVDEKVREVV

SEQ ID NO: 55103 - protein, 729 aa, Escherichia coli str. K-12 substr. MG1655
MTEIYEQAKHSLQGEDFSSFNYLFAVNKLLSNPVSYDLGRDLIVRALDSRERFSEHTTILKNMVRKSGLFPYLKKEFTSLTPDDLRVLELYRTPFSDGYVFHSMQFHIFDLLKSGQNVVLSAPTSMGKSAIVDSLLGMGTLKRLVLVVPTVALADETRRRLQERFGDRYQIIHHSSQVCHSDQAVYVLTQERVNERDDIVDIDLFVIDEFYKLAFRQLKSGDIDHQDERVIELNIALSKLLKVSRQFYLTGPFVNSIRGLEKLGYPHTFVSTDFNTVALDVKTFGIKANDDKAKLKALGEIAHACVDATIIYCKSPTVAGLVARELIRLGHGTPTENPHVDWVSEEFDADWDYTVALRNGIGLHFGALPRALQQYTADQFNAGKLRFLLCTSTIIEGVNTIAKNVVIYDNRDGTRSIDKFTHGNIKGRAGRMGVHFVGKIFCLEEIPEDNLNQEVDIPLGIQGIDTPINLLASVQPDHLSEFSQDRFDEVFINDRVSIDLVKKHSYFRVEQFEMLQSMFEMMDDNEFSSLVFHWTPATNFLKTFAKIIARLVPHTFSRNGVPVKPTDVMIAKLAGYLSAESYSEYLKNQIDYARQWISEGEKRTLSIALNNDLKLITNTFGYTLPKVLSLMEDVVKHHAVKRGIRSKVDYTHVKLAFESFHLPPGVNALEEIGIPIQTLHRLVDLLEFSDEADVDELSQYLRDTQDIWSRSIGYVDQMFIRRALGIRRH

SEQ ID NO: 55104 - protein, 538 aa, Escherichia coli str. K-12 substr. W3110; identical to SEQ ID NO: 55102

SEQ ID NO: 55105 - protein, 729 aa, Escherichia coli str. K-12 substr. W3110; identical to SEQ ID NO: 55103

SEQ ID NO: 55106 - protein, 538 aa, Escherichia coli str. K-12 substr. DH10B; identical to SEQ ID NO: 55102

SEQ ID NO: 55107 - protein, 729 aa, Escherichia coli str. K-12 substr. DH10B; identical to SEQ ID NO: 55103

SEQ ID NO: 55108 - protein, 538 aa, Escherichia coli BW2952; identical to SEQ ID NO: 55102

SEQ ID NO: 55109 - protein, 729 aa, Escherichia coli BW2952; identical to SEQ ID NO: 55103

SEQ ID NO: 55110 - protein, 538 aa, Escherichia coli DH1; identical to SEQ ID NO: 55102

SEQ ID NO: 55111 - protein, 729 aa, Escherichia coli DH1; identical to SEQ ID NO: 55103

SEQ ID NO: 55112 - protein, 300 aa, Escherichia coli E482
MNAEDTNSLHKIYNPVYGLSNIVLLAKECQSTDPVKVNLLCLGFKEDLPKDKELAETLFLELVHYCIPHPVLVKRKELARSEGKDEARLYSELAREARSLFMKYKLESAVKIKNGEPPEKFEQRVKNANLRYGEVGELISYCIAIHFLKASQLVSKMALKTSSEMPVFGLDGIHATIDSKGTLTVFYLESKMTREFDSGSEQFSKSVSGFESDRNSRRNEYRILQDLSNLESLEGEERKKAIQYFDPYSNESSNVRERFVRIIAYNEESYKSKIAIDDESPLSIHLDHFKKITSALLKKK

SEQ ID NO: 55113 - protein, 726 aa, Escherichia coli E482
MNTLAAEIISQIKKHLEFKNDLSFLFAHSFLQNHKRTSFATKQSKIGDENIVIYKRLIESAYLFSQSESDEDKNLAQSIAYHLNVVTGDDYLKQMSENLLRVLGNFPGATYLQQENGFIPESFYAFLKRSFIENENKIKISNKEITLTNFQKRVWESLHSNVPQAISAPTSAGKSFLVVEMLANGIISGELNSAIYIAPTRALVNEITQKFIIKTLPYQNEVRVTSIPTINNEYNKQIFVLTQERLQVLLDNFEEKIDLVVIDEAQSISDEIRGMILQDCLDKISTQNPNAKYVFLAPGAEGFDDLADIIGIDAIHIEKTNLSPVVQNKIIVKVDPSKENNLQLSLLDNSDILPIGEIESTRGFANENTRLAAVALELGKNEGSLVYGTGAENAEDVAKQISSGLPLLEDDSELQELSKFIKKHVHEDYSLANLVLRGVGYHYGKMPSLLRETLEKNFTNNKLKFLVCTTTLFQGVNLPAKNVFIDTPTRGNRGEKLDPASLWNFAGRAGRLGYAFSGNVYLIDYDDWVTKPLDSKIDFKITSSLKKVINEDFDTVISRLDKNNHSGVTPYSNIDAAAGLLISRAAKGDLHNFLKRSFRTLSDKSKLETIDNATYISLESLKIPHEVLTLNWTVDPFGQERLYNRFIQKIKEGKVDELIPRHPSGDVYKNYVGVFSRINKYILNHNTSKFSNYLTSIALNWMRGKSLPEIISLSINKKKEKNPLGL

SEQ ID NO: 55114 - protein, 300 aa, Escherichia coli B41; identical to SEQ ID NO: 55112

SEQ ID NO: 55115 - protein, 726 aa, Escherichia coli B41; identical to SEQ ID NO: 55113

SEQ ID NO: 55116 - protein, 345 aa, Escherichia coli 5.0588
MKSEDTNSLHKIYNPVYGLDNIVLLAQECQSTDPVKVNLLCLGFKEDLPKDKELAETLFLELVHYCIPHPVIAKRKALSQTEGKDEARLYSELAREARSLFMKYKLESTLTIKKGETQEKFEQRVKNANLRYGEVGELISYCIAIHFLKAAQLVSKMALKTSSEMPVFGLDGIHATVDDEGTLTVFYLESKMTREFTSGSEQFSKSVSGFENDRKSRRNEYRILQDLSNLESLEGEERKKAVQYFDPYSSESSNVRERFVGIIVYNEEAYKNKIAIDDESPLSIHLDHFKKSYIGSYKDKVKIITEDLSKAGATPQKCRAYIFALPDVDAFKLDFAKELSGEHFS

SEQ ID NO: 55117 - protein, 849 aa, Escherichia coli 5.0588
MNTLANEVINQIKSRLEFKNDLGFLFAHSFLQKHTQTSFSALQGKIESDSVVIYKRLIESAYLFSQSESDEDKNLAQSIAYHLNIITSDNYLKQLSENLLRALGNFPGASYLQEKNGFIPETFYAYLKRSFIENENKVKIANKEIILTNFQKKVWESLHSNVPQAISAPTSAGKSFLVVEMLANRIISGELNSAIYIAPTRALVNEITQKFINKTLPYQNEVRVTSIPTINDEYYKQIFVLTQERLQVLLDNFKNKIDIVVIDEAQSISDEIRGMILQDCLDKISIQNPDAKYVFLAPGAEGFNDLADIIGIDTIHVEKTNLSPVVQNKIIIKVDPAKENNLQLSLLDNSNILSIGELTSTRGFANENTRLAAVALELGKDEGSLVYGTGAANAEDVAKQIASGLPLLENDSDLKELSKFIKKHVHKDYSLANLVLRGVGYHYGKMPSLLRETLEKNFTNNKLKFLVCTTTLFQGVNLPAKNVFIDTPTRGNRGEALDPASLWNFAGRAGRLGYAFSGNVYLIDYDDWETKPLDSKIDFKITSSFKKVINEDFDTVISRLDKNNHLGVSQYSNVDAAAGLLISRAAKGDLHNFLERSFRTIPDKSKLEIIEDATYSSLESLNIPHNILTLNWTVDPFGQERLYNRFIQKIKDGKIDELIPRHPSGNVYTNYVGVFSRINKYILNHNTSKFSNYLTAMALNWMRGKSLPEIISLSIAKKKEKNSTRPVNVDRAVREVFDFVEDNLRFKYVQLGKAYIDLLRQALIVNNQAEKAEEIYDFPLSLELGVSSIAGQVFIELGLSRISASYLENIIPNSNPTISTAKEWLRNNDYDSLNLPLTIYSELEDKGLL

SEQ ID NO: 55118 - protein, 538 aa, Escherichia coli XH001; identical to SEQ ID NO: 55102

SEQ ID NO: 55119 - protein, 729 aa, Escherichia coli XH001; identical to SEQ ID NO: 55103

SEQ ID NO: 55120 - protein, 300 aa, Escherichia coli G58-1; identical to SEQ ID NO: 55112

SEQ ID NO: 55121 - protein, 729 aa, Escherichia coli G58-1
MQRSYLVNTLAAEIISQIKKHLEFKNDLSFLFAHSFLQNHKRTSFATKQSKIGDENIVIYKRLIESAYLFSQSESDEDKNLAQSIAYHLNVVTGDDYLKQMSENLLRVLGNFPGATYLQQENGFIPESFYAFLKRSFIENENKIKISNKEITLTNFQKRVWESLHSNVPQAISAPTSAGKSFLVVEMLANGIISGELNSAIYIAPTRALVNEITQKFIIKTLPYQNEVRVTSIPTINNEYNKQIFVLTQERLQVLLDNFEEKIDLVVIDEAQSISDEIRGMILQDCLDKISTQNPNAKYVFLAPGAEGFDDLADIIGIDAIHIEKTNLSPVVQNKIIVKVDPSKENNLQLSLLDNSDILPIGEIESTRGFANENTRLAAVALELGKNEGSLVYGTGAENAEDVAKQISSGLPLLEDDSELQELSKFIKKHVHEDYSLANLVLRGVGYHYGKMPSLLRETLEKNFTNNKLKFLVCTTTLFQGVNLPAKNVFIDTPTRGNRGEKLDPASLWNFAGRAGRLGYAFSGNVYLIDYDDWVTKPLDSKIDFKITSSLKKVINEDFDTVISRLDKNNHSGVTPYSNIDAAAGLLISRAAKGDLHNFLKRSFRTLSDKSKLETIDNATYISLESLKIPHEVLTLNWTVDPFGQERLYNRFIQKIKEGKVDELIPRHPSGDVYKNYVGVFSRINKYILNHNTSKFSNYLTSIALNWMRGKSLPEIISLSINKKKEKIH

SEQ ID NO: 55122 - protein, 538 aa, Escherichia coli XH140A; identical to SEQ ID NO: 55102

SEQ ID NO: 55123 - protein, 729 aa, Escherichia coli XH140A; identical to SEQ ID NO: 55103

SEQ ID NO: 55124 - protein, 538 aa, Escherichia coli J53; identical to SEQ ID NO: 55102

SEQ ID NO: 55125 - protein, 729 aa, Escherichia coli J53; identical to SEQ ID NO: 55103

SEQ ID NO: 55126 - protein, 300 aa, Escherichia coli 75; identical to SEQ ID NO: 55112

SEQ ID NO: 55127 - protein, 726 aa, Escherichia coli 75
MNTLAAEIISQIKKHLEFKNDLSFLFAHSFLQNHKRTSFATKQSKIGDENIVIYKRLIESAYLFSQSESDEDKNLAQSIAYHLNVVTGDDYLKQMSENLLRVLGNFPGATYLQQENGFIPESFYAFLKRSFIENENKIKISNKEITLTNFQKRVWESLHSNAPQAISAPTSAGKSFLVVEMLANGIISGELNSAIYIAPTRALVNEITQKFIIKTLPYQNEVRVTSIPTINNEYNKQIFVLTQERLQVLLDNFEEKIDLVVIDEAQSISDEIRGMILQDCLDKISTQNPNAKYVFLAPGAEGFDDLADIIGIDAIHIEKTNLSPVVQNKIIVKVDPSKENNLQLSLLDNSDILPIGEIESTRGFANENTRLAAVALELGKNEGSLVYGTGAENAEDVAKQISSGLPLLEDDSELQELSKFIKKHVHEDYSLANLVLRGVGYHYGKMPSLLRETLEKNFTNNKLKFLVCTTTLFQGVNLPAKNVFIDTPTRGNRGEKLDPASLWNFAGRAGRLGYAFSGNVYLIDYDDWVTKPLDSKIDFKITSSLKKVINEDFDTVISRLDKNNHSGVTPYSNIDAAAGLLISRAAKGDLHNFLKRSFRTLSDKSKLETIDNATYISLESLKIPHEVLTLNWTVDPFGQERLYNRFIQKIKEGKVDELIPRHPSGDVYKNYVGVFSRINKYILNHNTSKFSNYLTSIALNWMRGKSLPEIISLSINKKKEKNPLGL

SEQ ID NO: 55128 - protein, 297 aa, Escherichia coli 541-1
MLLPIRVHKRFLTLFKTLQIDDCPPQSTLNIHVLNIESNEFIYCKLVEELRDIIITYVHSNRRLEEFKESYPSYSPKPFFEAIQKFRNYTSNEGELGELLLYAFLETGLNAPKLLSKMQLKTDSNDYIKGSDGVHLLELDDGYQLIFGESKLYADLLEGAREAFDSILDFKSNGMAFERGLIDTHVINEMVSEEGYEKIKSILLPSGDDGPDLDLSFGIFLGFELKIDSSQLSLKNKEFRDWVNESVKQHATRVVSTIRRKIINHKLYGHEFHIYIVPFTDIDVTRKKLIHEMLTIK

SEQ ID NO: 55129 - protein, 859 aa, Escherichia coli 541-1
MNELNSSKNIHLAARLADDAFESAYFKEINKFISGLYNYSLFNCDSDVSLSESDNNKIAHALRFADIFSHSSKENHRSCAFEIISRIALLKKHDPYFKFIGTAVINRLGVYAAEKLISKGVKLPLDREVDSIIKKSVQKTDEDGVYFTDKQHELYKLLKSSKTISFAGPTSMGKSFVINAYIKEITLKKELKNIALIVPTRALISQNALKLKIDIALYKNESPYKVVTTSYMINGDESKNKGYIFILTPERLVSLISTIPGLMIDYVFVDEAQKLTTKNDSRSLVTYSAIEQTISKNPEARLFFSSPNLSNPEIFNILFDRKDASVYRNTEGATTQNMYFIDLLNSSFSYVNTEKRTLEKIDEISNTYTNTNDVIYKLNNGKSKIIYCGGIESTLERTRSFINYLKINKKKRKHLNLEISSEIRNFVHDNYELAEAINYGVAFHFGNLPQSIRDLIEHHFKIGNIDYLFCTSTLLEGVNLPARSVFILTHKKGPSPLESVDFWNLAGRAGRLSMELSGDIFCIRDDNKLWNKKAVDNILLSDKNNISLKPSFYIEDEKRLNDLHHIITTGKTGNIKNAEFLRTLGDMIRIDTLRDSKELPLISYFQSSGKSEILLSAEKSTENITMPMNILLANSHIAIDSQYHAFKKIKSLTVKELKLSWQPTYEEIKEKLNLIFDIYQVEKFATGRERLYLNSIPYYAVLLFQWIRGNSLQEIISGAIAYRKNKSIYIKNTPVLFDSENPAHLTALVNETIKDIELRVGYQLQNYFSHYCQLLNYVLQGNPGANWSQFIEFGSNEPIVWHLQMMGFSRDSAVFLKKNFSKHLKLDNEMNKLIIMDKELIKRSFKKDGLHYLEIQSLL

SEQ ID NO: 55130 - protein, 538 aa, Escherichia coli DH1; identical to SEQ ID NO: 55102

SEQ ID NO: 55131 - protein, 729 aa, Escherichia coli DH1; identical to SEQ ID NO: 55103

SEQ ID NO: 55132 - protein, 540 aa, Escherichia coli KTE94
MSITSLSDAGGPAARQGFKYQDHVAVSFIFKMLQDSNYSQVECETADDIVAVFQCVGQIVNEYIQVKTTESDSKWNVKEITALDGTKANSSLLHKSLKCDVRPGIARFRIVTKRDVAKILDGFKKEIDKRVLPDTTTTRGVALCKQFKTFVSPQKHDFLYWAENVVWQVYGDVEALEAVNIKALSQLAEGFGNRPNFTQLKAIYEEFLEIADKAATSSVKTAAASKIILRAPALDHLKKLLDEADDMSTATSKPYKKRPDPFLVEFHANTKESLLHSFSGFDVRYSLKKWRHENYAKHLIEWLPEFSLKASEIVNILAHNAETILARSISTFSDSELPRDRLIAELILHSILRSRQHSEPVACKVFYKSAGKLSEFGNAHIVQMPDEDDQLWLGLARMIKANDMDTTLEQIREILDETISETVLSAEREIIISLREPLHHQPKADSFNQALHRNSPIDDMLNILCFPILLTYDSAALSSGWLVDYVDNLKKEIETHFSTFTSELSENIKQVKVLIFLVPMESIELLTKAFNARCEKLEEL

SEQ ID NO: 55133 - protein, 713 aa, Escherichia coli KTE94
MNYEIIKNILAKLGEENTKTVDVLLAINTIVNRSNSEWEGRDLVIRALDKFEFFDSVEQSLLLNLVRAVGLFPYITPHLSSMAISDRLAYEAHRVEGVEQGMVFHHLQAHVFSLIMQGRNVVLSASTSVGKSLVIDAVLAQRRFKKVVVIVPTIALIDETRRRLVKRFKDFNLITHPSQESVVETTNVYLLTQERVIQRPDLADVEFFVLDEFYKIDLGNSPDESTRAVDLSLAFHKLAKTGAQFYMLGPHIQKISGLDDYEYHFIPSDYSTVAVDIQNFNLEMRSEERKEKLLELVTTLDSPTLIYCQAPPSANRVAEYLIQEAGLKPVPETKEIAAWISRHYHPEWNVAKAISLGIGIHHGGVPRALQQYIVKLFNDGIIKRIICTSTMIEGVNTSAENVIIYDRRLNTSKFDYFTYKNISGRAGRMNKYFIGKVFMLEAPPLEQGLTVEYPIGHQDENSPIGLIMQLENEYLTDISRGRLQDAYANPILSPATLIENRHVPIERQVEVAETIIRDLPDGSRLLGWRGIPETNQLNYLCELVYSLEGGNLMDYGISSSLQLMWHINELRTQKNLPAYLRDAVENRREEHTPSEAINLRLKFIRNMVCFRLPRDIMAVSNIQADVLAKIGIEPGDFSFFAEQLENMFLDPLLTALDEYGIPTQISAQIKNLILPSEHLNDLLAKLRALAPRVDSLQLTGFEKSLMSWAVSEM

SEQ ID NO: 55134 - protein, 538 aa, Escherichia coli S17; identical to SEQ ID NO: 55102

SEQ ID NO: 55135 - protein, 729 aa, Escherichia coli S17; identical to SEQ ID NO: 55103

SEQ ID NO: 55136 - protein, 297 aa, Escherichia coli KTE9; identical to SEQ ID NO: 55128

SEQ ID NO: 55137 - protein, 859 aa, Escherichia coli KTE9; identical to SEQ ID NO: 55129

SEQ ID NO: 55138 - protein, 300 aa, Escherichia coli KTE42; identical to SEQ ID NO: 55112

SEQ ID NO: 55139 - protein, 726 aa, Escherichia coli KTE42; identical to SEQ ID NO: 55113

SEQ ID NO: 55140 - protein, 297 aa, Escherichia coli KTE78; identical to SEQ ID NO: 55128

SEQ ID NO: 55141 - protein, 859 aa, Escherichia coli KTE78; identical to SEQ ID NO: 55129

SEQ ID NO: 55142 - protein, 297 aa, Escherichia coli KTE79; identical to SEQ ID NO: 55128

SEQ ID NO: 55143 - protein, 859 aa, Escherichia coli KTE79; identical to SEQ ID NO: 55129

SEQ ID NO: 55144 - protein, 314 aa, Escherichia coli MP021561.2
MDALQTALDKLLRDDGDTIYSYFHEIKSDYLIEGTSASCHFHCINLDGNGRPKINALIQFLVGKVIDYAIPRKKINEAMQYQRDTGSTLKITKLFMQAMGLFTSLSNSGEGGELILFLFAEKFLKLPQIICKMNLKTNPEMHYHGADGVHIGVDNHSQKLCLYWGESKLYSDLSQAIYKCMKSISPLITSSLGTGSAEERDIQLLSDFMNVDDPKLENALKKFLDPDEPEFNKLEYRGICLVGFDIDDYPTEPNKLNINDLVSSFNNKIDVWRDSIKKRIVEENIYGISLHVFLVPFPSVDSFRKALLSSLAGE

SEQ ID NO: 55145 - protein, 859 aa, Escherichia coli MP021561.2
MSMKELPNWLVHNKGFIKKIEKLTIASVVDQFPSVKASHEKNISDSDISYLLTCGSILSQSNDELCQDAALRISQYCLVNSFSAQRKDSAALILDALANNATVALAIEKGFLSEGFEKRLPIAGQLETMKRKIENTIEIGNDKFIYANKFQSEFWDSAQQSEWISISAPTSVGKSFILESWVEDYIYKREKSLIIYLVPTRALISEVFESILTRLDPNRTGVINIQTLPLRSAYDNSRTNVFIFTQERLNIFYNSLNEKPVVDLLIIDEAHKIGDSLRGIFLQYVLEMTCARNRNIKVIFASPFTSNPELLLLDAPYKGKTSVIKSSYVTVNQNLIWVEQRPNTPKKWRMYFFFRGERKFIGDFELENTPSSDSKRLSFIALTLGRHVSGNVVYVNGAADAEKTAKQIADGLEQYTEDEDVLNLIELSEKVIHERFALNVTLRKRVAFHYGNMPLIIKTEIERLFSKGKIKYLICTSTLVEGVNLACKNIFIRGPKKGSGKPMQEDDFWNLAGRAGRWGKEFQGNVICVDTNNERIWNGTPPVSKKNIKIIRATDSLHDEIDSIYEYIDSPYHYGMTRANPRLQGLFSYLCISYYLHDGLIFNPYFEKYNLENLDELDAKITNVLDLLSFPLEVVARNPGISPILMQKLWDRFCDCDRENLEKLLLADPSSDDALSSYVAAFRRISDTMSIELGYNSKGTFVLALLVIKWMRGYPLARLISERIDYYKNKNKEYKEPSVIRSVMEDVERVARYQAPKLLSCYNDLLRYFYISEGRADLVEYIDDIGVYLELGVSIKTQISLISLGFSRTSAVMISEYITSDNLDELSCMQWINENSSLLDDLPALVKMEIYSIVNGIEL

SEQ ID NO: 55146 - protein, 300 aa, Escherichia coli 2731150; identical to SEQ ID NO: 55112

SEQ ID NO: 55147 - protein, 726 aa, Escherichia coli 2731150; identical to SEQ ID NO: 55113

SEQ ID NO: 55148 - protein, 300 aa, Escherichia coli 2762100; identical to SEQ ID NO: 55112

SEQ ID NO: 55149 - protein, 726 aa, Escherichia coli 2762100; identical to SEQ ID NO: 55113

SEQ ID NO: 55150 - protein, 345 aa, Escherichia coli KTE35; identical to SEQ ID NO: 55116

SEQ ID NO: 55151 - protein, 849 aa, Escherichia coli KTE35
MNTLANEVINQIKSRLEFKNDLGFLFAHSFLQKHTQTSFSALQGKIESDSVVIYKRLIESAYLFSQSESDEDKNLAQSIAYHLNIITSDNYLKQLSENLLRALGNFPGASYLQEKNGFIPETFYAYLKRSFIENENKVKIANKEIILTNFQKKVWESLHSNVPQAISAPTSAGKSFLVVEMLANRIISGELNSAIYIAPTRALVNEITQKFIKKTLPYQNEVRVTSIPTINDEYYKQIFVLTQERLQVLLDNFKNKIDIVVIDEAQSISDEIRGMILQDCLDKISIQNPDAKYVFLAPGAEGFNDLADIIGIDTIHVEKTNLSPVVQNKIIIKVDPAKENNLQLSLLDNSNILSIGELTSTRGFANENTRLAAVALELGKDEGSLVYGTGAANAEDVAKQIASGLPLLENDSDLKELSKFIKKHVHKDYSLANLVLRGVGYHYGKMPSLLRETLEKNFTNNKLKFLVCTTTLFQGVNLPAKNVFIDTPTRGNRGEALDPASLWNFAGRAGRLGYAFSGNVYLIDYDDWETKPLDSKIDFKITSSFKKVINEDFDTVISRLDKNNHLGVSQYSNVDAAAGLLISRAAKGDLHNFLERSFRTIPDKSKLEIIEDATYSSLESLNIPHNILTLNWTVDPFGQERLYNRFIQKIKDGKIDELIPRHPSGNVYTNYVGVFSRINKYILNHNTSKFSNYLTAMALNWMRGKSLPEIISLSIAKKKEKNSTRPVNVDRAVREVFDFVEDNLRFKYVQLGKAYIDLLRQALIVNNQAEKAEEIYDFPLSLELGVSSIAGQVFIELGLSRISASYLENIIPNSNPTISTAKEWLRNNDYDSLNLPLTIYSELEDKGLL

SEQ ID NO: 55152 - protein, 345 aa, Escherichia coli KTE34; identical to SEQ ID NO: 55116

SEQ ID NO: 55153 - protein, 849 aa, Escherichia coli KTE34; identical to SEQ ID NO: 55151

SEQ ID NO: 55154 - protein, 540 aa, Escherichia coli KTE185; identical to SEQ ID NO: 55132

SEQ ID NO: 55155 - protein, 713 aa, Escherichia coli KTE185; identical to SEQ ID NO: 55133

SEQ ID NO: 55156 - protein, 538 aa, Escherichia coli KTE108; identical to SEQ ID NO: 55102

SEQ ID NO: 55157 - protein, 729 aa, Escherichia coli KTE108
MTEIYEQAKHSLQGEDFSSFNYLFAVNKLLSNPVSYDLGRDLIVRALDSRERFSEHTTILKNMVRKSGLFPYLKKEFTSLTPDDLRVLELYRTPFSDGYVFHSMQFHIFDLLKSGQNVVLSAPTSMGKSAIVDSLLGMGTLKRLVLVVPTVALADETRRRLQERFGDRYQIIHHSSQVCHSDQAVYVLTQERVNERDDIVDIDLFVIDEFYKLAFRQLKSGDIDHQDERVIELNIALSKLLKVSRQFYLTGPFVNSIRGLEKLGYPHTFVSTDFNTVALDVKTFGIKANDDKAKLKALGEIAHACVDATIIYCKSPTVAGLVARELIRLGHGTPTENPHVDWVSEEFDADWDYTVALRNGIGLHFGALPRALQQYTADQFNAGKLRFLLCTSTIIEGVNTIAKNVVIYDNRDGTRSIDKFTHGNIKGRAGRMGVHFVGKIFCLEEIPEDNLNQEVDIPLGIQDIDTPINLLASVQPDHLSEFSQDRFDEVFINDRVSIDLVKKHSYFRVEQFEMLQSMFEMMDDNEFSSLVFHWTPATNFLKTFAKIIARLVPHTFSRNGVPVKPTDVMIAKLAGYLSAESYSEYLKNQIDYARQWISEGEKRTLSIALNNDLKLITNTFGYTLPKVLSLMEDVVKHHAVKRGIRSKVDYTHVKLAFESFHLPPGVNALEEIGIPIQTLHRLVDLLEFSDEADVDELSQYLRDTQDIWSRSIGYVDQMFIRRALGIRRH

SEQ ID NO: 55158 - protein, 297 aa, Escherichia coli HVH 6 (3-8296502); identical to SEQ ID NO: 55128

SEQ ID NO: 55159 - protein, 859 aa, Escherichia coli HVH 6 (3-8296502); identical to SEQ ID NO: 55129

SEQ ID NO: 55160 - protein, 313 aa, Escherichia coli HVH 82 (4-2209276)
MDALHVALENLIRDDGQTLNSYFSEVKVNSLIENTNATCHFHCLNLDGNGRPRVDALIQFLNDKVVDYAIPRKKINEAVQYFNETQSTAKITKLANQAKKLFTRLANSGEGGEFILFLFAEQFLRFPQIICKMSLKTSSQMHYHGADGIHIGVDKDNKKLCLYWGESKLYSNLSKGISECMDSIAPLLQSSMGIEGAETRDMQLLESHLNVDDIELEQALKRFLDPDSPDFNKLEYRGICLVGFDLKDYPQGPSSIDISELVALINTKVGKWSTSVQGGIVNKKLDRFAMHVFILPFPSVKAFRASLIKALES

SEQ ID NO: 55161 - protein, 860 aa, Escherichia coli HVH 82 (4-2209276)
MSLRDLSGWLIKNQGFLRKYQALVANSIKDQFPELKSDVIPQISSEDVGYLLTCASSLAFSSDEKCQDAALRIAQYCLLNEKSEARKDSAALILDSLSNNPAIQLAENRGYLNPDFEERLPLKAQLELTKRKILYTIEIDADKHIYANRFQSEFWDAVQENSWVSVSAPTSVGKSFILESWVEQFVKRNKNCLVIYIVPTRALISEVYSELQKRLDPNLTNIVNIQTLPLSNVYQSEKSNVFIFTQERLNLFYNHFSQIPKIDVLVVDEAHKIGDGGRGVILQHVIELTCLNNPDSKVIFASPFTLNPEILLSDAPILKNKRTIKSDYVTVNQNLIWVEQKPRKTKDWLMYYFANGEKRELGNFSLENAPSPESKRLPFVALCLGKGASGNVVYVNGAAEAESTSKLISASIENETEDEEILALVELSETIIHKNFALNRTLKKRVAFHYGNMPLIIKGEIERLFSKGKIDFLICTSTLVEGVNMACKNIFIRGPKKGNSTPMREEDFWNLAGRAGRWGKEFQGNVICIDSDNEKIWNGEPPKTKKNIFITRATDAISHDMDKLVSYIFSEHHFGMSERNPNLQSLFSYLCSSFYFYNGLDNNPYMEKYNIKNIDVLNEAIFDVFDSLTFPHELVVRHPGISPLLMQNLWDRFSRDTNKPVERLLLSEPGSNDALDSYVSAFSRISDTLSKKLGYNSKGAYVQALLVSKWMKGYPLARLISDRIRYNKKKNIVFKEATLIRGVMKDVEEIARYQAPRLLGCYNDLLKSFYLSIDRTDLAKDVEDIGVYLELGVSLKTQISLIGLGFSRTAAVMISELIPNDSLDEEECINWIKDNKVDMEELPQLVQNEIHNIFRNFWVQ

SEQ ID NO: 55162 - protein, 297 aa, Escherichia coli KOEGE 118 (317a); identical to SEQ ID NO: 55128

SEQ ID NO: 55163 - protein, 859 aa, Escherichia coli KOEGE 118 (317a); identical to SEQ ID NO: 55129

SEQ ID NO: 55164 - protein, 313 aa, Escherichia coli KOEGE 131 (358a); identical to SEQ ID NO: 55160

SEQ ID NO: 55165 - protein, 860 aa, Escherichia coli KOEGE 131 (358a); identical to SEQ ID NO: 55161

SEQ ID NO: 55166 - protein, 300 aa, Escherichia coli UMEA 3212-1
MNAEDTNSLHKIYNPVYGLSNIVLLAKECQSTDPVKVNLLCLGFKEDLPKDKELAETLFLELVHYCIPHPVLVKRKELARSEGKDEARLYSELAREARSLFMKYKLESAVKIKNGEPPEKFEQRVKNANLRYGEVGELISYCIAIHFLKASQLVSKMALKTSSEVPVFGLDGIHATIDSKGTLTVFYLESKMTREFDSGSEQFSKSVSGFESDRNSRRNEYRILQDLSNLESLEGEERKKAIQYFDPYSNESSNVRERFVRIIAYNEESYKSKIAIDDESPLSIHLDHFKKITSALLKKK

SEQ ID NO: 55167 - protein, 726 aa, Escherichia coli UMEA 3212-1; identical to SEQ ID NO: 55113

SEQ ID NO: 55168 - protein, 538 aa, synthetic Escherichia coli C321.deltaA; identical to SEQ ID NO: 55102

SEQ ID NO: 55169 - protein, 729 aa, synthetic Escherichia coli C321.deltaA; identical to SEQ ID NO: 55103

SEQ ID NO: 55170 - protein, 346 aa, Escherichia coli 113302
MKSEDTNSLHKIYNPVYGLDNIVLLAQECQSTDPVKVNLLCLGFKEDLPKDKELAETLFLELVHYCIPHPVIAKRKALSQTEGKDEARLYSELAREARSLFMKYKLESTLTIKKGETQEKFEQRVKNANLRYGEVGELISYCIAIHFLKAAQLVSKMALKTSSEMPVFGLDGIHATVDDEGTLTVFYLESKMTREFTSGSEQFSKSVSGFENDRKSRRNEYRILQDLSNLESLEGEERKKAVQYFDPYSSESSNVRERFVGIIVYNEEAYKNKIAIDDESPLSIHLDHFKKSYIGSYKDKVKIITEDLSKAGATPQKCRAYIFALPDVDAFKLDFAKELSGEHFSS

SEQ ID NO: 55171 - protein, 849 aa, Escherichia coli 113302
MNTLAHEVINQIKSRLEFKNDLGFLFAHSFLQKHTQTSFSALQGKIESDSVVIYKRLIESAYLFSQSESDEDKNLAQSIAYHLNIITSDNYLKQLSENLLRALGNFPGASYLQEKNGFIPETFYAYLKRSFIENENKVKIANKEIILTNFQKKVWESLHSNVPQAISAPTSAGKSFLVVEMLANRIISGELNSAIYIAPTRALVNEITQKFINKTLPYQNEVRVTSIPTINDEYYKQIFVLTQERLQVLLDNFKNKIDIVVIDEAQSISDEIRGMILQDCLDKISIQNPDAKYVFLAPGAEGFNDLADIIGIDTIHVEKTNLSPVVQNKIIIKVDPAKENNLQLSLLDNSNILSIGELTSTRGFANENTRLAAVALELGKDEGSLVYGTGAANAEDVAKQIASGLPLLENDSDLKELSKFIKKHVHKDYSLANLVLRGVGYHYGKMPSLLRETLEKNFTNNKLKFLVCTTTLFQGVNLPAKNVFIDTPTRGNRGEALDPASLWNFAGRAGRLGYAFSGNVYLIDYDDWETKPLDSKIDFKITSSFKKVINEDFDTVISRLDKNNHLGVSQYSNVDAAAGLLISRAAKGDLHNFLERSFRTIPDKSKLEIIEDATYSSLESLNIPHNILTLNWTVDPFGQERLYNRFIQKIKDGKIDELIPRHPSGNVYTNYVGVFSRINKYILNHNTSKFSNYLTAMALNWMRGKSLPEIISLSIAKKKEKNSTRPVNVDRAVREVFDFVEDNLRFKYVQLGKAYIDLLRQALIVNNQAEKAEEIYDFPLSLELGVSSIAGQVFIELGLSRISASYLENIIPNSNPTISTAKEWLRNNDYDSLNLPLTIYSELEDKGLL

SEQ ID NO: 55172 - protein, 300 aa, Escherichia coli ECA-727; identical to SEQ ID NO: 55112

SEQ ID NO: 55173 - protein, 398 aa, Escherichia coli ECA-727
  MOD_RES (395)..(395): Any amino acid
MFSQSESDEDKNLAQSIAYHLNVVTGDDYLKQMSENLLRVLGNFPGATYLQQENGFIPESFYAFLKRSFIENENKIKISNKEITLTNFQKRVWESLHSNVPQAISAPTSAGKSFLVVEMLANGIISGELNSAIYIAPTRALVNEITQKFIIKTLPYQNEVRVTSIPTINNEYNKQIFVLTQERLQVLLDNFEEKIDLVVIDEAQSISDEIRGMILQDCLDKISTQNPNAKYVFLAPGAEGFDDLADIIGIDAIHIEKTNLSPVVQNKIIVKVDPSKENNLQLSLLDNSDILPIGEIESTRGFANENTRLAAVALELGKNEGSLVYGTGAENAEDVAKQISSGLPLLEDDSELQELSKFIKKHVHEDYSLANLVLRGVGYHYGKMPSLLRETLEKXLHE

SEQ ID NO: 55174 - protein, 538 aa, Escherichia coli str. K-12 substr. MC4100; identical to SEQ ID NO: 55102

SEQ ID NO: 55175 - protein, 729 aa, Escherichia coli str. K-12 substr. MC4100; identical to SEQ ID NO: 55103

SEQ ID NO: 55176 - protein, 314 aa, Escherichia coli LAU-EC7; identical to SEQ ID NO: 55144

SEQ ID NO: 55177 - protein, 859 aa, Escherichia coli LAU-EC7; identical to SEQ ID NO: 55145

SEQ ID NO: 55178 - protein, 313 aa, Escherichia coli
MDALHVALENLIRDDGQTLNSYFSEVKVNSLIENTNATCHFHCLNLDGNGRPRVDALIQFLNDKVVDYAIPRKKINEAVQYFNETQSTAKITKLANKAKKLFTRLANSGEGGEFILFLFAEQFLRFPQIICKMSLKTSSQMHYHGADGIHIGVDKDNKKLCLYWGESKLYSNLSKGISECMDSIAPLLQSSMGIEGAETRDMQLLESHLNVDDIELEQALKRFLDPDSPDFNKLEYRGICLVGFDLKDYPQGPSSIDISELVALINTKVGKWSTSVQGGIVNKKLDRFAMHVFILPFPSVKAFRASLIKALES

SEQ ID NO: 55179 - protein, 860 aa, Escherichia coli; identical to SEQ ID NO: 55161

SEQ ID NO: 55180 - protein, 300 aa, Escherichia coli O25:NM str. E2539C1; identical to SEQ ID NO: 55112

SEQ ID NO: 55181 - protein, 726 aa, Escherichia coli O25:NM str. E2539C1; identical to SEQ ID NO: 55113

SEQ ID NO: 55182 - protein, 345 aa, Escherichia coli 3-373-03_S3_C1; identical to SEQ ID NO: 55116

SEQ ID NO: 55183 - protein, 849 aa, Escherichia coli 3-373-03_S3_C1; identical to SEQ ID NO: 55117

SEQ ID NO: 55184 - protein, 345 aa, Escherichia coli 3-073-06_S4_C1; identical to SEQ ID NO: 55116

SEQ ID NO: 55185 - protein, 849 aa, Escherichia coli 3-073-06_S4_C1
MNTLANEVINQIKSRLEFKNDLGFLFAHSFLQKHTQTSFSALQGKIESDSVVIYKRLIESAYLFSQSESDEDKNLAQSIAYHLNIITSDNYLKQLSENLLRALGNFPGASYLQEKNGFIPETFYAYLKRSFIENENKVKIANKEIILTNFQKKVWESLHSNVPQAISAPTSAGKSFLVVEMLANRIISGELNSAIYIAPTRALVNEITQKFIKKTLPYQNEVRVTSIPTINDEYYKQIFVLTQERLQVLLDNFKNKIDIVVIDEAQSISDEIRGMILQDCLDKISIQNPDAKYVFLAPGAEGFNDLADIIGIDTIHVEKTNLSPVVQNKIIIKVDPAKENNLQLSLLDNSNILSIGELTSTRGFANENTRLAAVALELGKDEGSLVYGTGAANAEDVAKQIASGLPLLENDSDLKELSKFIKKHVHKDYSLANLVLRGVGYHYGKMPSLLRETLEKNFTNNKLKFLVCTTTLFQGVNLPAKNVFIDTPTRGNRGEALDPASLWNFAGRAGRLGYAFSGNVYLIDYDDWETKPLDSKIDFKITSSFKKVINEDFDTVISRLDKNNHLGVSQYSNVDAAAGLLISRAAKGDLHNFLERSFRTIPDKSKLEIIEDATYSSLESLNIPHNILTLNWTVDPFGQERLYNRFIQKIKDGKIDELIPRHPSGNVYTNYVGVFSRINKYILNHNTSKFSNYLTAMALNWMRGKSLPEIISLSIAKKKEKNSTRPVNVDRAVREVFDFVEDNLRFKYVQLGKAYIDLLRQALIVNNQAEKAEEIYDFPLSLELGVSSIAGQVFIELGLSRISASYLENIIPNSNPTISTAKEWLRNNDYDSLNLPLTIYSELEDKELL

SEQ ID NO: 55186 - protein, 300 aa, Escherichia coli 2-210-07_S3_C1; identical to SEQ ID NO: 55112

SEQ ID NO: 55187 - protein, 726 aa, Escherichia coli 2-210-07_S3_C1
MNTLAAEIISQIKKHLEFKNDLSFLFAHSFLQNHKRTSFATKQSKIGDENIVIYKRLIESAYLFSQSESDEDKNLAQSIAYHLNVVTGDDYLKQMSENLLRVLGNFPGATYLQQENGFIPESFYAFLKRSFIENENKIKISNKEITLTNFQKRVWESLHSNVPQAISAPTSAGKSFLVVEMLANGIISGELNSAIYIAPTRALVNEITQKFIIKTLPYQNEVRVTSIPTINNEYNKQIFVLTQERLQVLLDNFEEKIDLVVIDEAQSISDEIRGMILQDCLDKISTQNPNAKYVFLAPGAEGFDDLADIIGIDAIHIEKTNLSPVVQNKIIVKVDPSKEKNLQLSLLDNSDILPIGEIESTRGFANENTRLAAVALELGKNEGSLVYGTGAENAEDVAKQISSGLPLLEDDSELQELSKFIKKHVHEDYSLANLVLRGVGYHYGKMPSLLRETLEKNFTNNKLKFLVCTTTLFQGVNLPAKNVFIDTPTRGNRGEKLDPASLWNFAGRAGRLGYAFSGNVYLIDYDDWVTKPLDSKIDFKITSSLKKVINEDFDTVISRLDKNNHSGVTPYSNIDAAAGLLISRAAKGDLHNFLKRSFRTLSDKSKLETIDNATYISLESLKIPHEVLTLNWTVDPFGQERLYNRFIQKIKEGKVDELIPRHPSGDVYKNYVGVFSRINKYILNHNTSKFSNYLTSIALNWMRGKSLPEIISLSINKKKEKNPLGL

SEQ ID NO: 55188 - protein, 300 aa, Escherichia coli 3-020-07_S1_C1
MNAEDTNSLHKIYNPVYGLSNIVLLAKECQSTDPVKVNLLCLGFKEDLPKDKELAETLFLELVHYCIPHPVLVKRKELARSEGKDEARLYSELAREARSLFMKYKLESAVKIKNGDPPEKFEQRVKNANLRYGEVGELISYCIAIHFLKASQLVSKMALKTSSEMPVFGLDGIHATIDSKGTLTVFYLESKMTREFDSGSEQFSKSVSGFESDRNSRRNEYRILQDLSNLESLEGEERKKAIQYFDPYSNESSNVRERFVRIIAYNEESYKSKIAIDDESPLSIHLDHFKKITSALLKKK

SEQ ID NO: 55189 - protein, 726 aa, Escherichia coli 3-020-07_S1_C1; identical to SEQ ID NO: 55113

SEQ ID NO: 55190 - protein, 300 aa, Escherichia coli 3-020-07_S1_C2; identical to SEQ ID NO: 55188

SEQ ID NO: 55191 - protein, 726 aa, Escherichia coli 3-020-07_S1_C2; identical to SEQ ID NO: 55113

SEQ ID NO: 55192 - protein, 300 aa, Escherichia coli 3-020-07_S1_C3; identical to SEQ ID NO: 55188

SEQ ID NO: 55193 - protein, 726 aa, Escherichia coli 3-020-07_S1_C3; identical to SEQ ID NO: 55113

SEQ ID NO: 55194 - protein, 345 aa, Escherichia coli 3-073-06_S4_C3; identical to SEQ ID NO: 55116

SEQ ID NO: 55195 - protein, 849 aa, Escherichia coli 3-073-06_S4_C3
MNTLANEVINQIKSRLEFKNDLGFLFAHSFLQKHTQTSFSALQGKIESDSVVIYKRLIESAYLFSQSESDEDKNLAQSIAYHLNIITSDNYLKQLSENLLRALGNFPGASYLQEKNGFIPETFYAYLKRSFIENENKVKIANKEIILTNFQKKVWESLHSNVPQAISAPTSAGKSFLVVEMLANRIISGELNSAIYIAPTRALVNEITQKFIKKTLPYQNEVRVTSIPTINDEYYKQIFVLTQERLQVLLDNFKNKIDIVVIDEAQSISDEIRGMILQDCLDKISIQNPDAKYVFLAPGAEGFNDLADIIGIDTIHVEKTNLSPVVQNKIIIKVDPAKENNLQLSLLDNSNILSIGELTSTRGFANENTRLAAVALELGKDEGSLVYGTGAANAEDVAKQIASGLPLLENDSDLKELSKFIKKHVHKDYSLANLVLRGVGYHYGKMPSLLRETLEKNFTNNKLKFLVCTTTLFQGVNLPAKNVFIDTPTRGNRGEALDPASLWNFAGRAGRLGYAFSGNVYLIDYDDWETKPLDSKIDFKITSSFKKVINEDFDTVISRLDKNNHLGVSQYSNVDAAAGLLIFRAAKGDLHNFLERSFRTIPDKSKLEIIEDATYSSLESLNIPHNILTLNWTVDPFGQERLYNRFIQKIKDGKIDELIPRHPSGNVYTNYVGVFSRINKYILNHNTSKFSNYLTAMALNWMRGKSLPEIISLSIAKKKEKNSTRPVNVDRAVREVFDFVEDNLRFKYVQLGKAYIDLLRQALIVNNQAEKAEEIYDFPLSLELGVSSIAGQVFIELGLSRISASYLENIIPNSNPTISTAKEWLRNNDYDSLNLPLTIYSELEDKELL

SEQ ID NO: 55196 - protein, 546 aa, Escherichia coli 7-233-03_S1_C2
MSALDTMVQSDSGGVGAKKGFFYQDLAAAFYLTQMLIDKTLKYVRCEVTDDIDLVYEEHIEYIQVKTTDSDSKWTLAELCKTKNTAKNDSIIHKSLSCDNNSSYIAKFKILSPREVNSYLQYLRIPLNKRDNKDGRVGLLKSLVPKVKSKSPLGNDIAYWIDNTWWEVIPSKNELELMILRNIRVAAQEKDIFLKDRHERAILQSIVYVLTDKSALSRKINVSEDKSYLRKDFISWFWDEVEYASKDDTHSLKVYPQKLDKVDYILQEYNQCFEDDNYKNLIGKFFYQDYELFRYRFGYIVEGVYNWLPEVLLSPEELSNINGTNFQEKIDLLKTRMALKEKEVPSLLPRVTLHSIIRKNNLSQPIYSANLYVDSNKDRVTIYDNVHIVINNDDPDELWVGFSEILDDDNFSTTISKLKCDFIDNFLNNFQNHKKVILDVKKDNFLFKHDVDPYLKGTSSIDNLFNMIHFVVFIGYKTKNQPLEYDESEDEAYVPQLLAEVREHFEMLASEIVTEKIYKKINLHFYLYPIPCVETLVKEFEKRINQ

SEQ ID NO: 55197 - protein, 709 aa, Escherichia coli 7-233-03_S1_C2
MNDQSERLFFESDFNPFEFLKIANEKMDNKLTEVDGREMVIRALNDMDMFAKYRDILKRLVRKSGLLPYLRSEFHDLDYEERMAIDLFTPVKDSDFTLHSMQLKIYNILIEGTNVVLSAPTSMGKSAVVDTLIESGKYDVIVIIVPTIALIDETRKRLNTKFRSDYDIIHHSIQTVRKSKNIFVLTQERFNERNDIESVDLFVMDEFYKLSFKKDLEDERVISLNIALSKLLSISKQFYLIGPFIEDIRGLSDVAPDFYYVNTNFNTVAVNIYEFNLAANDVSAKGDKTIEILKKYDGQTIIYCRSPNSASEIVKRLISEEVTSVFSSEYVSWVKDNFTPEWDYAQAIEHGIGIHHGNLPRALQQTTVDLFNNAFIKILICTSTIIEGVNTSAENIIIFDNRNGVGSIDRFTHSNIKGRAGRMGKHFVGNVFCLEAPPLSDYSSSIVDIPLGTQENSTPINLLAGVQEVHLKDESYKRLDDYYNSCKAPIDLLKAHPEYSFDKIQYLYEFLGECQYDVLKELSFKHLPTSKAMWLLSSLFLYIEQGAVRNAGFKIDEEVISAKFFSYVNANTFQEYLRSEITWIKENRDDVSKALNSELKFIKNIYGYSLPKFLNLAQDIVNTINYENKYDFSADYGFLASQIENYHLNPSFAVLEEMGIPVQLLERLSSDIKEALELEDLIEKVKVFYREGTYFSELESYFVKRALID

SEQ ID NO: 55198 - protein, 546 aa, Escherichia coli 7-233-03_S1_C3; identical to SEQ ID NO: 55196

SEQ ID NO: 55199 - protein, 709 aa, Escherichia coli 7-233-03_S1_C3; identical to SEQ ID NO: 55197

SEQ ID NO: 55200 - protein, 345 aa, Escherichia coli 7-233-03_S3_C2; identical to SEQ ID NO: 55116

SEQ ID NO: 55201 - protein, 849 aa, Escherichia coli 7-233-03_S3_C2; identical to SEQ ID NO: 55185

SEQ ID NO: 55202 - protein, 313 aa, Escherichia coli; identical to SEQ ID NO: 55178

SEQ ID NO: 55203 - protein, 860 aa, Escherichia coli; identical to SEQ ID NO: 55161

SEQ ID NO: 55204 - protein, 538 aa, Escherichia coli KLY; identical to SEQ ID NO: 55102

SEQ ID NO: 55205 - protein, 729 aa, Escherichia coli KLY; identical to SEQ ID NO: 55103

SEQ ID NO: 55206 - protein, 538 aa, Escherichia coli BW25113; identical to SEQ ID NO: 55102

SEQ ID NO: 55207 - protein, 729 aa, Escherichia coli BW25113; identical to SEQ ID NO: 55103

SEQ ID NO: 55208 - protein, 538 aa, Escherichia coli; identical to SEQ ID NO: 55102

SEQ ID NO: 55209 - protein, 729 aa, Escherichia coli; identical to SEQ ID NO: 55103

SEQ ID NO: 55210 - protein, 538 aa, Escherichia coli; identical to SEQ ID NO: 55102

SEQ ID NO: 55211 - protein, 729 aa, Escherichia coli; identical to SEQ ID NO: 55103

SEQ ID NO: 55212 - protein, 538 aa, Escherichia coli NCTC 50110; identical to SEQ ID NO: 55102

SEQ ID NO: 55213 - protein, 729 aa, Escherichia coli NCTC 50110; identical to SEQ ID NO: 55103

SEQ ID NO: 55214 - protein, 313 aa, Escherichia coli; identical to SEQ ID NO: 55160

SEQ ID NO: 55215 - protein, 860 aa, Escherichia coli; identical to SEQ ID NO: 55161

SEQ ID NO: 55216 - protein, 300 aa, Escherichia coli; identical to SEQ ID NO: 55112

SEQ ID NO: 55217 - protein, 179 aa, Escherichia coli
MNTLAAEIISQIKKHLEFKNDLSFLFAHSFLQNHKRTSFATKQSKIGDENIVIYKRLIESAYLFSQSESDEDKNLAQSIAYHLNVVTGDDYLKQMSENLLRVLGNFPGATYLQQENGFIPESFYAFLKRSFIENENKIKISNKEITLTNFQKRVWESLHSNVPQAISAPTSAGKSFLVV

SEQ ID NO: 55218 - protein, 297 aa, Escherichia coli; identical to SEQ ID NO: 55128

SEQ ID NO: 55219 - protein, 859 aa, Escherichia coli; identical to SEQ ID NO: 55129

SEQ ID NO: 55220 - protein, 538 aa, Escherichia coli ER2796; identical to SEQ ID NO: 55102

SEQ ID NO: 55221 - protein, 729 aa, Escherichia coli ER2796; identical to SEQ ID NO: 55103

SEQ ID NO: 55222 - protein, 538 aa, Escherichia coli K-12; identical to SEQ ID NO: 55102

SEQ ID NO: 55223 - protein, 729 aa, Escherichia coli K-12; identical to SEQ ID NO: 55103

SEQ ID NO: 55224 - protein, 293 aa, Escherichia coli
MDDSIKIRINNQIFKYEVRLPSSGVDDNTFTLDFFDGKYRQDDLVGLIRDVVPYFSLTADEMKELDPSEINKRSFTRISDARRQAKGDYGELMLFLILSIFYDVPKFVTKARLRSTTREQIKGFDCAHFSVDNGKITLWLGEAKFHQSISGAISSALSSLSEHLNDKSRIASELKLLGGEIEINKTLDKNLYLQLKSYVDGGKSLDSVEIAVPVLLTYDSKYILQCCGKGKVIINQDPFLSELGTELTKHFQDIYKKSWPKDSNIKLVFFLFPFEDIAKLKEKIELVEQAMKF

SEQ ID NO: 55225 - protein, 744 aa, Escherichia coli
MSIENFEMELDKIKNSKGKKINLVEDFLIDIYRRLDHTENYNSCIKAICHIANLQLEDAMVQQLLHDCIIKSRIFLYDDMLGNSDIGYNPNISPQDIFLKSFYTSSVSETTLTKPQKEIFNEFQKSRRLIVSAPTSFGKTRIIREIISHNEYKMVVIIMPTVSLLSEAYNDFKHEFSDRYIVSKSSKIKIEEKKEYILILTPERMSVLMQDNINLRVDFFVMDEIYKADYKLNDDRYKVFADILYRLTKSGADLYLIGPYISAFSEKFRSKFKIKMLRYDIEIVQKDYYELDVVSRRGSHLIEGVDIRVVGDKYKNLKKITGNDKIDGKYLIYRYQKQYVESLAEKFIKDLDDKEYNRSLVDYLENNISKSWSLVQCLKKGVAFHHGAMPRHIQDLLIDEFNKNNEEGVKYLFCTTSLTEGVNSTAKNVVLYDLKIGDGNQIKSLDRRNIEGRAGRFMQHFLGRVFYFDHVDRDINEDTNVEIEFVDSSNPDIETLVQLSESDISEDSRNKYKSFVEYLSGLNIPLNLLKDNKFVDISGQITLIEHLRNDVNFANYHYSTQYPVIEKLESILSIIYDCLFTKSNRGRNFDGDIGKKILLDLTKYYIYKQPSFPVLLNSGTLKYLREKENARIRLTFDLITKYFEFIWPRYIKAFESLFNFVAGEKGTKNISLDYIVSLLEYGTNNNHEIILRDAGIPREIIIKISTIFFNCESYQDVQSTYKKRRGEIINKLSNIELRILDKYI

SEQ ID NO: 55226 - protein, 313 aa, Escherichia coli; identical to SEQ ID NO: 55160

SEQ ID NO: 55227 - protein, 860 aa, Escherichia coli; identical to SEQ ID NO: 55161

SEQ ID NO: 55228 - protein, 538 aa, Escherichia coli; identical to SEQ ID NO: 55102

SEQ ID NO: 55229 - protein, 729 aa, Escherichia coli; identical to SEQ ID NO: 55103

SEQ ID NO: 55230 - protein, 538 aa, Escherichia coli; identical to SEQ ID NO: 55102

SEQ ID NO: 55231 - protein, 729 aa, Escherichia coli; identical to SEQ ID NO: 55103

SEQ ID NO: 55232 - protein, 538 aa, Escherichia coli K-12; identical to SEQ ID NO: 55102

SEQ ID NO: 55233 - protein, 729 aa, Escherichia coli K-12; identical to SEQ ID NO: 55103

SEQ ID NO: 55234 - protein, 538 aa, Escherichia coli K-12; identical to SEQ ID NO: 55102

SEQ ID NO: 55235 - protein, 729 aa, Escherichia coli K-12; identical to SEQ ID NO: 55103

SEQ ID NO: 55236 - protein, 538 aa, Escherichia coli K-12; identical to SEQ ID NO: 55102

SEQ ID NO: 55237 - protein, 729 aa, Escherichia coli K-12; identical to SEQ ID NO: 55103

SEQ ID NO: 55238 - protein, 538 aa, Escherichia coli K-12; identical to SEQ ID NO: 55102

SEQ ID NO: 55239 - protein, 729 aa, Escherichia coli K-12; identical to SEQ ID NO: 55103

SEQ ID NO: 55240 - protein, 538 aa, Escherichia coli K-12; identical to SEQ ID NO: 55102

SEQ ID NO: 55241 - protein, 729 aa, Escherichia coli K-12; identical to SEQ ID NO: 55103

SEQ ID NO: 55242 - protein, 538 aa, Escherichia coli K-12; identical to SEQ ID NO: 55102

SEQ ID NO: 55243 - protein, 729 aa, Escherichia coli K-12; identical to SEQ ID NO: 55103

SEQ ID NO: 55244 - protein, 538 aa, Escherichia coli K-12; identical to SEQ ID NO: 55102

SEQ ID NO: 55245 - protein, 729 aa, Escherichia coli K-12; identical to SEQ ID NO: 55103

SEQ ID NO: 55246 - protein, 538 aa, Escherichia coli K-12; identical to SEQ ID NO: 55102

SEQ ID NO: 55247 - protein, 729 aa, Escherichia coli K-12; identical to SEQ ID NO: 55103

SEQ ID NO: 55248 - protein, 538 aa, Escherichia coli K-12; identical to SEQ ID NO: 55102

SEQ ID NO: 55249 - protein, 729 aa, Escherichia coli K-12; identical to SEQ ID NO: 55103

SEQ ID NO: 55250 - protein, 538 aa, Escherichia coli; identical to SEQ ID NO: 55102

SEQ ID NO: 55251 - protein, 729 aa, Escherichia coli; identical to SEQ ID NO: 55103

SEQ ID NO: 55252 - protein, 538 aa, Escherichia coli; identical to SEQ ID NO: 55102

SEQ ID NO: 55253 - protein, 729 aa, Escherichia coli; identical to SEQ ID NO: 55103

SEQ ID NO: 55254 - protein, 538 aa, Escherichia coli; identical to SEQ ID NO: 55102

SEQ ID NO: 55255 - protein, 729 aa, Escherichia coli; identical to SEQ ID NO: 55103

SEQ ID NO: 55256 - protein, 538 aa, Escherichia coli; identical to SEQ ID NO: 55102

SEQ ID NO: 55257 - protein, 729 aa, Escherichia coli; identical to SEQ ID NO: 55103

SEQ ID NO: 55258 - protein, 538 aa, Escherichia coli; identical to SEQ ID NO: 55102

SEQ ID NO: 55259 - protein, 729 aa, Escherichia coli; identical to SEQ ID NO: 55103

SEQ ID NO: 55260 - protein, 538 aa, Escherichia coli K-12; identical to SEQ ID NO: 55102

SEQ ID NO: 55261 - protein, 729 aa, Escherichia coli K-12; identical to SEQ ID NO: 55103

SEQ ID NO: 55262 - protein, 300 aa, Escherichia coli; identical to SEQ ID NO: 55112

SEQ ID NO: 55263 - protein, 726 aa, Escherichia coli; identical to SEQ ID NO: 55113

SEQ ID NO: 55264 - protein, 300 aa, Escherichia coli; identical to SEQ ID NO: 55112

SEQ ID NO: 55265 - protein, 726 aa, Escherichia coli; identical to SEQ ID NO: 55113

SEQ ID NO: 55266 - protein, 538 aa, Escherichia coli; identical to SEQ ID NO: 55102

SEQ ID NO: 55267 - protein, 729 aa, Escherichia coli; identical to SEQ ID NO: 55103

SEQ ID NO: 55268 - protein, 310 aa, Escherichia coli
MRCNVMNFQILIDDTFINTCGDVLSPSNNKSILSLVNDFEDGKWRYKNFHLFIWDNIAETSLSSKERAALIDCSASLISAAAENLRLVDKENDISKGSELAEIMLYGIMKHHYGALPIVPKIFYKQNSQDNAKGADSVHLVLHGDDDFTLWFGEAKFYNSIEDARLSSIINSVGDALRTDKLRKENSIITNINDIDLLISNVDLRRRIKEALSPKNSIDLLKPKIHVPIFILHECQLTKVATSMSSDYIDDIVEYHKNRAIAFFKKQVELLKDVYLYNDISFHIILFPVPDKAMIVDKFVEKVEFHKGEF

SEQ ID NO: 55269 - protein, 704 aa, Escherichia coli
MDVFHKCFEINELITNGDETGARNEIIKLLDYCQNKELPLTPLINNLIRQVGLYPYLQIETSAWQDRFIYEAFKVNVGEKKQVTLHREQSAILKKLINGKNLAVSAPTSFGKSFIIDAFIAIKKPKNVVIIVPTIALTDETRRRLHKKFSGKYKVITTTEIILDEYNIFIFPQERAIHYVDKLDEIDMLIVDEFYKASSAFDKERSPALINAIIKLGSKAKQKYFLAPNISTLKDNFFTKGMDFVSVDFNTVFLEHHKLYENINGDELLKSEALLKILDNTNGKTLIYAGTFPNISNISNLIIDQQPVKNKKLLADFHAWLSKNYDSNWQLTKLIKRGTGLHNGRLHRSLSQIQIRLFEEPDGIKNLVSTSSIIEGVNTSAENVVLWSNKSGRGRAKINDFSYRNIIGRGGRMFRHFVGKIYILEKPPENEDIQLNLTFPDELIGSIDLDEFKSELSKEQISKIIAYREEMDEFLGDGGFEKLQLEGRLESSNSFLIRDIAKEIYSNRQSWRGLGYLNSNHPDDWEGYLYKVIKLSPGGWGAEYNKIVAFVKIISKNWICSIPELLEELKDYDIGIEQFFELERNVTFKLASLLNDVNIIQEKILKEGIDISPFIKKVSNAFLPPLVYQLEEYGLPRMLSRVINNSNIIILDDKEKELHDILANFVDLSKDNNKLDCLFDSFDKYIFKYFIDGILTDEDNHVIT

SEQ ID NO: 55270 - protein, 538 aa, Escherichia coli; identical to SEQ ID NO: 55102

SEQ ID NO: 55271 - protein, 729 aa, Escherichia coli; identical to SEQ ID NO: 55103

SEQ ID NO: 55272 - protein, 538 aa, Escherichia coli; identical to SEQ ID NO: 55102

SEQ ID NO: 55273 - protein, 729 aa, Escherichia coli; identical to SEQ ID NO: 55103

SEQ ID NO: 55274 - protein, 538 aa, Escherichia coli; identical to SEQ ID NO: 55102

SEQ ID NO: 55275 - protein, 729 aa, Escherichia coli; identical to SEQ ID NO: 55103

SEQ ID NO: 55276 - protein, 345 aa, Escherichia coli; identical to SEQ ID NO: 55116

SEQ ID NO: 55277 - protein, 849 aa, Escherichia coli; identical to SEQ ID NO: 55117

SEQ ID NO: 55278 - protein, 538 aa, Escherichia coli; identical to SEQ ID NO: 55102

SEQ ID NO: 55279 - protein, 729 aa, Escherichia coli; identical to SEQ ID NO: 55103

SEQ ID NO: 55280 - protein, 301 aa, Escherichia coli
MKMNNKLKPQLKNHDVIKKVLRKVEVSLLLSDKRKVETLLVYLPIENGESKHSVFFDLIKDELLHNFALTCKEIDRKLKRPSKIAIDQLFKKALSKLSQQTAHGELGELILFTILDVYLQAPRLLSKISLKTSARMPVYGADSIHAQFIKGGLRLYLGESKLYTSFSSAATAAVESIKSASDKYIQEFNLIDSHLDLPELDEDSQEELIRILNPFENTSKLDFIHSPCFIGFADGNLIKDATSDDDFIQRYIHVAFEHIDDYYKKIELQGLDINSTTLFILPFSDIKKLVDSFIAHLEIEK

SEQ ID NO: 55281 - protein, 842 aa, Escherichia coli
MSDFYIELSERILSSNDFKKCSLELFKCYANYLVGDTYKLDRLLVKKMATASQVFYKTQEEKYLKQGSSILSMLIDTCAEDYPEIVPISDFLFSSVGDFPNVKLLENRFPQISFRHNIFTDSSQSYKKALNNVEELGLVLTDFQRNLWDDLQAGEDVITVAPTSAGKTHIILHYLLSEVINSDGAFAAIVVPTRALITEVSSKIFEMAKERGYEKDIEICTIPKDEVFSDRTFFVMTQERLHEILLRGDIYFDFLFIDEAHNISDEGRGVLLHLTLERILEDSSPQIIIGMPSPQYQNSFSSIFKEVKFTKAITAHSPVSKLIFEVRAKGTNLEISKRGSDDKITLPKKFKNKKLADIVLRLGKNESNIIYRNQTNHCEHIADEIAKRITDYEVNDTLNEASEYIQHFIHDDFTLVENIKKGVAFHYSPLPTSVRILIENLVKEGLIKFISCTSTLAEGVNLPAKNLFMLNPTFKNGLYNKTVRIEDVKINNITGRAGRMLHHFSGNIFLVEPDDWTFKDYFDEDDNKKEEKIPTYYKLINENTNEVLRTLTGFQPDDEDHSKFYSVANKLIKSYGNGDLDSTFSSPDIKLDDYTINGLKQVIETAYLNLKVPPLILESNPTTGYIQQNKVFEFLTSEIDLNDWSLPYPWSDEFYDRILKIVFKLIELGVFIPSGNYTADYICYIAKKWVQNNSLKDMINSQIEWDKNNIVKKNSRDDEKEVKINRSVKNIINVINNDIRFRLSNAVKCYFTLFALAARMKKSDAQSIKLHYYLEIGASDERMMSLINLGLSREASKEISDNTSKSRMYNGISDLIQLLNSSEINGIHRVIKKEIEHLLSRS

SEQ ID NO: 55282 - protein, 314 aa, Escherichia coli; identical to SEQ ID NO: 55144

SEQ ID NO: 55283 - protein, 859 aa, Escherichia coli; identical to SEQ ID NO: 55145

SEQ ID NO: 55284 - protein, 538 aa, Escherichia coli KRX; identical to SEQ ID NO: 55102

SEQ ID NO: 55285 - protein, 729 aa, Escherichia coli KRX; identical to SEQ ID NO: 55103

SEQ ID NO: 55286 - protein, 538 aa, Escherichia coli str. K-12 substr. MG1655; identical to SEQ ID NO: 55102

SEQ ID NO: 55287 - protein, 729 aa, Escherichia coli str. K-12 substr. MG1655; identical to SEQ ID NO: 55103

SEQ ID NO: 55288 - protein, 538 aa, Escherichia coli; identical to SEQ ID NO: 55102

SEQ ID NO: 55289 - protein, 729 aa, Escherichia coli; identical to SEQ ID NO: 55103

SEQ ID NO: 55290 - protein, 538 aa, Escherichia coli; identical to SEQ ID NO: 55102

SEQ ID NO: 55291 - protein, 729 aa, Escherichia coli; identical to SEQ ID NO: 55103

SEQ ID NO: 55292 - protein, 538 aa, Escherichia coli; identical to SEQ ID NO: 55102

SEQ ID NO: 55293 - protein, 729 aa, Escherichia coli; identical to SEQ ID NO: 55103

SEQ ID NO: 55294 - protein, 538 aa, Escherichia coli; identical to SEQ ID NO: 55102

SEQ ID NO: 55295 - protein, 729 aa, Escherichia coli; identical to SEQ ID NO: 55103

SEQ ID NO: 55296 - protein, 314 aa, Escherichia coli; identical to SEQ ID NO: 55144

SEQ ID NO: 55297 - protein, 859 aa, Escherichia coli; identical to SEQ ID NO: 55145

SEQ ID NO: 55298 - protein, 297 aa, Escherichia coli; identical to SEQ ID NO: 55128

SEQ ID NO: 55299 - protein, 859 aa, Escherichia coli; identical to SEQ ID NO: 55129

SEQ ID NO: 55300 - protein, 538 aa, Escherichia coli str. K-12 substr. MG1655; identical to SEQ ID NO: 55102

SEQ ID NO: 55301 - protein, 729 aa, Escherichia coli str. K-12 substr. MG1655; identical to SEQ ID NO: 55103

SEQ ID NO: 55302 - protein, 538 aa, Escherichia coli K-12; identical to SEQ ID NO: 55102

SEQ ID NO: 55303 - protein, 729 aa, Escherichia coli K-12; identical to SEQ ID NO: 55103

SEQ ID NO: 55304 - protein, 538 aa, Escherichia coli K-12; identical to SEQ ID NO: 55102

SEQ ID NO: 55305 - protein, 729 aa, Escherichia coli K-12; identical to SEQ ID NO: 55103

SEQ ID NO: 55306 - protein, 538 aa, Escherichia coli str. K-12 substr. MG1655; identical to SEQ ID NO: 55102

SEQ ID NO: 55307 - protein, 729 aa, Escherichia coli str. K-12 substr. MG1655; identical to SEQ ID NO: 55103

SEQ ID NO: 55308 - protein, 538 aa, Escherichia coli; identical to SEQ ID NO: 55102

SEQ ID NO: 55309 - protein, 729 aa, Escherichia coli; identical to SEQ ID NO: 55103

SEQ ID NO: 55310 - protein, 538 aa, Escherichia coli; identical to SEQ ID NO: 55102

SEQ ID NO: 55311 - protein, 729 aa, Escherichia coli; identical to SEQ ID NO: 55103

SEQ ID NO: 55312 - protein, 538 aa, Escherichia coli; identical to SEQ ID NO: 55102

SEQ ID NO: 55313 - protein, 729 aa, Escherichia coli; identical to SEQ ID NO: 55103

SEQ ID NO: 55314 - protein, 300 aa, Escherichia coli; identical to SEQ ID NO: 55112

SEQ ID NO: 55315 - protein, 726 aa, Escherichia coli; identical to SEQ ID NO: 55113

SEQ ID NO: 55316 - protein, 538 aa, Escherichia coli; identical to SEQ ID NO: 55102

SEQ ID NO: 55317 - protein, 729 aa, Escherichia coli; identical to SEQ ID NO: 55103

SEQ ID NO: 55318 - protein, 314 aa, Escherichia coli; identical to SEQ ID NO: 55144

SEQ ID NO: 55319 - protein, 859 aa, Escherichia coli; identical to SEQ ID NO: 55145

SEQ ID NO: 55320 - protein, 297 aa, Klebsiella oxytoca E718
MLLPIRVNKRFLNLFRTLTLDKAPRQSTVNLHVLNIESNSFVYNKLVEELRDLIVCYVHSNRRIAEFEKNHPSFSPKPYLEAIQKFRTYTSNEGELGELLLYAFLESGLNAPKLLSKMELKTDANDYIKGSDGIHLLEIDNNYQLIFGESKMYLDLLEGAREAFDSIADFKANGLRFERGLIDTHVINEMVTEEGYETIKSILLPSGNDGPNLDLSFGVFLGFELPVNDTQLSMKNNEFRDWAYSFVKNNASRVIDTIEKRIIKHKLFGHDFHIYIVPFTDIDITRKKLIQEMLTIG

SEQ ID NO: 55321 - protein, 866 aa, Klebsiella oxytoca E718
MDKNMNEKDIVRKVPLAQRLSMDAYTSSYFKEIYNYISALYDNCLFNNNGIQKPIFIDTTKIEKALRFADILSHSPVETHRTKSFEIISKIAAFHSDDPYFKMIGSAVINRLGIFAADNLISQEVHLPLDREIESSIKKSFQRTSIDGLFFTDKQYELYQSLINSNTLSFAGPTSMGKSFVINEYIKHIIFGNAKKNIVLIVPTRALISQSTLKLKNELRDKIDGNQYKIVTTSYMLRGGIDHSKGYIFVLTPERLVSLISSSPDIIIDYIFVDEAQKLTIKNDTRSLVTYSAIEQTLNLNSSAKLFFSSPNLSNPEVFNDLFNRDHAKVYRSIEGATAQNLYFIDLLNNKFSYVDKNKLIDIDNVNQTYTSANDLIFQINKGKSKIIYTGGIDNTLSRTRGFLRYIKKLQSKKKPQNFDLASQVREFVHNGYELAEAIEYGVAFHFGNLPQAIRDLIEHHFKIGNIDYLFCTSTLLEGVNLPARSVFILTSKKGTRYFEPVDFWNLAGRAGRLAIELAGDIFCVKDESGTWNDKAVKKLILSNKNEIELTPSFYLNDSKRIKELEQIIKTGSTEGIQNSEFLRTLSDMVRIDTLRTDKANNLPLINYFRNNGNNDILHYALKSIGNINIPTHILLANSHIAINSQHNAFNSIKNYSIDELKLSWNPTNDEIKEKLALIFNIYQIDKYSKGLDRLNFNSIPYYAVILSKWMHGNTLSEIISDAIIYYISNKKNIYLSDKTQEPFNQNNSIHITKLVNDTIKDIELKIGYQLQNYISHYCQLLSLIFENNPGANWSQFIEFGSNDPIVWQLQFMGFSRHCAIFLKKNFPKHLKYDQENNQLYILNRAEIKSKVKQNKLYWLEIQALL

SEQ ID NO: 55322 - protein, 178 aa, Klebsiella oxytoca 09-7231
MKTYIINDSEVSRLSVAIQMPDQDDQLWLGLARMIKADDMDTTLEQIREILDETISETVLSAEREIIISLREPLHHQPKADSFNQALHRNSPIDDMLNILCFPILLTYDSAALSSGWFVNYVDNLKKEIETHFSAFTSELSENIKQVKVLIFLVPMESIELLTKAFNARCEKLEELQA

SEQ ID NO: 55323 - protein, 713 aa, Klebsiella oxytoca 09-7231
MNYEIIKNILAKLAEENAKTVDVLLAINTIVNRSNSEWEGRDLVIRALDKFEFFDSVEQSLLLNMVRAVGLFPYITPHLSSMAISDRLAYEAHRVEGVEQGMVFHHLQAHVFSLIMQGRNVVLSASTSVGKSLVIDAVLAQRRFKKVVVIVPTIALIDETRRRLVKRFKDFNLITHPSQESVVDTTNVYLLTQERVIQRPDLADVEFFVLDEFYKIDLGNSPDESTRAVDLSLAFHKLAKTGAQFYMLGPHIQKISGLDDYEYHFIPSDYSTVAVDIQNFNLEMRSEERKEKLLELVTTLDSPTLIYCQAPPSANRVAEYLIQEAGLKPVPETQEIAAWVSKHYHPEWNVAKALSLGIGIHHGGVPRALQQYIVKLFNDGIIKRIICTSTMIEGVNTSAENVIIYDRRLNTSKFDYFTYKNISGRAGRMNKYFIGKVFMLEAPPLEQGLTVEYPIGHQDENSPIGLIMQLENEYLTDISRGRLQDAYANPILSPSTLIENRHVPIERQVEVAEMIIRDLPDGSKLLDWKGIPETNQLNYLCELVYSLEGGNLMDYGISSSLQLMWHINELRTQKNLPAYLRDAVENRREEHTPSEAINLRLKFIRNMVCFRLPRDIMAVSNIQADVLAKIGIEPGDFSFFAEQLENMFLDPLLTALDEYGIPTQISTQIKNLILPSEHLNDLLAKLRALAPRVESLQLTGFEKSLMSWAVSEM

SEQ ID NO: 55324 - protein, 540 aa, Klebsiella pneumoniae 342
MSITSLSDAGGPAARQGFKYQDHVAVSFIFKMLRDSNYSQVECETADDIVAVFQCEGQILNEYIQVKTTESDGKWNLKEITALDGSKANSSLLHKSLKCDVRPGIARFRIVTKRDVAKILEGFKKEIDKRVLPDITTTRGMALCKTFKTFVSPQKRNFLYWAENFVWQVYGDVEALEAVNIKALSQLAEVLGNRPNFTQLKAIYEEFLEIADKAATASVKTAAASKIILRDPTLAYLRKLLDEADDKSTATSKPYKKRPDPFLVEFHANTKEGLLHSFSGFDVRYALKKWRHENYAKHLIEWLPEFSLKASEIVNILAHNAKAILARSISTFSDSELPRDRLIAELILHSILRSRQDSEPVACKVFYKSADKLSEFGNAHIVQMPDQDDQLWLGLARLIKANDMDTTLEQIREILDETISETVLSAEREIIISLREPLHHQPKADSFNQALHRNSPVDDMLNILCFPILLTYDSAALSSGWLTDYVDNLKIEIETHFRTFTSELPENIKQVKVHIFLVPMESIEHLTKAFNSYCEKLEEL

SEQ ID NO: 55325 - protein, 732 aa, Klebsiella pneumoniae 342
MKISRAGHSAADVSRNKAAMNYEKIKNILAKLGEESASTVDVLLAINTIVNRSNSEWEGRDLVIRALDKFKFFDSVEQSLLLNMVRAVGLFPYITPHLSSMAISDRLAYEAHRVEGVEQGMVFHHLQAHVFSLIMQGRNVVLSASTSVGKSLVIDAVLAQRRFKKVVVIVPTIALIDETRRRLVKRFKDFNLITHPSQESVSETTNVYLLTQERVIQRPDLADVEFFVLDEFYKIDLGNATDESTRAVDLSLAFHKLAKTGAQFYMLGPHIQKISGLDDYEYHFIPSDYSTVAVDIQNFNLEMRSEERKEKLLELVTTLDSPTLIYCQAPPSANRVAEYLIQEAGLTPVPETQEIAAWISKHYHPEWNVAKAISLGIGIHHGGVPRALQQYIVKLFNEGIIKRIICTSTMIEGVNTSAENVIIYDRRLKNSTFDYFTYKNISGRAGRMNKYFIGKVFMLEAPPLEQGLTVEYPIGHQDENSPMGLLMQLENEYLTDISRGRLQDAYANPVLSPTTLIENRHVPIERQVEVAEAIIRDLLLSSKLLDWKGIPEPNQLNYLCELVYILEGGNLMDYGISSSSQLVWHINELRTQKNLPAYLRDAVENRRPEHTSSEAINLRLKFIRNMVCFRLPRDIMAVNKIQADVLAKEGSEPGDFSFFAEQLENMFLDPLLTALDEYGIPTQISTQIKNLILPSEHLNDLLAKLRTLAPRVEHLQLTGFEKSLMRWAVSEM

SEQ ID NO: 55326 - protein, 167 aa, Klebsiella pneumoniae subsp. pneumoniae B5055
MIDFDNIHIVIRENDPDEMWFGLSLWCDGNIEKTVSLFASKVLSFVDVTCDTQRKIILDIKSDEYLVKHDVNCVLDPATSITDHLSRIYFVVFIGYISETQTLEVKKDYEENLKEEVLLKFKSIIEELIHNHDSVIDLNFIIYMYPLPCIDSLVDSFKNKMVGDING

SEQ ID NO: 55327 - protein, 204 aa, Klebsiella pneumoniae subsp. pneumoniae B5055
MQMTVFHLLMNGANLALSAPTSMGKSIIIDSLVSCGKYNTIVIVVPTIALIDETRRRLHKKFSNIYEIIYHSAQERNHEKTIYILTQERVNEREDLNEVDIFVIDEFYKLSFKNKTSEKYYDERVISLNVALSKLLTVSKQFYMIGPNIDFLRGLNNINEDFIFLSSDFNTVALNIFEYNILPNNESLKQSTTLSIIEKNNGQF

SEQ ID NO: 55328 - protein, 528 aa, Klebsiella pneumoniae UCICRE 7
MSIDIADKLGVKISYNNKNSSGFICHGDDYSYVLTAKHSICKSSPNDCKFKHKKCDTCVFSGVAKTKVSICKPDTDTFPLCKVKDVLLSPKKDVAILVLNKKSHIDLKTKELPSTKIINTANYNSSHKFVSCGYPAINEHQSVQPLHYNNFSLFRNEKICLQIINDTLTALEDPKNGLSGNSGAGIILNSSSCVGLLGLYTDTGDYGICYGDIVDFSINELLTSSGYVPLEMEEDLSNNFKALIQSDFMECFVRMECDLNLDKNRIVNLYRLCLDGKKYNYVKIGERLIDCIPSFSLSRKQLMRCRERNAFGKATLSAIRNFLKIERKTKISEMLLQGFLESYLHAPKLYSFDEINNAGFHGAHVKFNKNRNVELIHSAAFISNSLSDGVSYAIDVILKAFPELRSLDGLLGNTFLETNFTEDECQILASLLIPGESSYSQGYEDRLAIFIGYNHKIEESLIYENASRFPSLLEQKIILNVQQALEYRKEEINKLSIVNATIDCFFVPFDDVNKFNDEFIESLKNEED

SEQ ID NO: 55329 - protein, 853 aa, Klebsiella pneumoniae UCICRE 7
MKKIDSFIIEKIFNSAYFKKLYKKIIKAYSALTIESENHFNISNTELRDIFRFIDLLANSSNQNARMCAYHWISLLEPFSDKWGKFSLISSLVYSKLGLYALDFNDHALPFSQRLENEAKKSAQTFSNTYIFTDAQFDIYTDMLKSPYYSFSGPTSLGKSFILKRYIEEIIQNSTSNIVILVPTRALISQFSLEIKNELHELIENFNYKIVTHGSLASKSDAVIIKHIFILTPERLLNLFSQGKVVSIDYLFVDEAHKLSNNDDSDVRSLTEYNAIDSALFNNPNMKIVFSSPNIENPEVFLNLFGREKIYASRIIESPVSQNLYLIDFHKKEIKYFSNSECIDIESGSLYTLNKKSDFIYNIGSRHGSNMIYCSSRAKAVDSALEFYQIRLSENIVLSPLLIDSIKKISNYIHPEYYLAMFLMKRIAYHHGQLPQAIRNIVEELFRKGDIDFIFCTPTLVEGVNMPTRNIFINCDDKIRLIADAKKNPNKTLAFWNLAGRAGRYCKELSGNIFCLQDESNRWDNTDIFLEKTAHLTTTIDARIESKSGLREIERYLSDTETDIYKRNQAIEYLANIMAVDTIRFKNNLKDSFVLRKFYDIHREELLSLAKLKANDILDIPIDIINSYKSLNFKIQRKVFDYVSVSPVNKKLPSLDYANILSVLELFYDLYRWGETETKYVKSKGQLTYFATLMNQWTNDYSINRIINENIDIKRTIVIERGQQPIPFDKNDINHVNKVIDDILYNIERILSFFFEKYFNHYYKCLAAILGEDNAGHNWATFLEYGSKNPLCISLQTLGISRHAANIIASSKELRKYLKFNEDSYEIISVNKQGLLNSLQKDSVEYGEVKIFL

SEQ ID NO: 55330 - protein, 305 aa, Klebsiella pneumoniae BWH 30
MEFDILIDQSLSSFVTESGTSKITNNNLLSIINDFEDGCWRYQKFHRFIWDNILQTALSNKEREALIGGPGTSLALASKNLRLTDSEKDISKGSELAEIFLYGIMRHHFKALPVVPKIFYKQNSQDNAKGADSVHVVIIDNDNFSLWFGEAKFYNSIEDGRFDTIITSVKNSITTEKLRKENSIILNTQDLYDLVQDNALKLKIAKVLSSDNSMDNIKPLINIPIFILHECPITENSNCLSDEYKSSIIKLHKERSEAFFKKHHEKIKNIYGYEKIKFHLILFPVPKKDVIIDKFLNSVRFYKEQ

SEQ ID NO: 55331 - protein, 719 aa, Klebsiella pneumoniae BWH 30
MDNEINRDNEEGRRIEFSSHDEYIFSHCQNINNLINKRKYDEARNNLILLLDFHKNNSLHYNALVNHLIRALGLYPYIQTDTADWHDRLIYDLFKVDVGLTNPITLHREQSLILKRLLSGEDLAISAPTSFGKSFIIDAFIALKKPNNVLIIVPTISLTDETRRRLHRKFSSEYKIITTADVELSEKNIFIFPQERAISYLEKIQSLDLFIIDEFYKASEKHDKDRAPALIKAMMKFTKLAKQRYYLAPNISEIINNPFTKGMEFVKIDFNTVFLEKHDLSEVIREDEDEKCAALLDILSKTQGKTLIYAGTYKNIEKISNLILKTQPNNQSYILKEFSSWLKQNYDSNWKLAKLLEKGMGVHNGRLHRSISQLQIKLFEEKHGIKNIVSTSSIIEGVNTSAENVVIWQCKNGNSNLKDFAYKNIIGRSGRMFKHFIGKVYLLSAPPKEENNELALTIPESLVGEIDEIEYNNILTPEQISAIIRYKEEMYSILGHETFNKLLKEGAFKSNDYFLIRDIAFDIVQKPKEWENIIYLNSNTPDEWEHFLYKIINLQPAGWGGKHSRFVSYIKIASLNWKLSIPQILEKLSKLGITIDDFFELEKTLTFKLTSLLNDVNVLLNELMPYKNTDISPFIFKTSNAFLPSVVYQLEEYGLPRMLTKKISTAFNLNFESESLTLHETIDYLKVIDDIIDLSVAIDASLMEEYILDNFFEGVTYNK

SEQ ID NO: 55332 - protein, 297 aa, Klebsiella pneumoniae UCI 26
MLLPIRVNKRFLNLFRTLTLDKAPRQSTVNLHVLNIESNSFVYNKLVEELRDLIVCYVHSNRRIAEFEKNHPSFSPKPYLEAIQKFRTYTSNEGELGELLLYAFLESGLNAPKLLSKMELKTDANDYIKGSDGIHLLEIDNNYQLIFGESKMYSDLLEGAREAFDSIADFKANGLGFERGLIDTHVINEMVTEEGYETIKSILLPSGNNGPNLDLAFGVFLGFELPVSDTQLSMRNNEFRDWTYSLVKNNASRVIDTIEKRIIKHKLFGHDFHIYIVPFTDIDITRKKLIQEMLTIG

SEQ ID NO: 55333 - protein, 862 aa, Klebsiella pneumoniae UCI 26
MNEKDVARKIPLAQRLSMDAYTSSYFKEIYKYISILYDNCLFNNNGTHNLLFVDTTKIEKALRFADILSHSHVEAHRTKSFEIISKIAAFHSDDPYFKMIGSAVINRLGIFAADNLISQGVHLPLDREIESSIKKSFQRTTIDGLFFTDKQYELYQSLITSNTLSFAGPTSMGKSFVINEYIKHIVFGNAKKNIVLIVPTRALISQSTLKLKNELRDEIDGNQYKIVTTSYMLRGGIDHSKGYVFVLTPERLVSLISTCPDIIIDYIFVDEAQKLTIKNDTRSLVTYSAIEQTLNLNPNAKLFFSSPNLSNPEVFNDLFNRDHAKVYRSIEGATAQNLYFIDLLNNKFSYVDKNKLIDIDNVNQTYTSVNDLIFQINKGKSKIIYTGGIDNTLSRTRDFLRYIKKLQSNKKPQNFDLASQVREFVHTGYELAEAIEYGVAFHFGNLPQAIRDLIEYNFKIGNIDYLFCTSTLLEGVNLPARSVFILTSKKGTRYFEPVDFWNLAGRAGRLAIELAGDIFCVKDESGTWNDKAVKNLILSNKNEIELTPSFYLNDSKRIKELEQIIKTGSTEGIQNSEFLRTLSDMVRIDTLRTDKANNLPLINYFRNNGNNDILHYALKSINNINIPTHILLANSHIAINSQHNAFNCIRNYSIDELKLSWNPTNEEIKEKLALIFNIYQIDKYSKGLNRLNFNSIPYYAVILTKWMHGNTLSEIISDAIVYYISNRKNIYLSDKTQEPFDQNNSIHITKLVNDTIKDIELKIGYQLQNYISHYCQLLSLVFENNPGANWSQFIEFGSNDPIVWQLQFMGFSRHCAIFLKKNFPKHLKYDQENNQLYILNRAEIKSKVKQNKLYWLEIQALL

SEQ ID NO: 55334 - protein, 305 aa, Klebsiella pneumoniae BIDMC 52; identical to SEQ ID NO: 55330

SEQ ID NO: 55335 - protein, 719 aa, Klebsiella pneumoniae BIDMC 52
MDNEINRDNEEGRRIEFSSHDEYIFSHCQNINNLINKRKYDEARNNLILLLDFHKNNSLHYNALVNHLIRALGLYPYIQTDTADWHDRLIYDLFKVDVGLTNPITLHREQSLILKRLLSGEDLAISAPTSFGKSFIIDAFIALKKPNNVLIIVPTISLTDETRRRLHRKFSSEYKIITTADVELSEKNIFIFPQERAISYLEKIQSLDLFIIDEFYKASEKHDKDRAPALIKAMMKFTKLAKQRYYLAPNISEIINNPFTKGMEFVKIDFNTVFLEKHDLSEVIREDEDEKCAALLDILSKTQGKTLIYAGTYKNIEKISNLILKTQPNNQSYILKEFSSWLKQNYDPNWKLAKLLEKGMGVHNGRLHRSISQLQIKLFEEKHGIKNIVSTSSIIEGVNTSAENVVIWQCKNGNSNLKDFAYKNIIGRSGRMFKHFIGKVYLLSAPPKEENNELALTIPESLVGEIDEIEYNNILTPEQISAIIRYKEEMYSILGHETFNKLLKEGAFKSNDYFLIRDIAFDIVQKPKEWENIIYLNSNTPDEWEHFLYKIINLQPAGWGGKHSRFVSYIKIASLNWKLSIPQILEKLSKLGITIDDFFELEKTLTFKLTSLLNDVNVLLNELMPYKNTDISPFIFKTSNAFLPSVVYQLEEYGLPRMLTKKISTAFNLNFESESLTLHETIDYLKVIDDIIDLSVAIDASLMEEYILDNFFEGVTYNK

SEQ ID NO: 55336 - protein, 297 aa, Klebsiella pneumoniae BIDMC 52
MLLPIRVNKRFLNLFRTLTLDKAPRQSTVNLHVLNIESNSFVYNKLVEELRDLIVCYVHSNRRIAEFEKNHPSFSPKPYLEAIQKFRTYTSNEGELGELLLYAFLESGLNAPKLLSKMELKTDANDYIKGSDGIHLLEIDNNYQLIFGESKMYSDLLEGAREAFDSLADFKANGLGFERGLIDTHVINEMVTEEGYETIKSILLPSGNNGPNLDLAFGVFLGFELPVSDTQLSMRNNEFRDWTYSLVKNNASRVIDTIEKRIIKHKLFGHDFHIYIVPFTDIDITRKKLIQEMLTIG

SEQ ID NO: 55337 - protein, 862 aa, Klebsiella pneumoniae BIDMC 52; identical to SEQ ID NO: 55333

SEQ ID NO: 55338 - protein, 528 aa, Klebsiella pneumoniae BIDMC 35; identical to SEQ ID NO: 55328

SEQ ID NO: 55339 - protein, 853 aa, Klebsiella pneumoniae BIDMC 35; identical to SEQ ID NO: 55329

SEQ ID NO: 55340 - protein, 314 aa, Klebsiella pneumoniae BWH 15
MDALQTALEKLVRDDGDTIYSYFQEIKSDYLIEGTSAACHFHCINLDGNGRPKVDALIQYLVGKIIDYAIPRKKINAAIKYQQETGSTLKIAKLFTQAMGLFTSLANSGEGGELILFLFAEKFLKLPQIICKMNLKTNPEMHYHGADGVHIGVDKQSQKLCLYWGESKLYSNLTQAIYKCMKSISPLITSSFGDGSAEERDIQLLSDFMNVDDPNLEAALKKFLDPDNPEFNKLEYRGICLVGFDIDDYPTEPNKLNINGLLETFSDKIDSWRDSIKKRIIEESIHGISLHVFLIPFPSVDSFRQTLITSLNGD

SEQ ID NO: 55341 - protein, 859 aa, Klebsiella pneumoniae BWH 15
MSMKELPSWLVNNQGFINKLKGLTISSVVNQFPSVRAFNNQSVSDQDISYLLTCGSVLSQSNDDLCQDAALRISQYCLINLNSEQRKDSAALILDALANNATVELAVKKGFLKEGFEKRLPIAGQLETTKRKIEHTIEIGNDKLIYANKFQSEFWDRVQKNEWVSVSAPTSVGKSFILESWVEDYINKKDRGLIVYLVPTRALISEVYESLLIRLDSNGTGVINIQTLPLKTSYDNTRVNIFIFTQERLNIFYNSLNERPIVDLLIIDEAHKIGDSLRGIFLQYVLEMTCARNRQIKVIFASPFTSNPELLLSDAPYKGKTSVIKSSYVTVNQNLIWVEQRPNTPKKWKMYFFFRGEKQFIGDFDLENTPSSDSKRLSFIALTLGKHTSGNVVYVNGAADAEKTAKQIADSLDEVTDDKDILNLIELSEKVIHERFALNFTLRKGVAFHYGNMPLIIKTEVERLFGKGKIRYLICTSTLVEGVNMACKNIFIRGPRKGSGKPMKEDDFWNLAGRAGRWGKEFQGNVICVDTNNQRIWNGTPPISKKNIRIIRATDSLHDEIDSIYEYIDSPHHYGMTRSNPKLQGLFSYLCISHYLNDGLEYNPYIEKYNLNNLEELDSKITEVLDSLSFPLEIISRNPGISPILMQNLWERFERCDKENLENLLLADPSSDDALPSYIKAFTRISDTMSIDLGYNSKGVFVLALLVINWMRGYPLARLISERISHLKRKKKEYKEPSVIRNVMEDVERVARYQAPKLLSCYNDLLRHFYISEGRADLIEYIDDIGVFLELGVSVKTQISLISLGFSRTSAVMISEYITSDNFDEQLCIEWIIKNSNLLDDLPALVKLEIYSIINGIEI

SEQ ID NO: 55342 - protein, 528 aa, Klebsiella pneumoniae UCI 64; identical to SEQ ID NO: 55328

SEQ ID NO: 55343 - protein, 341 aa, Klebsiella pneumoniae UCI 64
MKKIDSFIIEKIFNSAYFKKLYKKIIKAYSALTIESENHFNISNTELRDIFRFIDLLANSSNQNARMCAYHWISLLEPFSDKWGKFSLISSLVYSKLGLYALDFNDHALPFSQRLENEAKKSAQTFSNTYIFTDAQFDIYTDMLKSPYYSFSGPTSLGKSFILKRYIEEIIQNSTSNIVILVPTRALISQFSLEIKNELHELIENFNYKIVTHGSLASKSDAVIIKHIFILTPERLLNLFSQGKVVSIDYLFVDEAHKLSNNDDSDVRSLTEYNAIDSALFNNPNMKIVFSSPNIENPEVFLNLFGREKIYASRIIESPVSQNLYLIDFHKKEIKYFSNSE

SEQ ID NO: 55344 - protein, 435 aa, Klebsiella pneumoniae BIDMC 61
MSITSLSDAGGPAARQGFKYQDHVAVSFIFKMLRDSNYSQVECETADDIVAVFQCEGQILNEYIQVKTTESDGKWNLKEITALDGSKANSSLLHKSLKCDVRPGIARFRIVTKRDVAKILEGFKKEIDKRVLPDITTTRGMALCKTFKTFVSPQKRNFLYWAENFVWQVYGDVEALEAVNIKALSQLAEVLGNRPNFTQLKAIYEEFLEIADKAATASVKTAAASKIILRDPTLAYLRKLLDEADDKSTATSKPYKKRPDPFLVEFHANTKEGLLHSFSGFDVRYALKKWRHENYAKHLIEWLPEFSLKASEIVNILAHNAKAILARSISTFSDSELPRDRLIAELILHSILRSRQDSEPVACKVFYKSADKLSEFGNAHIVQMPDQDDQLWLGLARLIKANDMDTTLEQIREILDETISETVLSAEREIIISLR

SEQ ID NO: 55345 - protein, 713 aa, Klebsiella pneumoniae BIDMC 61
MNYEKIKNILAKLGEESASTVDVLLAINTIVNRSNSEWEGRDLVIRALDKFKLFDSVEQSLLLNMVRAVGLFPYITPHLSSMAISDRLAYEAHRVEGVEQGMVFHHLQAHVFSLIMQGRNVVLSASTSVGKSLVIDAVLAQRRFKKVVVIVPTIALIDETRRRLVKRFKDFNLITHPSQESVSETTNVYLLTQERVIQRPDLADVEFFVLDEFYKIDLGNATDESTRAVDLSLAFHKLAKTGAQFYMLGPHIQKISGLDDYEYHFIPSDYSTVAVDIQNFNLEMRSEERKEKLLELVTTLDSPTLIYCQAPPSANRVAEYLIQEAGLTPVPETQEIAAWISKHYHPEWNVAKAISLGIGIHHGGVPRALQQYIVKLFNEGIIKRIICTSTMIEGVNTSAENVIIYDRRLKNSTFDYFTYKNISGRAGRMNKYFIGKVFMLEAPPLEQGLTVEYPIGHQDENSPMGLLMQLENEYLTDISRGRLQDAYANPVLSPTTLIENRHVPIERQIEVAEAIIRDLLLSSKLLDWKGIPEPNQLNYLCELVYILEGGNLMDYGISSSSQLVWHINELRTQKNLPAYLRDAVENRRPEHTSSEAINLRLKFIRNMVCFRLPRDIMAVNKIQADVLAKEGSEPGDFSFFAEQLENMFLDPLLTALDEYGIPTQISTQIKNLILPSEHLNDLLAKLRTLAPRVEHLQLTGFEKSLMRWAVSEI

SEQ ID NO: 55346 - protein, 528 aa, Klebsiella pneumoniae BWH 48; identical to SEQ ID NO: 55328

SEQ ID NO: 55347 - protein, 853 aa, Klebsiella pneumoniae BWH 48; identical to SEQ ID NO: 55329

SEQ ID NO: 55348 - protein, 528 aa, Klebsiella pneumoniae MGH 60; identical to SEQ ID NO: 55328

SEQ ID NO: 55349 - protein, 853 aa, Klebsiella pneumoniae MGH 60; identical to SEQ ID NO: 55329

SEQ ID NO: 55350 - protein, 297 aa, Klebsiella pneumoniae
MEEDLSNNFKALIQSDFMECFVRMECDLNLDKNRIVNLYRLCLDGKKYNYVKIGERLIDCIPSFSLSRKQLMRCRERNAFGKATLSAIRNFLKIERKTKISEMLLQGFLESYLHAPKLYSFDEINNAGFHGAHVKFNKNRNVELIHSAAFISNSLSDGVSYAIDVILKAFPELRSLDGLLGNTFLETNFTEDECQILASLLIPGESSYSQGYEDRLAIFIGYNHKIEESLIYENASRFPSLLEQKIILNVQQALEYRKEEINKLSIVNATIDCFFVPFDDVNKFNDEFIESLKNEED

SEQ ID NO: 55351 - protein, 853 aa, Klebsiella pneumoniae; identical to SEQ ID NO: 55329

SEQ ID NO: 55352 - protein, 543 aa, Klebsiella pneumoniae
MDHSNSGGVGAKKGFLFQDYVAALYVTEMLRDKRIKGVCCEVKDDVDIIYENHVRFIQIKTTDGDKKWSTKELCQRTKKKDSNRYNQDSIVHKSLNCDSSDKFKAIFGIISTRDVDSTLLYLKIEHDKRFDKTSQRDKLINSITRQIKEFRSNNNNDIAYWVDNCEWNTFHNSDHIKLLCLSNIMKCASENGFYLDPNHDDEIILNSILAKVNKLSTLSKKEFLSKDKTYFRVDLITWFQAEIERISEEKPHKVYKTKSNNLPTILNELNKLKDSTIDTISGTSYYQSYNRLSYRFDFISTNLVQWLPELLLRPEELSTITPTNMISRVRDVYKTISENNHDIKNIISRVLLHSLVRHHCSSQPIPAHLYTEKKGDMIDFDNIHIVIRENDPDEMWFGLSLWCDGNIEKTVSLFASKVLSFVDVTCDTQRKIILDIKSDEYLVKHDVNCVLDPATSITDHLSRIYFVVFIGYISETQTLEVKKDYEENLKEEVLLKFKSIIEELIHNHDSVIDLNFIIYMYPLPCIDSLVDSFKNKMVGDING

SEQ ID NO: 55353 - protein, 722 aa, Klebsiella pneumoniae
MDNLYEIAKNNLSADNEHFDAFEYIKTINTLLDNPVQKTQGRDLTIRALNEKSKFSHHIKQLRAMIRKSGLYPYLYSEFDDLDSDEKLATEIYRSPNSDDFIFHSMQMTVFHLLMNGANLALSAPTSMGKSIIIDSLVSCGKYNTIVIVVPTIALIDETRRRLHKKFSNIYEIIYHSAQERNHEKTIYILTQERVNEREDLNEVDIFVIDEFYKLSFKNKTSEKYYDERVISLNVALSKLLTVSKQFYMIGPNIDFLRGLNNINEDFIFLSSDFNTVALNIFEYNILPNNESLKQSTTLSIIEKNNGQFIIYCKSPKVAESIASFLIKSGVSSDTNEEEYSLWLEKYYSQFWVYTKAIRHGIGLHYGTLPRAIQQYTIDLFNNKKVNILICTSTIIEGVNTNAQHVIIYDNRDGNNSIDKFTHNNIKGRAGRMKQHFIGNVHCLEESPEGKIEDSIVEIPIGLQDNTTPLNLIAGMQDEHVSSLSEDRLEEYLSANRLPKEIIKKHASYEINKVLELFNEIDWLKDSEISDLCFQRYPDKKAMNQISKNLLITSRQTFTRNSVSTEIEHISGMLFSYINAETHQTYFDSQLSRIINSQISEPEISELINRELKIIRNVFSYSIPKSLALQQDIINFICQKRKLNLTADYSFIINIFEKFHLPGNISALEEMGVPLQILQKINFPDDAIVDINKCIGYIKNVYFLNKTLSRLERKFIERALII

SEQ ID NO: 55354 - protein, 542 aa, Klebsiella pneumoniae MRSN 2404
MSITSLSDAGGPAARQGFKYQDHVAVSFIFKMLQDSNYSQVECETADDIVAVFQCSGQIVNEYIQVKTTESDSKWNLNEITALDGTKANSSLLHKSLKCDVRPGIARFRIVTKRDVAKILDGFKKEIDKRVLPDTTTARGVALCKKFKTFVSPQKRDFLYWAENFVWQVYGDVEALEAVNIKALSQLAEGLGNRPNFTQLKAIYEEFLEIADKAATSSVKTAAASKIILRAPTLDHLKKLLEEADDMSTATSKPYKKHPDPFLVEFHTNAKESLLHSFSGFDVRYSLRKWRHENYAKHLVEWLPEFSLKASEIVNILAHNAETILARSISTFSDSELPRDRLIAELILHSILRSRQHSEPVACKVFYKSAGKLSEFGNAHIVQMPDQDDQLWLGLARMIKADDMDTTLEQIREILDETISETVLSAEREIIISLREPLHHQPKADSFNQALHRNSPIDDMLNILCFPILLTYDSAALSSGWFVNYVDNLKKEIETHFSAFTSELSENIKQVKVLIFLVPMESIELLTKAFNARCEKLEELQA

SEQ ID NO: 55355 - protein, 713 aa, Klebsiella pneumoniae MRSN 2404
MNYEMIKNILAKLAEENAKTVDVLLAINTIVNRSNSEWEGRDLVIRALDKFEFFDSVEQSLLLNMVRAVGLFPYITPHLSSMAISDRLAYEAHRVEGVEQGMVFHHLQAHVFSLIMQGRNVVLSASTSVGKSLVIDAVLAQRRFKKVVVIVPTIALIDETRRRLVKRFKDFNLITHPSQESVVDTTNVYLLTQERVIQRPDLADVEFFVLDEFYKIDLGNSPDESTRAVDLSLAFHKLAKTGAQFYMLGPHIQKISGLDDYEYHFIPSDYSTVAVDIQNFNLEMRSEERKEKLLELVTTLDSPTLIYCQAPPSANRVAEYLIQEAGLKPVPETQEIAAWVSKHYHPEWNVAKALSLGIGIHHGGVPRALQQYIVKLFNDGIIKRIICTSTMIEGVNTSAENVIIYDRRLNTSKFDYFTYKNISGRAGRMNKYFIGKVFMLEAPPLEQGLTVEYPIGHQDENSPIGLIMQLENEYLTDISRGRLQDAYANPILSPSTLIENRHVPIERQVEVAEMIIRDLPDGSKLLDWKGIPETNQLNYLCELVYSLEGGNLMDYGISSSLQLMWHINELRTQKNLPAYLRDAVENRREEHTPSEAINLRLKFIRNMVCFRLPRDIMAVSNIQADVLAKIGIEPGDFSFFAEQLENMFLDPLLTALDEYGIPTQISTQIKNLILPSEHLNDLLAKLRALAPRVESLQLTGFEKSLMSWAVSEM

SEQ ID NO: 55356 - protein, 542 aa, Klebsiella pneumoniae HE12; identical to SEQ ID NO: 55354

SEQ ID NO: 55357 - protein, 713 aa, Klebsiella pneumoniae HE12; identical to SEQ ID NO: 55355

SEQ ID NO: 55358 - protein, 542 aa, Klebsiella pneumoniae MRSN 3562; identical to SEQ ID NO: 55354

SEQ ID NO: 55359 - protein, 713 aa, Klebsiella pneumoniae MRSN 3562; identical to SEQ ID NO: 55355

SEQ ID NO: 55360 - protein, 542 aa, Klebsiella pneumoniae; identical to SEQ ID NO: 55354

SEQ ID NO: 55361 - protein, 713 aa, Klebsiella pneumoniae; identical to SEQ ID NO: 55323

SEQ ID NO: 55362 - protein, 539 aa, Klebsiella pneumoniae
MAITSTPSNKGGPAARQGFKYQDHVAVSFILKMLQDSSYLQIECETADDIVAVSRPNTEFIYEYIQVKTTEGDTKWNLTEATALEKGRPDSSLFQKSLKCDTRLGIARFRIVSKRDISKPLQCFLIDIGKRVFPDDCTERGVKLVKKFPKTISAQKRDFKYWAENFVWQVCGETAWLEAMNVRVLSELAEQYGVVPSHRQQKEIYEHFLNWADDAATADVKTQSQMKIIARKEALECFSKLLDTVEASSSITAKPYKSKPEPFLVEFHSVAETALLRSLAGFDVEYDFGEWRCKELAEHLVEWLPEFCLRASEIANFQVHHAKTILAKSISTFTQAKMPRDKLIAELILHTILRCRKDSEPIACKVFYESEGKLSEFGNAHIVHQAGKADELWLGLSKMIPTGKMDDTLKEICSVLDTTISKAVLSSEREIIITLREPHHHLPTAEQFSKALSKHSPAQEMLKIMCFPILLAYDSDVLGRGYASDYINHLKNEIMAHYSELKSRLPPKVLQVKIAIFLLPIENIQRLVIEFNSLCRTGI

SEQ ID NO: 55363 - protein, 714 aa, Klebsiella pneumoniae
MNYEITKKKIHLIGSKDISTTEILVSISKIVNRGIPEWEGRDLVIRALDKIDFFDAVEKSLLLSMVRSVGLYPYIKPYLDEVSDDDRLAYEIHRIDNVEPGMVFHRLQAHVYNLLMQRKNVVLSASTSVGKSLVIDAILASKQYSKIVVVVPTIALIDETRRRMVKRFRSYCNIITHPSQEATLSLANVYLLTQERVLQRGDLDDVDFFVIDEFYKLDLENDSDEKNRSIDLSLAFHRLAKQGAQFYLLGPNIQNIHGLEAYEYNFIPSSFSTVSVDVYHYNLSSKGDARKEKLLELCSQLSSPTLIYCQSPASANKVAQFLINEANLPRVENTQDVADWIGKHYHPDWNISKAISLGVGIHHGGVPRALQQYFVKLFNEGAIKFIVCTSTMIEGVNTSAENVIIYDRRVNNTPFDFFTFKNISGRAGRMNRYFIGKVYMLEAPPLEKDLSVEYPVGSQNEDSPMGLLLKLEPEFLSDLSRQRLEQAYSTPQISAVTLIENRHVPIEVQVKIAEQILEDQHEHKHLLCWKGNPEQNQLEYLCSLVYEHLPHNLMEYGIFSGLQLAWHINALRSQKNFTEYLQQAIDDDWHNRTPSEAIGLRLKLIRNVISYRLPRDFMSISRIQADVLGRRNLEFGDYTFISEQLENLFQDPLITALDEYGIPIQISTKIKGMILPSDNLNEVLAKLRKLVVKIDGMQLSKFEKNILRWAIAEM

SEQ ID NO: 55364 - protein, 539 aa, Klebsiella pneumoniae; identical to SEQ ID NO: 55362

SEQ ID NO: 55365 - protein, 714 aa, Klebsiella pneumoniae; identical to SEQ ID NO: 55363

SEQ ID NO: 55366 - protein, 528 aa, Klebsiella pneumoniae; identical to SEQ ID NO: 55328

SEQ ID NO: 55367 - protein, 853 aa, Klebsiella pneumoniae; identical to SEQ ID NO: 55329

SEQ ID NO: 55368 - protein, 297 aa, Klebsiella pneumoniae
MLLPIRVNKRFLNLFRTLTLDKAPRQSTVNLHVLNIESNSFVYNKLVEELRDLIVCYVHSNRRIAEFEKNHPSFSPKPYLEAIQKFRTYTSNEGELGELLLYAFLESGLNAPKLLSKMELKTDANDYIKGSDGIHLLEIDNNYQLVFGESKMYSDLLEGAREAFDSIADFKANGLGFERGLIDTHVINEMVTEEGYETIKSILLPSGNNGPNLDLAFGVFLGFELPVSDTQLSMRNNEFRDWTYSLVKNNASRVIDTIEKRIIKHKLFGHDFHIYIVPFTDIDITRKKLIQEMLTIG

SEQ ID NO: 55369 - protein, 862 aa, Klebsiella pneumoniae
MNEKDVARKIPLAQRLSMDAYTSSYFKEIYKYISILYDNCLFNNNGTHNLPFVDTTKIEKALRFADILSHSLVEAHRTKSFEIISKIAAFHSDDPSFKMIGSAVINRLGIFAADNLISQGVHLPLDREIESSIKKSFQRTTIDGLFFTDKQYELYQSLITSNTLSFAGPTSMGKSFVINEYIKHIVFGNAKKNIVLIVPTRALISQSTLKLKNELRDEIDGNQYKIVTTSYMLRGGIDHSKGYVFVLTPERLVSLISTCPDIIIDYIFVDEAQKLTIKNDTRSLVTYSAIEQTLNLNPNAKLFFSSPNLSNPEVFNDLFNRDHAKVYRSIEGATAQNLYFIDLLNNKFSYVDKNKLIDIDNVNQTYTSVNDLIFQINKGKSKIIYTGGIDNTLSRTRDFLRYIKKLQSNKKPQNFDLASQVREFVHTGYELAEAIEYGVAFHFGNLPQAIRDLIEYNFKIGNIDYLFCTSTLLEGVNLPARSVFILTSKKGTRYFEPVDFWNLAGRAGRLAIELAGDIFCVKDESGTWNDKAVKNLILSNKNEIELTPSFYLNDSKRIKELEQIIKTGSTEGIQNSEFLRTLSDMVRIDTLRTDKANNLPLINYFRNNGNNDILHYALKSIDNINIPTHILLANSHIAINSQHNAFNCIRNYSIDELKLSWNPTNEEIKEKLALIFNIYQIDKYSKGLNRLNFNSIPYYAVILTKWMHGNTLSEIISDAIVYYISNRKNIYLSDKTQEPFDQNNSIHITKLVNDTIKDIELKIGYQLQNYISHYCQLLSLVFENNPGANWSQFIEFGSNDPIVWQLQFMGFSRHCAIFLKKNFPKHLKYDQENNQLYILNRAEIKSKVKQNKLYWLEIQALL

SEQ ID NO: 55370 - protein, 297 aa, Klebsiella pneumoniae
MKLSPQLKNTHVIKDMLKKVNVSIFLSDGRRVETLLVYLPSTNGVINHTAFFDLIANELLHHFALTCQDIEKKLKRNGAQAADILFKKALSKLSQQTAHGELGELILFTLVDVYLEAPKLLSKISLKTSPQMPVFGADGVHIQYVNNKIRVYLGESKLYTTFSNAATNAASSIEKAKSRYLDEFNLIDSYIDLPQLDEDAEEQLLGILNPFENKNIDDHIHSPCFIGFADKNLIESCLKGEDFVQCYINMAFNHIDDYYKKLEKRSVSIESSTLMILPFTDTEALVKDFITHLGIQK

SEQ ID NO: 55371 - protein, 844 aa, Klebsiella pneumoniae
MSEFYTKLSNRIINNEKFKIGTSELFSGYIKMLIGEKETICKELAKNITTASQIFYKSEDEKYLKEGANLLSMLIDSCGTDYPEIIPIAAHVFTSNGDFPNIELLEKRFPEIHFKHNLLSEATLNFRRSLNNVETLNIILTDFQKRLWDDLQRGDDVITVAPTSAGKTHIILNYLVDSVLDSLDGAFAVIVVPTRALITEVSSKIYNLAKERGREKEIEICTIPRDGNFSDKTFFVMTQERLHEVLLRGDINFNYLFIDEAHNISDESRGVLLHLTLEKVLDNGTPQIIIGMPSPQYQNSFTSVFNDIAFKKEITNHSPVSKLIMNVRPKGRNLEIDRLYSADKVVIPKNFKEKKLADIVYRLGKNHSNIIYRNQTNYCESIAQDISNRIETVADNEALIEASEYIKHFIHEEFTLASNLLKGVAFHYSPLPTSVRIMVENLAKEGHVKYICCTSTLAEGVNLPAKNLFIQNPFFKQKFQSPERLEDVKINNITGRAGRMLQHFSGNVFLIEQDKWAFDDYFTESDELKEEKIPTYFKLINDKTDDVIMALSGQYPREDEQYKFYSVANKLIKAFDNGSLDNTLTAPEVKLDSHMIRRLKNNVEQAFLNLKVSSLILESNPTIGYIQQNKVYEFLMSEVDLHEWSLPHPKSEDLYERLLKISSKLIEYGVFIPSGNYTAKYICLISKKWIQGNSLKEMISEQIYWDNASPSQDANDEDEGINEVKVNKSVRNVINVINSDVRFRLSNAIKCYYTLFVLAVRMKRSNVQSVKLHYFLEIGASDERMMDLLNLGLSREASKEIDEKVPSGVPIKNLADLIRLLDSESISRIHVVIKKEIEHLVNRS

SEQ ID NO: 55372 - protein, 297 aa, Klebsiella pneumoniae; identical to SEQ ID NO: 55332

SEQ ID NO: 55373 - protein, 862 aa, Klebsiella pneumoniae
MNEKDVARKIPLAQRLSMDAYTSSYFKEIYKYISILYDNCLFNNNGTHNLLFVDTTKIEKALRFADILSHSHVEAHRTKSFEIISKIAAFHSDDPYFKMIGSAVINRLGIFAADNLISQGVHLPLDREIESSIKKSFQRTTIDGLFFTDKQYELYQSLITSNTLSFAGPTSMGKSFVINEYIKHIVFGNAKKNIVLIVPTRALISQSTLKLKNELRDEIDGNQYKIVTTSYMLRGGIDHSKGYVFVLTPERLVSLISTCPDIIIDYIFVDEAQKLTIKNDTRSLVTYSAIEQTLNLNPNAKLFFSSPNLSNPEVFNDLFNRDHAKVYRSIEGATAQNLYFIDLLNNKFSYVDKNKLIDIDNVNQTYTSVNDLIFQINKGKSKIIYTGGIDNTLSRTRDFLRYIKKLQSNKKPQNFDLASQVREFVHTGYELAEAIEYGVAFHFGNLPQAIRDLIEYNFKIGNIDYLFCTSTLLEGVNLPARSVFILTSKKGTRYFEPVDFWNLAGRAGRLAIELAGDIFCVKDESGTWNDKAVKNLILSNKNEIELTPSFYLNDSKRIKELEQIIKTSSTEGIQNSEFLRTLSDMVRIDTLRTDKANNLPLINYFRNNGNNDILHYALKSINNINIPTHILLANSHIAINSQHNAFNCIRNYSIDELKLSWNPTNEEIKEKLALIFNIYQIDKYSKGLNRLNFNSIPYYAVILTKWMHGNTLSEIISDAIVYYISNRKNIYLSDKTQEPFDQNNSIHITKLVNDTIKDIELKIGYQLQNYISHYCQLLSLVFENNPGANWSQFIEFGSNDPIVWQLQFMGFSRHCAIFLKKNFPKHLKYDQENNQLYILNRAEIKSKVKQNKLYWLEIQALL

SEQ ID NO: 55374 - protein, 297 aa, Klebsiella pneumoniae; identical to SEQ ID NO: 55350

SEQ ID NO: 55375 - protein, 853 aa, Klebsiella pneumoniae; identical to SEQ ID NO: 55329

SEQ ID NO: 55376 - protein, 297 aa, Klebsiella pneumoniae; identical to SEQ ID NO: 55350

SEQ ID NO: 55377 - protein, 853 aa, Klebsiella pneumoniae
MKKIDSFIIEKIFNSAYFKKLYKKIIKAYSALTIESENHFNISNTELRDIFRFIDLLANSSNQNARMCAYHWISLLEPFSDKWGKFSLISSLVYSKLGLYALDFNDHALPFSQRLENEAKKSAQTFSNTYIFTDAQFDIYTDMLKSPYYSFSGPTSLGKSFILKRYIEEIIQNSTSNIVILVPTRALISQFSLEIKNELHELIENFNYKIVTHGSLASKSDAVIIKHIFILTPERLLNLFSQGKVVSIDYLFVDEAHKLSNNDDSDVRSLTEYNAIDSALFNNPNMKIVFSSPNIENPEVFLNLFGREKIYASRIIESPVSQNLYLIDFHKKEIKYFSNSECIDIESGSLYTLNKKSDFIYNIGSRHGSNMIYCSSRAKAVDSALEFYQIRLSENIVLSPLLIDSIKKISNYIHPEYYLAMFLMKRIAYHHGQLPQAIRNIVEELFRKGDIDFIFCTPTLVEGVNMPTRNIFINCDDKIRLIADAKKNPNKTLAFWNLAGRAGRYCKELSGNIFCLQDESNRWDNTDIFLEKTAHLTTTIDARIESKSGLREIERYLSDTETDIYKRNQAIEYLANIMAVDTIRFKNNLKDSFVLRKFCDIHREELLSLAKLKANDILDIPIDIINSYKSLNFKIQRKVFDYVSVSPVNKKLPSLDYANILSVLELFYDLYRWGETETKYVKSKGQLTYFATLMNQWTNDYSINRIINENIDIKRTIVIERGQQPIPFDKNDINHVNKVIDDILYNIERILSFFFEKYFNHYYKCLAAILGEDNAGHNWATFLEYGSKNPLCISLQTLGISRHAANIIASSKELRKYLKFNEDSYEIISVNKQGLLNSLQKDSVEYGEVKIFL

SEQ ID NO: 55378 - protein, 297 aa, Klebsiella pneumoniae; identical to SEQ ID NO: 55350

SEQ ID NO: 55379 - protein, 853 aa, Klebsiella pneumoniae; identical to SEQ ID NO: 55329

SEQ ID NO: 55380 - protein, 308 aa, Klebsiella pneumoniae
MGKFDNLNDYVAVRQKDFESCINVVEHELHIDCVSTNLRFHHIKFNGNGIPMVKALACKLYEYIIDYCLSARERSDTLTPQQSMILSKQARDLFRHPKITDNSPDKTGEAGETLLFFLMEAVLGAPQLVAKMELKTNSNDEVKGSDGIHVRWNEQDKLVDLYFGEAKIYKRVSSALDEALKSISSFHESEMYKHEFNIVTKFFKYANNEIKNAISDLIISGEPGPNIRLNHACLIGYNWHKFKKLKATDEQSLEQHFLKEFKNDFPRLKKLLEDKFNSFPQKHLKFDVFFIPFPSVTDFRNEFNAALD

SEQ ID NO: 55381 - protein, 508 aa, Klebsiella pneumoniae
MHVDIGEFEINFSFRGGKVQQKSSFAKFISDSGGAVIVFENDPSAAEDVALSLTEKLTIENALPDYSEFIGFIKEEMHSDYSLAHCMERRVAFHYGNMPSIIRNGIEYFFKRGDIQYIVCTSTLLQGVNLPAKHIILDNPHSGSNSMSRADFLNLSGRAGRLLHEFHGNVWCLRPNDWDAKVFEGENLQVINTAMSDVMLDGGGIICNAIDGLLIDPIEKDLADVAFAKLFHEIRRDDLQSEYFLRSDKSEDYHEILEYNFNKISMMRINVPDELLRMNIGIRPDYIQRLYDLFKESANLDDYSLYSPFKKGGKQRIDVAIEIIRDIFSWNISHQHSLWISMLAHKWMTGNSLSSLISYEVDRAFSPEDRKKSEKDTSFKRKKVSSTIRGVLKGLETQVRYNLVRYIKVYQDVLRFVMEERNEGTKAVLVENISAYLEFGSCNPIDLNLMSLGLSRSTALLVRKKVKLPPEGTPEDYLSFLRKVIFDKKSIPSYCMREIKEVLGEMKN

SEQ ID NO: 55382 - protein, 299 aa, Raoultella planticola ATCC 33531
MNNKLKPQLKNHDVIKKVLRKVEVSLLLSDKRKVETLLVYLPIENGESKHSVFFELIKDELLHNFALTCKEIDRKLKRPSKIAIDQLFKKALSKLSQQTAHGELGELILFTILDVYLQAPRLLSKISLKTSARMPVYGADSIHAQFIKGGLRLYLGESKLYTSFSSAATAAVESIKSASDKYIQEFNLIDSHLDLPELDEDSQEELIRILNPFENTSKLDFIHSPCFIGFADGNLIKDATSDDDFIQRYIHVAFEHIDDYYKKIELQGLDINSTTLFILPFSDIKKLVDSFIAHLEIAK

SEQ ID NO: 55383 - protein, 842 aa, Raoultella planticola ATCC 33531
MSDFYIELSERILSSNDFKKCSLELFKCYANYLVGDTYKLDRLLVKKMATASQVFYKTQEEKYLKQGSSILSMLIDTCAEDYPEIVPISDFLFSSVGDFPNVKLLENRFPQISFRHNIFTDSSQSYKKALNNVEELGLVLTDFQRNLWDDLQAGEDVITVAPTSAGKTHIILHYLLSEVINSDGAFAAIVVPTRALITEVSSKIFEMAKERGYEKDIEICTIPKDEVFSDRTFFVMTQERLHEILLRGDIYFDFLFIDEAHNISDEGRGVLLHLTLERILEDSSPQIIIGMPSPQYQNSFSSIFKEVKFTKAITAHSPVSKLIFEVRAKGTNLEISKRGSDDKITLPKKFKNKKLADIVLRLGKNESNIIYRNQTNHCEHIADEIAKRITDYEVNDTLNEASEYIQHFIHDDFTLVENIKKGVAFHYSPLPTSVRILIENLVKEGLIKFISCTSTLAEGVNLPAKNLFMLNPTFKNGLYNKTVRIEDVKINNITGRAGRMLHHFSGNIFLVEPDDWTFKDYFDEDDNKKEEKIPTYYKLINENTNEVLRTLTGFQPDDEDHSKFYSVANKLIKSYGNGDLDSTFSSPDIKLDDYTINGLKQVIETAYLNLKVPPLILESNPTTGYIQQNKVFEFLTSEIDLNDWSLPYPWSDEFYDRILKIAFKLIELGVFIPSGNYTADYICYIAKKWVQNNSLKDMINSQIEWDKNNIVKKNSRDDEKEVKINRSVKNIINVINNDIRFRLSNAVKCYFTLFALAARMKKSDAQSIKLHYYLEIGASDERMMSLINLGLSREASKEISDNTSKSRMYNGISDLIQLLNSSEINGIHRVIKKEIEHLLSRS

SEQ ID NO: 55384 - protein, 297 aa, Serratia liquefaciens
MLLPIRVNKRFLNLFRTLQLDRSPQQSTVNLHVLNIESNSFIYQKLVDELRELIVGYVHSNRRLAEFDKDHPTFSPKPYLEAIRKFRTYTSNEGELGELLLYAFLESGLNAPKLLSKMELKTDANDYIKGSDGIHLLEVGNDYQLIFGESKMYADLLDGAREAFDSIAEFKLNGLGFERGLIDTHVINEMVTEEGYETIKSILLPSGDNGPNLDLSFGIFLGFELSIDDAQLSMKNSEFREWIYSVVQKDASRVIDTIQKRIIKHKLFGHDFHIYIVPFTDIDITRKKLIQEMLTVG

SEQ ID NO: 55385 - protein, 862 aa, Serratia liquefaciens
MNEESIIKNIPLAERLSIDAYESDYFKEIYTYISMVYDDYLFNNNEQGIIDVVDMSKIEHALRFADILSHSLSEKHRSSSFEIISKIATFQSNNPYFKMVGSAVINRLGVFAADNLISQGVQLPLDREVESAVKKTIQKTSIDGLYFTDRQYELYQSLVSSKNLSFAGPTSMGKSFVINEYIKNIVINEDCKKIVLMVPTRALISQNALKLKNELRNEINKNRYRLITTSYMLRGGIDNGEGYVFVLTPERLVSLISSSPEMKIDYIFVDEAQKLTTKNDTRSLVTYSAIEQTLNLNINAKLFFSSPNLSNPEVFNKLFDRENAATYRSIEGATAQNLYYIDLLEQNFSYVGGNSLTKIKNINERYVSANDLIYKINKGKSKIIYSGGIDNTLSRTREFLNYIKKTKQAKRSYNSDLASQIREFVHNGYELAEAIEYGIAFHFGNLPQAIRDLIEHHFRKGNIEYLFCTSTLLEGVNLPARSIFILTSKKGSSHFESVDFWNLAGRAGRLAMELAGDIFCVKDESKTWSDNAIKKLILSDKNNIELIPSFYINDKKSIDSLKQIITTGSTDGIKNSEFLRTLGDMVRIDTLRTDGVNNLPLINYFRDNGNSDILHHALKSTNDINIPLNILLANSHIAINSQYNAFNNIKNYSIDELKLSWNPTHDDIKGKLELIFDLYQIDKYSKGLNRLNSKSITYYAVILSKWMHGNSLSEIIADTIYYYKSNGRELYFSNGVRELFDSSNPTHITKLVNDTIKDIELKVGYQLQNYISHYCQLLSLMFENNPGANWSQFIEFGSNDPVVWQLQFMGFSRHCAVFLKKNFSRHLKYDPESSQLNITNREEIKSKVMQNQLYWLEIQALL

SEQ ID NO: 55386 - protein, 542 aa, Serratia marcescens subsp. marcescens Db11; identical to SEQ ID NO: 55354

SEQ ID NO: 55387 - protein, 713 aa, Serratia marcescens subsp. marcescens Db11
MNYEIIKNILAKLAEENAKTVDVLLAINTIVNRSNSEWEGRDLVIRALDKFEFFDSVEQSLLLNMVRAVGLFPYITPHLSSMAISDRLAYEAHRVEGVEQGMVFHHLQAHVFSLIMQGRNVVLSASTSVGKSLVIDAVLAQRRFKKVVVIVPTIALIDETRRRLVKRFKDFNLITHPSQESVVDTTNVYLLTQERVIQRPDLADVEFFVLDEFYKIDLGNSPDESTRAVDLSLAFHKLAKTGAQFYMLGPHIQKISGLDDYEYHFIPSDYSTVAVDIQNFNLEMRSEERKEKLLELVTTLDSPTLIYCQAPPSANRVAEYLIQEAGLKPVPETQEIAAWVSKHYHPEWNVAKALSLGIGIHHGGVPRALQQYIVKLFNDGIIKRIICTSTMIEGVNTSAENVIIYDRRLNTSKFDYFTYKNISGRAGRMNKYFIGKVFMLEAPPLEQGLTVEYPIGHQDENSPIGLIMQLENEYLTDISRGRLQDAYANPILSPSILIENRHVPIERQVEVAEMIIRDLPDGSKLLDWKGIPETNQLNYLCELVYSLEGGNLMDYGISSSLQLMWHINELRTQKNLPAYLRDAVENRREEHTPSEAINLRLKFIRNMVCFRLPRDIMAVSNIQADVLAKIGIEPGDFSFFAEQLENMFLDPLLTALDEYGIPTQISTQIKNLILPSEHLNDLLAKLRALAPRVESLQLTGFEKSLMSWAVSEM

SEQ ID NO: 55388 - protein, 542 aa, Serratia marcescens
MSINSLSDAGGPAARQGFKYQDHVAVSFIFKMLRDSNYSQVECETADDIVAVFKCAGEIINEYIQVKTTENDGKWNLKEVTALDGNKANSSLLHKSLKCDVRPGLARFRIVTKRDVAKVLEGFKKELDKRVLPDVTTTRGVALRKKFKAAVSPQNRDFLYWAENIVWQVYGDVEALEAVNIKALFQLAEGLGNRPNFTQLKAIYEEFLEMADKAATASLKTAAASKIILRDPTLIHLKKLLDEADDKSTATSKPYKKRPDPFLVEFHTNSNEGLLHSFSGFDVRYALKKWRHENYAKHLIEWLPEFSLKASEIVNILAHNAEAILARSISTFSDSELPRDRLIAELILHSILRSRQNSEPVACKVFYKSADKLSEFGNAHIVQIPDQDDQLWLGLSRLIKAGDMDTTLEKIRQILDETISETVLSAEREIIISLREPLHHQPKADAFNQALHRNSPVDEMLNVLCFPILLTYDSAALSSGWLSNYVDNLKAEIETHFSTFTSKLPENIKQVKVVFFLVPMESIEHLTNAFNARCKKLEELQA

SEQ ID NO: 55389 - protein, 713 aa, Serratia marcescens
MNYETIKNILAKLGEEDASTVDVLLAINTIVNKSNSEWEGRDLVIRALDKFKLFDAVEQSLLLNMVRAVGLFPYITPHLKSMAISDRLAYEAHRVEGVEQDMVFHHLQAHVFSLIMQSRNVVLSASTSVGKSLVIDAVLAQRRFKKVVVIVPTIALIDETRRRLVKRFKDFNLITHPSQESVIETTNVYLLTQERVIQRPDLTDVEFFVLDEFYKIDLGNATDESTRAVDLSLAFHKLAKTGAQFYMLGPHIQKISGLDDYEYHFIPSDYSTVAVDIQNFNLEMRSEERKAKLLELVTTLDSPTLIYCQAPPSANRVAEYLIQEAELTPVPETQEIAAWISKHYHPEWNVAKAISLGIGIHHGGVPRALQQYIVKLFNEGIIKRIICTSTMIEGVNTSAENVIIYDRRLKSSTFDYFTYKNISGRAGRMNKYFIGKVFMLEAPPLEQGLTVEYPIGNQDENSPMGLLMQLENEYLTDTSRARLQDAYANPVLSPTTLIENRHVPIERQVEVAETIIRDLPPSSELLGWKGIPEPDQLNYLCNLVYSLEGGNLMDYGISSSSQLAWHINELRTQKNLPAYLRDAVENRRQEHTPSEAINLRLRFIRNMVCFRLPRDIMAANKIQADILEKEGIEPGDFSFFAEQLENMFLDPLLTALDEYGIPTQISTQIKNLILPSEHLNDLLAKLRALAPRLERLQLSGFEKSLMRWAVSEM

SEQ ID NO: 55390 - protein, 479 aa, Yersinia enterocolitica subsp. enterocolitica 8081
MKMDDYPKGKIYIFKSQKDASIRRGTCFSISNRVVLTAKHTVETDGEYSLFLSPDDFMSGVGVKLKLLAGYNNAQADFVLLECVDYEFPSYIQAGVVDLEVDEKIHVFGFPVEKDQIPAAFTSTVSCITGNITTAKHSFEIAQVSTVSNYKGMSGSPVLFNGYVVGMLIVQHGSTTLHVLSISDIYSKLGVSFHHFRLQASVREEIEYMPPEHPDTPFEICIDCNKTVPNVKGIDIGFEYNEWRKSDLIEYTKDWLIDYSLTAQHKKAIGNRPAKQLAEAIKKYPIDNQNALGDLFLHMAIRQNNKTIPVINGVYHINGELLFSCSHIVINGGQIELWLGASSIKDSMDEAILSVIENINNLISVNEIKTRLLVITSEIDEDWPFKEKLRKLADNQLPIENRVDKIILPIFIVNSSEIIKNYSKNDFLLKFREEIDTCRTLLSSGYTNKIVQLIDVRVFLYPVDDIVSLYDDFKKEVSK

SEQ ID NO: 55391 - protein, 587 aa, Yersinia enterocolitica subsp. enterocolitica 8081
MDELKKKFHKHKSRFKIITQSNQNVAERNIFIYTQERVIERDFENVKVDFFIIDEFYKLAPNSDTDYRCDRLNIAFHKLYHKCKRFYMLGPNIDGIMDGLEDDLNCSFVKFDKYKTVAADEFYYKLESDGKDELVDIERDKHLIKILNTINKEEQTVIYCKSPKRANGLMSKILSMGLTNRCIDNESFTKWLRDNYHPEWNLANAIDYGIACHHAKLPRAIGSFLVDSFNKKRISILVCTSTLIEGVNTNAKNVIIYDDCITGRTKLDSFTFNNISGRSGRMFEHFVGKIHIIGNRPNQQLPLIDIPIITQSDNASDSMLLQIQSDLSETSLSKIFKYTHQQILPIEVINKHQGVPPERLLTFAEALMEHCGKWQVASGKWQVASGKWHKDMVWDSLYPTKNQLNHLCEILFKYFSLSRMGNGAVKSASQLHTRLRSVMNHESDLKLIDDEYSYWVKRNSNYTADDAVQVIFDFKRNLVSYNLPKIILAINDVQKLIFSRFNYTFGDYTSFSHALEAHFEIPTLVTLEEFGIPMQISKKITKLANVTVDDDIDEALEKINKFSEEKRISNLLDDFEISLLENVVYFI

SEQ ID NO: 55392 - protein, 479 aa, Yersinia enterocolitica
MKMDDYPKGKIYIFKSQKDASIRRGTCFSISNRVVLTAKHTVETDGEYSLFLSPDDFMSGVGVKLKLLAGYNNAQADFVLLECVDYEFPSYIQAGVVDLEVDEKIHVFGFPVEKDQIPAAFTSTVSCITGNITTAKHSFEIAQVSTVSNYKGMSGSPVLFNGYVVGMLIVQHGSTTLHVLSISDIYSKLGVSFHHFRLQASVREEIEYMPPEHPDTPFEICIDCNKTVPNVKGIDIGFEYNEWRKSDLIEYTKDWLIDYSLTAQHKKAIDNRPAKQLAEAIKKYPIDNQNALGDLFLHMAIRQNHKTIPVINGVYHINGELLFSCSRIVINGGQIELWLGASSIKDSMDEAILSVIENINNLISVNEIKTRLLVITSEIDEDWPFKEKLRKLADNQLPIENRVDKIILPIFIVNSSEIIKNYSKNDFLLKFREEIDTCRTLLSSGYTNKIVQLIDVRVFLYPVDDIVSLYDDFKKEVSK

SEQ ID NO: 55393 - protein, 415 aa, Yersinia enterocolitica
MDELKKKFHKHKSRFKIITQSNQNVAERNIFIYTQERVIERDFENVKVDFFIIDEFYKLAPNSDTDYRCDRLNIAFHKLYHKCKRFYMLGPNIDGIMDGLEDDLNCSFVKFDKYKTVAADEFYYKLESDGKDELVDIERDKHLIKILNTINKEEQTVIYCKSPKRANGLMSKILSMGLTNRCIDNESFTKWLRDNYHPEWNLANAIDYGIACHHAKLPRAIGSFLVDSFNKKRISILVCTSTLIEGVNTNAKNVIIYDDCITGRTKLDSFTFNNISGRSGRMFEHFVGKIHIIGNRPNQQLPLIDIPIITQSDNASDSMLLQIQSDLSETSLSKIFKYTHQQILPIEVINKHQGVPPERLLTFAEALMEHCGKWQVASGIRIWCGIRYIQPKISLIIYVKFYLNIFLYQEWGMEL

SEQ ID NO: 55394 - protein, 479 aa, Yersinia enterocolitica
MKMDDYPKGKIYIFKSQKDASIRRGTCFSISNRVVLTAKHTVETDGEYSLFLSPDDFMSGVGVKLKLLAGYNNAQADFVLLECVDYEFPSYIQAGVVDLEVDEKIHVFGFPVEKDQIPAAFTSTVSCITGNITTAKHSFEIAQVSTVSNYKGMSGSPVLFNGYVVGMLIVQHGSTTLHVLSISDIYSKLGVSFHHFRLQASVREEIEYMPPEHPDTPFEICIDCNKTVPNVKGIDIGFEYNEWRKSDLIEYTKDWLIDYSLTAQHKKAIDNRPAKQLAEAIKKYPIDNQNALGDLFLHMAIRQNHKTIPVINGVYHINGELLFSCSHIVINGGQIELWLGASSIKDSMDEAILSVIENINNLISVNEIKTRLLVITSEIDEDWPFKEKLRKLADNQLPIENRVDKIILPIFIVNSSEIIKNYSKNDFLLKFREEIDTCRTLLSSGYTNKIVQLIDVRVFLYPVDDIVSLYDDFKKEVSK

SEQ ID NO: 55395 - protein, 384 aa, Yersinia enterocolitica
MDELKKKFHKHKSRFKIITQSNQNVAERNIFIYTQERVIERDFENVKVDFFIIDEFYKLAPNSDTDYRCDRLNIAFHKLYHKCKRFYMLGPNIDGIMDGLEDDLNCSFVKFDKYKTVAADEFYYKLESDGKDELVDIERDKHLIKILNTINKEEQTVIYCKSPKRANGLMSKILSMGLTNRCIDNESFTKWLRDNYHPEWNLANAIDYGIACHHAKLPRAIGSFLVDSFNKKRISILVCTLTLIEGVNTNAKNVIIYDDCITGRTKLDSFTFNNISGRSGRMFEHFVGIIHIIGNRPNQQLPLIDIPIITQSDNASDSMLLQIQSDLSETSLSKIFKYTHQQILPIEVINKHQGVPPERLLTFAEALMEHCGKWQVASGKWQVA

SEQ ID NO: 55396 - protein, 479 aa, Yersinia enterocolitica; identical to SEQ ID NO: 55390

SEQ ID NO: 55397 - protein, 587 aa, Yersinia enterocolitica; identical to SEQ ID NO: 55391

SEQ ID NO: 55398 - protein, 479 aa, Yersinia enterocolitica; identical to SEQ ID NO: 55394

SEQ ID NO: 55399 - protein, 384 aa, Yersinia enterocolitica; identical to SEQ ID NO: 55395

SEQ ID NO: 55400 - protein, 479 aa, Yersinia enterocolitica; identical to SEQ ID NO: 55392

SEQ ID NO: 55401 - protein, 580 aa, Yersinia enterocolitica
MDELKKKFHKHKSRFKIITQSNQNVAERNIFIYTQERVIERDFENVKVDFFIIDEFYKLAPNSDTDYRCDRLNIAFHKLYHKCKRFYMLGPNIDGIMDGLEDDLNCSFVKFDKYKTVAADEFYYKLESDGKDELVDIERDKHLIKILNTINKEEQTVIYCKSPKRANGLMSKILSMGLTNRCIDNESFTKWLRDNYHPEWNLANAIDYGIACHHAKLPRAIGSFLVDSFNKKRISILVCTSTLIEGVNTNAKNVIIYDDCITGRTKLDSFTFNNISGRSGRMFEHFVGKIHIIGNRPNQQLPLIDIPIITQSDNASDSMLLQIQSDLSETSLSKIFKYTHQQILPIEVINKHQGVPPERLLTFAEALMEHCGKWQVASGKWHKDMVWDSLYPTKNQLNHLCEILFKYFSLSRMGNGAVKSASQLHTRLRSVMNHESDLKLIDDEYSYWVKRNSNYTADDAVQVIFDFKRNLVSYNLPKIILAINDVQKLIFSRFNYTFGDYTSFSHALEAHFEIPTLVTLEEFGIPMQISKKITKLANVTVDDDIDEALEKIKKFSEEKRISNLLDDFEISLLKNVVYFI

SEQ ID NO: 55402 - protein, 479 aa, Yersinia enterocolitica
MKMDDYPKGKIYIFKSQKDASIRRGTCFSISNRVVLTAKHTVETDGEYSLFLSPDDFMSGVGVKLKLLAGYNNAQADFVLLECVDYEFPSYIQAGVVDLEVDEKIHVFGFPVEKDQIPAAFTSTVSCITGNITTAKHSFEIAQVSTVSNYKGMSGSPVLFNGYVVGMLIVQHGSTTLHVLSISDIYSKLGVSFHHFRLQASVREEIEYMPPEHPDTPFEICIDCNKTVPNVKGIDIGFEYNEWRKSDLIEYTKDWLIDYSLTAQHKKAIGNRPAKQLAEAIKKYPIDNQNALGDLFLHMAIRQNHKTIPVINGVYHINGELLFSCSHIVINGGQIELWLGASSIKDSMDEAILSVIENINNLISVNEIKTRLLVITSEIDEDWPFKEKLRKLADNQLPIENRVDKIILPIFIVNSSEIIKNYSKNDFLLKFREEIDTCRTLLSSGYTNKIVQLIDVRVFLYPVDDIVSLYDDFKKEVSK

SEQ ID NO: 55403 - protein, 384 aa, Yersinia enterocolitica
MDELKKKFHKHKSRFKIITQSNQNVAERNIFIYTQERVIERDFENVKVDFFIIDEFYKLAPNSDTDYRCDRLNIAFHKLYHKCKRFYMLGPNIDGIMDGLEDDLNCSFVKFDKYKTVAADEFYYKLESDGKDELVDIKRDKHLIKILNTINKEEQTVIYCKSPKRANGLMSKILSMGLTNRCIDNESFTKWLRDNYHPEWNLANAIDYGIACHHAKLPRAIGSFLVDSFNKKRISILVCTSTLIEGVNTNAKNVIIYDDCITGRTKLDSFTFNNISGRSGRMFEHFVGKIHIIGNRPNQQLPLIDIPIITQSDNASDSMLLQIQSDLSETSLSKIFKYTHQQILPIEVINKHQGVPPERLLTFAEALMEHCGKWQVASGKWQVA

SEQ ID NO: 55404 - protein, 479 aa, Yersinia enterocolitica; identical to SEQ ID NO: 55392

SEQ ID NO: 55405 - protein, 384 aa, Yersinia enterocolitica
MDELKKKFHKHKSRFKIITQSNQNVAERNIFIYTQERVIERDFENVKVDFFIIDEFYKLAPNSDTDYRCDRLNIAFHKLYHKCKRFYMLGPNIDGIMDGLEDDLNCSFVKFDKYKTVAADEFYYKLESDGKDELVDIERDKHLIKILNTINKEEQTVIYCKSPKRANGLMSKILSMGLTNRCIDNESFTKWLRDNYHPEWNLANAIDYGIACHHAKLPRAIGSFLVDSFNKKRISILVCTSTLIEGVNTNAKNVIIYDDCITGRTKLDSFTFNNISGRSGRMFEHFVGKIHIIGNRPNQQLPLIDIPIITQSDNASDSMLLQIQSDLSETSLSKIFKYTHQQILPIEVINKHQGVPPERLLTFAEALMEHCGKWQVASGKWQVA

SEQ ID NO: 55406 - protein, 479 aa, Yersinia enterocolitica; identical to SEQ ID NO: 55392

SEQ ID NO: 55407 - protein, 580 aa, Yersinia enterocolitica; identical to SEQ ID NO: 55401

SEQ ID NO: 55408 - protein, 479 aa, Yersinia enterocolitica
MKMDDYPKGKIYIFKSQKDASIRRGTCFSISNRVVLTAKHTVETDGEYSLFLSPDDFMSGVGVKLKLLAGYNNAQADFVLLECVDYEFPSYIQAGVVDLEVDEKIHVFGFPVEKDQIPAAFTSTVSCITGNITTAKHSFEIAQVSTVSNYKGMSGSPVLFNGYVVGMLIVQHGSTTLHVLSISDIYSKLGVSFHHFRLQASVREEIEYMPPEHPDTPFEICIDCNKTVPNVKGIDIGFEYNEWRKSDLIEYTKDWLIDYSLTAQHKKAIGNRPAKQLAEAIKKYPIDNQNALGDLFLHMAIRQNHKTIPVINGVYHINGELLFSYSHIVINGGQIELWLGASSIKDSMDEAILSVIENINNLISVNEIKTRLLVITSEIDEDWPFKEKLRKLADNQLPIENRVDKIILPIFIVNSSEIIKNYSKNDFLLKFREEIDTCRTLLSSGYTNKIVQLIDVRVFLYPVDDIVSLYDDFKKEVSK

SEQ ID NO: 55409 - protein, 429 aa, Yersinia enterocolitica
MDELKKKFHKHKSRFKIITQSNQNVAERNIFIYTQERVIERDFENVKVDFFIIDEFYKLAPNSDTDYRCDRLNIAFHKLYHKCKRFYMLGPNIDGIMDGLEDDLNCSFVKFDKYKTVAADEFYYKLESDGKDELVDIERDKHLIKILNTINKEEQTVIYCKSPKRANGLMSKILSMGLTNRCIDNESFTKWLRDNYHPEWNLANAIDYGIACHHAKLPRAIGSFLVDSFNKKRISILVCTLTLIEGVNTNAKNVIIYDDCITGRTKLDSFTFNNISGRSGRMFEHFVGIIHIIGNRPNQQLPLIDIPIITQSDNASDSMLLQIQSDLSETSLSKIFKYTHQQILPIEVINKHQGVPPERLLTFAEALMEHCGKWQVASGKWQVASGKWQVASGIRIWCGIRYIQPKISLIIYVKFYLNIFLYQEWGMEL

SEQ ID NO: 55410 - protein, 479 aa, Yersinia enterocolitica; identical to SEQ ID NO: 55390

SEQ ID NO: 55411 - protein, 422 aa, Yersinia enterocolitica
MDELKKKFHKHKSRFKIITQSNQNVAERNIFIYTQERVIERNFENVKVDFFIIDEFYKLAPNSDTDYRCDRLNIAFHKLYHKCKRFYMLGPNIDGIMDGLEDDLNCSFVKFDKYKTVAADEFYYKLESDGKDELVDIERDKHLIKILNTINKEEQTVIYCKSPKRANGLMSKILSMGLTNRCIDNESFTKWLRDNYHPEWNLANAIDYGIACHHAKLPRAIGSFLVDSFNKKRISILVCTSTLIEGVNTNAKNVIIYDDCITGRTKLDSFTFNNISGRSGRMFEHFVGKIHIIGNRPNQQLPLIDIPIITQSDNASDSMLLQIQSDLSETSLSKIFKYTHQQILPIEVINKHQGVPPERLLTFAEALMEHCGKWQVASGKWQVASGIRIWCGIRYIQPKISLIIYVKFYLNIFLYQEWGMEL

SEQ ID NO: 55412 - protein, 538 aa, Yersinia enterocolitica
MESNDSGGVAAKHGFFFQDCVAAYHVTRMLRDKSIRSVRCEVTDDIDIVSDGYIDFVQVKSTGKTRWNISDIVQNSKGADKKPIPCSSILHKSMQCESDLFLGRRYSIVTEEKVNKTLEYLTISPTARLDKPGRQELIDDLNKRTNNYLTDSGISVSNWIDAATWEVFSSLRELELLGIKNIRLASHDLHGVILSSETVAEDIWCRILDTVTRKGEHSRRIHSVNDKSCLRPDLLEWFKQRVEDDQSRSGRKIYVKRDLPHILTPFRAPMASVCAKRKGLVLHQQYSLKKYRYKHIADNVCQWLDEVFLRPKELSDIHKLTLIEKRERLKNSVFKSLHDVSEFLGRVLLHATIRQHHESQPIPCMLYVEKAGAEKILENVHIVRRDPEGDQLWIGFSELVTNIDIAVRLPEIRDQLYEDISDCIDTARRKILDIKDDNYLLRHDIDEILDGSRPFDAHLDRFTFVLFVGYDSRLLTEPETPGFEGGLEKETTALFEKFAADLIEDSPFANLCIHVFIYPAPSLERLTQLVDEKVREVV

SEQ ID NO: 55413 - protein, 729 aa, Yersinia enterocolitica
MTEVYEQAKHSLQGEDFSSFNYLFAVNKLLSNPVSYDLGRDLIVRALDSRERFSEHTTILKNMVRKSGLFPYLKKEFTSLTPDDLRVLELYRTPFSDGFVFHSMQFHIFDLLKSGQNVVLSAPTSMGKSAIVDSLLGMGTLKRLVLVVPTVALADETRRRLQERFGDRYQIIHHSSQVCHSDQAVYVLTQERVNERDDIVDIDLFVIDEFYKLAFRQLKSGDIDHQDERVIELNIALSKLLKVSRQFYLTGPFVNSIRGLERLGYPHTFVSTDFNTVALDVKTFGIKANDDKAKLNALGEIAHACVDATIIYCKSPTVAGQVARELIRLGHSTPTESPHVDWVSEEFDADWDYTVALRNGIGLHFGALPRALQQYTADQFNAGKLRFLLCTSTIIEGVNTIAKNVVIYDNRDGTRSIDKFTHGNIKGRAGRMGVHFVGKIFCLEDIPEDNLNQEVDIPLGIQDIDTPINLLASVQPDHLSEFSQDRFDEIFINDHVSIDLVKKHSYFRVEQFEMLQSMFEMMDDSEFSSLVFHWTPATNFLKTFAKIIARLVPHTFSRNGVPVKPTDVMIAKLAGYLSAESYSEYLKNQIVYARQRVYEGEKRTLSDALNNDLKLITNTFGYTLPKVLSLMEDVVKYHALKRGIRSKVDYTHVKMTFENFHLPPGVNALEEIGIPIQTLHRLVDLLEFSDQTDVDGLCQYLRDTQDVWSRTIGFVDQTFIRRALGIEQH

SEQ ID NO: 55414 - protein, 479 aa, Yersinia enterocolitica; identical to SEQ ID NO: 55392

SEQ ID NO: 55415 - protein, 384 aa, Yersinia enterocolitica; identical to SEQ ID NO: 55405

SEQ ID NO: 55416 - protein, 542 aa, Yersinia intermedia
MSITSLSDAGGPAARQGFKYQDHVAVSFIFKMLRDSNYSQVECETADDIVAVFQCAGQILNEYIQVKTTESDGKWNLKEITALDGTKANSSLLHKSLKCDVRPGIARFRIVTKRDVAKILEGFKKEIDKRVLPDITTTRGVALRKKFKTVVSPQKRDFLYWAENFVWQVYGDVEALEAVNIKALSQLAEGLGNRPNFTQLKAIYEEFLEIADKAATASVKTAAASKIILRAPTLAYLRKLLDEADDKSTATSKPYKKRPDPFLVEFHANTKEGLLHSFSGFDVRYALKKWRHENYAKHLIEWLPEFSLKASEIVNILAHNAETILARSISTFSDSELSRDRLIAELILHSILRSRQNSEPVACKVFYKSAGKLSEFGNAHIVQMPDQDDQLWLGLARLSKANDMDTTLEQIREILDETISETVLSAEREIIISLREPLHHQPKADSFNQALHRNSPVDDMLNILCFPILLTYDSAALSSGWLADYVDNLKIEIETHFSTFTSELPENIKQVKVLIFLVPMESIEHLTKAFNARCEKLEELQA

SEQ ID NO: 55417 - protein, 713 aa, Yersinia intermedia
MNYEKIKNILAKLGEENATTVDVLLAINTIVNRSNSEWEGRDLVIRALDKFKLFDSVEQSLLLNMVRAVGLFPYITPHLSSMAISDRLAYEAHRVEGVEQGMVFHHLQAHVFSLIMQGRNVVLSASTSVGKSLVIDAVLAQRRFKKVVVIVPTIALIDETRRRLVKRFKDFNLITHPSQESVIETTNVYLLTQERVIQRPDLADVEFFVLDEFYKIDLGNSTDESTRAVDLSLAFHKLAKTGAQFYMLGPHIQKISGLDDYEYHFIPSDYSTVAVDIQNFNLEMRSEERKEKLLELVTTLDSPTLIYCQAPPSANRVAEYLIQEAGLTPVPETQEIAEWISKHYHPEWNVAKAISLGIGIHHGGVPRALQQYIVKLFNDGIIKRIICTSTMIEGVNTSAENVIIYDRRLKNSTFDYFTYKNISGRAGRMNKYFIGKVFMLEAPPLEQGLTVEYPIGHQDENSPMGLLMQLENEYLTDISRGRLQDAYANPVLSPTTLIENRHVPIERQVEVAETIIRDLLPSSKLLDWKGIPEPNQLNYLCELVYSLEGGNLMDYGISSSLQLVWHINELRTQKNLPAYLRDAVENRRQEHTPSEAINLRLKFIRNMVCFRLPRDIMAVNNIQADVLAKKGIEPGDFSFFAEQLENMFLDPLLTALDEYGIPTQISAQLKNLILPSEHLNDLLEKLRTLAPRIEHLQLTGFEKSLMCWAVSEM

SEQ ID NO: 55418 - protein, 314 aa, Yersinia intermedia
MDALQTALEKLIRDDGDTIYSYFHELKSDCLVDGTSAACHFHCINLDGNGRPKVDALVQYLVGKVIDYAIPRKKINEAIRYQQETGSTLKIVKLFTQAMGLFTRLSNSGEGGELILFLFAEKFLKLPQIICKMNLKTSSQMHYHGADGVHIGVDKDNKKLCLYWGESKLYSDLTQAIYKCMKSITPLITSTMGSGSADERDIQLLSDFMNIDDPVLEIALKKFLDPDQPEFNKLEYRGICLVGFDIDDYPKDPNSLTISGLAEKFNEKLDGWKNGVKKRIIEESIHGFSLHVFLVPFPSVEEFRKTLLASLGGE

SEQ ID NO: 55419 - protein, 859 aa, Yersinia intermedia
MSMKELPNWLVNNSGFINKLKNLTIRSVIDQFPSVRHIEKENGRVDSLGYLLTCGSILSHSEDAICQDAALRISQYCLLNETSKQRKDSAALILDALTNNATVELAIRKGLLDKGFEERLPVAGQLETTKRKIQHTIEVGDNKYIYANKFQSEFWDSATNNGWVSISAPTSVGKSFILESWVEDFIHRKDKTLVVYLVPTRALISEVYESLVSKLDPYRTGEVNIQTLPLKSSYDSSRSNVFIFTQERLNIFYNSLNKTPVVDLLIIDEAHKIGDSLRGIFLQYVLEMTCAKNKDLDVIFASPFTSNPELLLLDAPYNGRKSVVKSSYVTVNQNLIWLEQKPNTPKEWSMFLFFRGEKNKIGDLTLQNTPSPESKRLSFIALSLGRHTSGNIIYVNGAADAEKTAKQVADGLEEISEDQEIHDLIELSRKVIHERFALNFTLNKGVAFHYGNMPLIIKGEVERLFTKGKIRYLVCTSTLVEGVNMACKNIFIRGPKKGSGIPMKEDDFWNLAGRAGRWGKEFQGNVICIDTNNERLWNGVPPISKKNIKITRATDSLNNEIDNIFDYIDSRNHYGMTRSNPNLQGLFSYLCVSYYLHDGLVNNPYIEKYALDRIEEIDEKISDVINLLDFPLEVIVRNPGISPILMQDLWGLFSNYDLNAIEKLLLADPSSDNALDSYIAAFTRICHTMSIELGYNSKGAFVVALLVVNWMRGYPLARLISERIGYYKRKKKEYKEPSVIRNVMEDVERIARYQAPKLLSCYNDLLKHYYISKDRLDLVEKIEDIGVYLELGVSIKTQISLISIGFSRTSAVMISEYITNDNYDEISCIKWIEENSKYLEDLPALVKLEIYSIVNGILL

SEQ ID NO: 55420 - protein, 482 aa, Yersinia pseudotuberculosis
MINGNLEEFNLECIYLLSALLPNASIRRGTCFSIAKDLLLTANHVVNGASSIQIFLSSDLFSLGQGIDAECIYSNENLDIAILAVPEGTTNNAMPLYSTAVNLDSDVKSCGYPVEKEHYHAPIRVKVTNTFSHMSSREYSFEVSQSNTVTKYSGMSGSPIMHEKYCIGILLVQQGGNTLYALSVKDFLIDTVLQDIMNKYDVKITVQDGIEYKSPDYPSSPFKYCINCNADHPNIKGIDIGFTMKQWNISEFAESVYDWIIDYSLSHKEKTNFNGSDRSLFKYARSNYPVDDLNALGDLCLHIALRESYSTIPIMNKVFDINNKTFSCTHAVLNFDGIELWIGASAVTQNIEEATLSAIERIKYIMDVKSLKNRLIMLTSEIDASWPHREKLKRLADSNLELEERFDKIIIPVFIMHDSELIKNYNKDNFLLLFNEKVASCRELLKKDIEGSIINLIDLRVFYFPVSDINEVNGALQKELNS

SEQ ID NO: 55421 - protein, 720 aa, Yersinia pseudotuberculosis
MSQWYQEAKNQLNNPMFSQWDDFLLSLVNEFNGHVNESLVQDIVIRAMERKSEMTNGFILDHILGELGLFPYIDNNNNTSKDEFRKAIFTTPQDETKIFHIRQAEVFHRIMTGENVILSAPTSFGKSLIIEALIASNEFNNVVIVVPTIALIDELKKKLYKYKDNYKIITQVSQQPSERNVFILTQERVLEYSISSVDFFIIDEFYKLAPSSKNDERCDRLNLAFKELYSKCKRFYMLGPRINGLFSGIEQELRCIFLRFDSYTTVATNEFYHKLKTTGTDAKVDVERDEILKDILSNVGRNEQTVIYCKSPKRVSSLMCRLLAANILSPDSANDDLASWLSVNFHDKWSLIDGVRHGIAYHHAQLPRAVGSLIVDLFNESKINILICTSTLIEGVNTNAKNIIIYDDCITRRTKLDMFTFNNISGRSGRMFEHYVGNVFIFGEKPQIELPYIDIPVVTQSENASESLLLHLGQDVNDENKNRVRKFYEQDVLPVQILLKHQGIDPNKLINFAEKLISKCNAWNPLMRWDSIYPTSNELLHLSSILFDNFNVSSMGGGTVRSALQLHKKLCDVINKVDDKTLILDDFNFWRGRDNTYSIDDAVQSVFNFKKSLVNYNLPILIYAVSDIQEVIFKRFGYKYGDYKPFASTLENFYYPAAVNSLEEFGVPNQIAKKIINNNHFDNADDIDSVISSLVLKGKDSYPYLTDFEIGFIKKALSYM

SEQ ID NO: 55422 - protein, 304 aa, Aeromonas hydrophila
MDFDILIDEHFVGLCQRGDLSPIDNKYVLSIINDYEDEQWRYKKFQNFIWDNIAETALSHSERQCLINQSHSILTAAAQNLRLTDKEGDIGKGSELAEIVLYGIMKHHYNALPVVPKIFYKQNAQDNAKGADCVHITIQDGDFALWFGEAKFYNSIEDSRLSSIISSVGNSLNTEKLKKENAIITNISDLHGLIDDPMLKKEIQSALSNRNSIDNLKHKIHIPILILHECEITRRSIQLDDEYKASIIKYHTERAHSYFEKQISAIGKISKYGDVKFHVILFPVPHKSFIVDKFIQNVEHYKEQ

SEQ ID NO: 55423 - protein, 694 aa, Aeromonas hydrophila
MLDIFTSCHKINDLITSGSENNAREELIKLLDYHEREGISYSPLLNSLIRQVGLYPYLQTETSSWQDQFVYESFKTNVGPDTKLTLHREQSSVLKRLLEGQNLAVSAPTSFGKSFIIDAFISIKRPKNVVIIVPTIALTDETRRRLQKKFSNEYKIITTSDVEISEKNIFIFPQERSINYLEKIDEIDILVVDEFYKASQKFDKERASSLTKAIIKLSTKARQKYFLAPNISSLNDNILTKDMVFLPIDFNTVFLEMNELYKEIKKDENLKSETLLNILNSTKGKTLIYAGTYPNINKVATLLIGNKFPIPGEKLKAFEKWLTINYERNWNLTSLVKRGCGIHNGQMHRSLSQIQIRLFEEEDGLKNIISTSSIIEGVNTSAENVVIWANKNGQSRLNDFTYRNIIGRGGRMFKHFIGKIYILEEPPVSEDVELNLNLPDNILSSIDSEEIRQDLTPEQISKIIAYENEMSDLLGDETFTMMKGNSIFDSSDGYLIRDIARDISSNKDEWNGLGFLNSAFPDDWDRFLYKAINFHPGGWGIEYWKFVEFIKVISNNWNKSIPELLEELEQYDIGIDDFFKLERNITFKLSATFNDINILQKKMLEKPTDISPFISKLSHAFLPPLVYQLEEYGLPRMITKKIHQANIINFEHPEIELHIVLNIFKTIPFDILTTLVPDLDVFDKYILSYFYDGI

SEQ ID NO: 55424 - protein, 299 aa, Aeromonas salmonicida
MDAYLQPQLKNHQEIKNILKQVNVTHVLSDGRKVKTLLVYLPIKNGVSSHDEFFEKIKNGILYNFVFSCREIEKKLGLEDTNSAKRLFDRAIRKISQKTAKGELGELILFTLLDVYFKAPKILSKISLKTNPRMPVFGADAVHGQYINGEFRLYLGESKLYKSFKSAASEAAKSIKTAKDKYSDEFDLLESYMDFPNIDSELEEKLLNLLDPFSENDISELIHSPCFIGFAEPEIIGQAVTEDDFVIKYSELALAYIGDFYHQVEHHGSNIEEVALIMLPFSCVDVLVDDFKAYLGIKK

SEQ ID NO: 55425 - protein, 833 aa, Aeromonas salmonicida
MSDFSTKLAAKIKGSNGYIEASNSLFGSYVLWLTGTTELVEREEVKKLITSAQVFYKSSDEKIRNEGAIILSILLDICADQYPDLVPIARNMFTNAGDFPNIKLLSKRHPRVNFSYNFYSEAQMDFRERLNTVDDLDFPLTDYQRSLWINLSSDEDIITVAPTSAGKTHIILSYLLKRLAESDGAFAAIVVPTRALISEVAGKLYKLAQDNNVENDIEICSVPKEGDFGSKTFFVMTQERLYELLQRGDIYFNYLFIDEAHNISDKSRGVLLHLAIERLLEDSFPQVIISMPAENYQDAFSTIFGEIEFKKEITKHSPVSKILISVMPKGKSLVISRHNSNNVKTIPKGFKDKNLADIVFKLGYGHSNIIYRSRTADCEKIADDIAKLIPQNLDNELLSEAADYVENFIHSDFSLANNLRKGVAFHYGPLPSSIRIMVENLAKDDHIKYIACTSTLAEGVNLPAKNLFMKNPIQPIMHQPSERVEDVKINNITGRAGRMLQHFSGNVFMVEPDDWQFDDYFDDEQGKEEKIPTYFKTLNEDLHNVISALQGRYPHDEENQYRYYMISNKLIKEYARDELDKTFSANELQLSRQDLSLLEREIKMAYGKLRITPFTLEASPTVGYIQQNKLFDYLNALSSYDDWILPHPKSAELYDTLLRVSSKLQQFGIYIPTENYPLDYICLITKKWIKGKTLKDIITEQINWNRANKEQATSVNTSVRNVIKVINNDITFRLSNALRCYQVLLSTVLLNKGVDLSSVKLHSFIEVGASDDRIISLINFGLSREAAIEIHQVLPRDIELHSTNALLELYHTNQMSTIHPIIKKELLKLLASE

SEQ ID NO: 55426 - protein, 538 aa, Aeromonas allosaccharophila
MESNDSGGVAAKHGFLFQDCVAAYHVTRMLRDKNIRSVRCEVTDDIDIVSDDHINFVQVKSTDKSLWSTAQITKDSKGVKNKTIPCSSILHKSMQCESGVALGRRHSIVTEEKVNKTLEYLMISPNARPGKPGRQQLIDELNKRTGNYQTASGISVADWVDAATWEVYHTLRELELLGIRNIRMASEDLHGVILSSETVAEEIWCRILDTVTRKGEHSRRIHSADDKSYSRPDLLGWFKLRVEDDQARSGRKIYVKRDLPHILTRFRAPMASACAKRKGQVMHQQYSLKQYRYKHIADNVCQWLDEVFLRPKEMSDIHKLTLVEKRERLKTSVFKSLHDVSEFLGRVLLHTTIRQHHESQPIPCMLYVERPGSEKILENVHIVRRDPEGDQLWIGFSELVTDVDIAVRLPEIRDRLYEDISECIDTARRKILDVKDDDYLLRHDIDEILDGSRPFDAHRDRFTFVLFVGYDSRLLTDPETPGHEDDLEKETAALFEKFAADLIEDSPFADLCVHVFIYPAPSLERLTQLVEDKVREVV

SEQ ID NO: 55427 - protein, 727 aa, Aeromonas allosaccharophila
MTRVYEQAKHSLLEDDFSSFKYLSAINRLLSNPVSHDQGRDLIVRALDARERFSDHTTILKNMVRKSGLFPYLKKEFANLTPDDLRVLDLYRTPFSDSFVFHSMQFRIFDLLKAGKNVVLSAPTSMGKSAIVDSLLGQGTLKRLVLVVPTVALADETRRRLQERFGDRYQIIHHSSQECHSDLAVYVLTQERVNERGDIVDIDLFVIDEFYKLAFRELKNGTVDYQDERVIELNIALSKLLKVSKQFYLSGPFVNSIRGLERLGYPHTFVSTDFNTVALDVQTYNIKANDDEAKINALAEIARACVGATIIYCKSPTVAGLVARELVRLGHGTPTASPHIDWISEEFDADWDYTVALKNGIGLHFGALPRALQQYTVDQFNAGKLRFLLCTSTIIEGVNTVAKNVVIYDNRDGIRSIDKFTHGNIKGRAGRMGVHFVGRIFCLEEIPEDNLNQEVEIPLGIQDIDTPLNLLASVQPDHLSEFSQDRFNEVFASDRISIDLVKKHSYFRVEQFEELQRMVEMMDDIEFSSLVFHWTPAPNFLKTFAKIIARLVPHTFSRNGVPVKPTDVMVAKLAGYYNAASFSDYLKNQIVHARQWVSEGEKRTLSYSINNDLKIITNTFGYTLPKVLSLMEDVVKHHALKQGIHSKIDYTHVKLVFESHHLPPGVNSLEEIGIPIQTLHRLVDLLEFPDQADVDELGQYLRDTQDVWSRSIGYVDQTFIRRAIGTG

SEQ ID NO: 55428 - protein, 299 aa, Aeromonas allosaccharophila
MDAYLQPQLKNHQEIKNILKQVNVTHVLSDGRKVKTLLVYLPIKNGVSSHDEFFEKIKNGILYNFVFSCREIEKKLGIEDTNSAKRLFDRAIRKISQKTAKGELGELILFTLLDVYFKAPKILSKISLKTNPRMPVFGADAVHGQYINGEFRLYLGESKLYKSFKSAASEAAKSIKTAKDKYSDEFDLLESYMDFPNIDSELEEKLLNLLDPFSENDISELIHSPCFIGFAEPEIIGQAVTEDDFVVKYSELALAYIGDFYHQVEHHGSNIEEVALIMLPFSCVDVLVDDFKAYLGIKK

SEQ ID NO: 55429 - protein, 833 aa, Aeromonas allosaccharophila
MSDFSTKLAAKIKGSNGYIEASNSLFGSYVLWLTGTTELVEREEVKKLITSAQVFYKSSDEKIRNEGAIILSILLDICANQYPDLVPIARNMFTNAGDFPNIKLLSKRYPSVNFSYNFYSEAQMDFRERLNTVDDLDFPLTDYQRSLWVNLSSDEDIITVAPTSAGKTHIILSYLLKRLAESDGAFAAIVVPTRALISEVAGKLYKLAQDNNVENDIEICSVPKEGDFGSKTFFVMTQERLYELLQRGDIYFNYLFIDEAHNISDKSRGVLLHLAIERLLEDSFPQVIISMPAENYQDAFSTIFGEIEFKKEITNHSPVSKILISVMPKGKSLVISRHNSNNVKTIPKGFKDKNLADIVFKLGHGHSNIIYRSRTADCEKIADDIAKLIPQNLDNELLSEAADYVEKFIHSDFSLANNLRKGVAFHYGPLPSSIRIMVENLAKDDHIKYIACTSTLAEGVNLPAKNLFMKNPIQPIMNQKSERVEDVKINNITGRAGRMLQHFSGNVFMVQPDVWQFDDYFDDEQGKEEKIPTYFKTLNEDLSNVISALQGRYPHDEENQYRYYMISNKLIKEYARDELDKTFSANELQLSRQDLSLLEREIRMAYGKLRITPFTLEASPTVGYIQQNKLFDYLNALSSYDDWILPHPKSAELYETLLRVSSKLQQFGIYIPTENYPLDYICLITKKWIKGKRLKDIITEQINWNRANIEQATSVNTSVRNVIRVINNDITFRLSNALRCYQVLLSTVLLKKGVDLSSVKLHSFIEVGASDDRIISLINFGLSREAAIEIHQVLPRDIELHSTNALLELYHTNQMSTIHPIIKKELLKLLASE

SEQ ID NO: 55430 - protein, 521 aa, Vibrio alginolyticus
MSLDLSRLLSVKVINSDTGSGSGVIYKRSGFAYVITAKHCICPNSTRVCKQKNRECSNCLLTNSYAFKKTKISIETPDKTPSISLKPKDILAPKNKDIAIVVVKDQDLDQLEDLPELSIADNRYLLDEGLYVSYGYPSATSSIESIPVIFDFCSAVGTELYFKISSNTIANLESAKYNMDAASGMGVLCNKTSKLAGIYVKTDDYSGSYSEYIDESINTLLSEKGYNVLDINNEHEKLKSLITNEFLSCFEKIDHNLTLGLERNLDLYTIKFNGKSIDYNNLIERIYECLHLFCIPRKVIHDLKLAKKERQLHKSADKEFIALKSDSKVFDLMLQGFLESEYGMPKLFTSMVGNKDTKSIHVNINNRSKHELVHGVSHFGDHINDVFIEAVDKLYDCACKTESPTELISSNIFDSTFNEEDKLFLTSILMPKEEKKAVESIDSYAVLIGFNVNFSCVNGLVGHESYKKQVIDLIIKTVSDNISSLAQSLSKVDAIDTEIKIFFIPFENVSSFKDDVVEGLQ

SEQ ID NO: 55431 - protein, 850 aa, Vibrio alginolyticus
MSSRFGDFLAERVISDNYFNKLFLKLVESHAKSTIENQFYLSLDRSLLKDLFRFTHIICNSNRSKDRTLAYHIVALLEPFCKDNAEYRVLYNTVLYKLGLFALEIDGQSLNDDNYIELSVKKKINNISGTKYVLTDAQNEIFKKMSHSNVFSFSGPTSLGKSFIIDRMVEKSISNNRNVAIIVPSRALINQVTNEIRNSLKELLNKNEYSVLNNISGEEKEDRNYIFILTPERLLNLHTKENSLELDDLFVDEAHKLASSGSDSERSLTEYNAIEMTLAKYKNIKVYFSSPNISNPSVFLELFGKNPLYSYHTDEAPVSQNIFLIDVRSSSLRVLANGDFININSDLVDSISNNDDFIINVGKKKHSNMIYCSRGETAVNHAKEFLSKLDDIEISDEVNNAIKAISDLVHEDYYLVKCLKKRVAYHHGKLPHSVRGIVEELFRKGEINYIFCTPTLAEGVNMPTKNIFIICEDKIRYTKNKDSNRVKSLNFWNLAGRAGRYRSELSGNVFCLSSDTKSWDNDLSIFKDKSVNLESTIKKNIKSQAKLVKLERLLSSDKLSSQDVDSTIRYLANIICIDTLRFPKELHKSNTINIFIKANLHRIVELAKAKANDIKNVPLELLNSYKSLDFATHKDIYEIARFHKNSAVLPPFNYENCSSVLNKFHSIYNWEKTESIKKPQISYYNKLMYDWISGRSVNQMIVGSIRYHKENNKKLFIRKGNEVITPTFDGSLEHVNILIEDLFTDLEDVLRFKFERYFNHYFKALVSVNGEGDSGTNWATFLEYGSTNPFEIELQNAGISRFTAINIYRNESLRKYVYKSNDELVIDYKKLLKAFPVNSFEYRELKAMSL

SEQ ID NO: 55432 - protein, 521 aa, Vibrio alginolyticus; identical to SEQ ID NO: 55430

SEQ ID NO: 55433 - protein, 850 aa, Vibrio alginolyticus; identical to SEQ ID NO: 55431

SEQ ID NO: 55434 - protein, 287 aa, Vibrio cholerae
MKNLYKRFSKLIFRFDDAENLEGVDKHPYHLNYERGQYRESDLVKIIRGALPKFALTPEEYKKLVDDDDLDEIYRLAFSRISQAKKNMKGDYGELLLFLILKSFYGADKLVTKVKLRSSVKDQIKGFDCAHFGIDELGNVSLWLGEVKFYKSFSNAVTDIVEEIHQHVTDDYLKNEFSILCPNIEYNNNVEIPEEIIDYLDGTVTLDDVKIVIPALVTYESALLKKHSEVDEDFKEAIKKQFEDKFRIINAKEIKIPKNVEVFFILLPLNDVTSIKTKLETFEEVYK

SEQ ID NO: 55435 - protein, 742 aa, Vibrio cholerae
MKITDVLAEKAYDRIKEHGSPTPSLWKNYTTSNYLKDIYKLLQSEKYYSEGVKNLCFACDLAPVGNFNLSLLKQCIQSARVFLYQDMLKSNGLEFDEDTIFDSSQKAFYSLKSDFILTKEQKDLFDLFSQKRRLVVSAPTSFGKSRVMREIITHNQYKQIVVIVPTNALLSETYFTFRMDERLSRYNLIFSTHIEPSDDNSIYIFTPEKFDVYTDEYDINFDFFVFDEVYKVDSKDSRSSVFSNCLYKAYKKQCDYYLIGPYFNKFSESFIKKTNGYFKRYDTDIVQKIMTNYLYDSEAKVSGVSLKKLKGKDTRLKQIINNIPGQTIVYVGRKDTAETRARKIAELTDKEVSNSELNDLIKYIEKNISKEWRLINCLLRGVAFHHSGIPKYIQTEIVELFNSGVINTIVCTPTLTEGVNTTAKNVVFYDTTKADIDLTGFEVKNIVGRSGRSGRSGRSGRSGRSGRFGQHFVGRAIFLEEHVDQNNIDEINYPIFDYEKIPDEDYIQIDTEDLGVEGRNHKERILRQVDELNIPLSLLKKNKYIPFENQLELIQHFRSNKDLKSRLQIKSGLPEKQQVDVIIKLVHEVLFSSSDRKEAWTTANLSRLVKYQIYFNPSIKDLILEHDAVREDTRIRNVLELVYKYFEFLFPKYLNAFENIFNFVYSDTLSLALMSTHLQYGNDEKYNILLTDAGVPRSIISHLSKYLEGHDTISSIRNVIESNPSILTGLTNIELKMLSKRI

SEQ ID NO: 55436 - protein, 483 aa, Vibrio cholerae
MSTEIVEEFKLDSIYIIQALLPNGNTRRGTCFSISDDLILTANHVVTDATSLKVYLSSDAYAGGEAIDATCIYSNAKIDVAILKVEEGKTSSSIELYRTVVNLDSKVKSCGYPIEKGHYHAPITVEVTNTFTHMTSKDWSFEVSQSNTVSQYKGMSGSPVLYDGRCIGILLVQQGNNTLYSASADDLLKDQSIHEILDAAGIQIVAQQGIEYKSPPHPESPFNYCIHCTSDVPSIKGIDIGFTFEQWNMTNFTETVYNWIIDYSLSHRDRANFNGNPRSLFKYARDNYPASDLNVLGDLCLHIAIRESYSTIPIMNRVFDQNNKTFSCTHAILNFDNIELWIGASSVSTNIQDAVNKAIDNINYIASLQSLKTRLYALTSEIDSSWPHKNKLERLADSSLSLDKRFDKIVIPIFIMHDSDLITDYDKENFLSAFEEKIHECRGLIQSGSINQGFISLIDLKVFYFPVSSIEQLNEALIKELYS

SEQ ID NO: 55437 - protein, 570 aa, Vibrio cholerae
MDELKKKLFKYNQQYKVITQVTQQPSNRNIFIFTQERVLEYKQFSTIDFFIIDEFYKLAPTSKNDERCDRLNLAFRTLYGKCQRFYMLGPKINGLVSGITEELRCTFLKFDSYATVATNEYFYPLETKGKDADVDIERDEKLFEILKDIGRDEQTVIYCKSPKRASSLMTRLLGSGLLIPDNRNNELSEWLSDSFHSRWSLVEGVKHGVAYHHAQLPRAVGALIVDLFNDSKINILICTSTLIEGVNTNAKNIVIYDDCITRKTKLDMFTFNNISGRSGRMFEHFVGNVFIFGERPQIELPYIDVPVITQSDNASESLLLHLGEEVNDENLNKVRKFYDQDVLPVQLLLKHQGVDPNKLIRFAEDLITKCGAWNKKMVWEGIHPNAEQLRHLSKVLFNYFNVSSMGGGTVRTDAQLYRKLIDIINKVDDKTLIVQDYNFWRDGNIEYTVDDAVQSVFNFKKNLVNYNLPKIIYAISDIQEVIFKRFEYSYGDYTPFAASLENFYLPAAINSLEEFGIPNQVAKKIIERAEFEDIDNIDSVIKELSRSRDASFSYLTNFEKTFVIKALSYM

SEQ ID NO: 55438 - protein, 483 aa, Vibrio cholerae; identical to SEQ ID NO: 55436

SEQ ID NO: 55439 - protein, 570 aa, Vibrio cholerae; identical to SEQ ID NO: 55437

SEQ ID NO: 55440 - protein, 483 aa, Vibrio cholerae; identical to SEQ ID NO: 55436

SEQ ID NO: 55441 - protein, 570 aa, Vibrio cholerae; identical to SEQ ID NO: 55437

SEQ ID NO: 55442 - protein, 309 aa, Vibrio cholerae O16 str. 877-163
MNFDVLVEDDFLNICTDQSLEPVENKSILSLANDYQEGKWRHSKFHNFVWDNIAETSLSFSERESLIDQSHSKLVAAAQSLRLTDSDKDIGKGSELAEIILYGIMRHHFGALPVVPKIFYKQNSQDNAKGADSVHIVLDGESDFTIWLGEAKFFNDISDSRLSDIVKSVGNSLVTDKLKRENSIITNVRDIDHLISDGNLLEDIKKVLSQRESIDKIKPKLHIPILIVHECEITASNNRFTDEYKKKIIELHKDRAVAYFKKQIKSLSEIDMYESITFHLILMPVPNKKQIVDRFVSKVKIFKEDAADE

SEQ ID NO: 55443 - protein, 700 aa, Vibrio cholerae O16 str. 877-163
MNNVFENLHDINDLIKANEIDFARNEVIKLLAKIEKDKLEFPEPLNHFIREVGLYPYLNLEKASWQEKFIHESFKVNSGDVDVTLHKEQSALLKKLLEGKDIAISAPTSFGKSFVIDSFIAINKPKNIVIIVPTIALTDETRRRLQIKFSNRYKIITTTDVELGEKNIFIFPQERAINYIGILDSIDILIVDEFYKASRKFDKERSPSLLRAILKLSKIAKQRYFLAPNINHINGSIFTVGMETISLNYNTVFLEKKEVYKQINKDVYTKSDALIDILKKENGKTLIYAGTYSSINEVSNLLIDEMPQTESELLVGFSHWLIKNYDRNWVLTSLVKRGCGVHNGRLHRSLSQIQVKLFEEKNGLNRLLSTSSIIEGVNTSAENVILWRNKNGTSNLNDFTYRNIIGRGGRMFKHFIGNIFLLEEPPKQEENQIDLEFSDELAASIDEKQFSQELTKEQITKIIAYKEEMSEILGKESFERLQEKHAFDDTDTSVILRISRALDESPNNFKGLGYLNSSDPEQWEYSLLKVLEVIPGYIGAPYRKFIEFIKVISQNWSMNFHQLLNRLDQYHIGIDEFFELERKATFKLSSLLNEINIIQQELYPERSIDISSFASKVSHAFLPPNVYTLEEYGLPRMISKKINESKIIDLESDEFSIHDILDLFNKLGYDQMVQRVVDLDYFDKYILKHFYEGIYTPGKY

SEQ ID NO: 55444 - protein, 469 aa, Vibrio parahaemolyticus 50
MGQTAMDQSDSGGVAALKGFTYQNLAAAYYVLNMLRDKSLISVRCEVVDDIDLVYDNKIEYVQVKTTDGDSKWCIKDFAEATTKTVPPTGRQRVNQTISQEDSILHKSIQCDKDKLPGFFRMLTPREVTDSLRYLKVPLGDRGEKIQERGPLLKRLTAAVNRHRKKLSPFSSPNGNDTEYWLDHAEWTVIPNQEHLELLCTKLILQSAHQKGIYLSANEDPERILASLLKNVTDKGATSRVLKTIANKSYHRKDFIPWFNAEIEHYANLSSSHVKVYATSRAELKAILSSFFHDKEMYELVGDKSCTGLHGQYHQRKYSYNIIAKNLHQWLPEVLLLPGEIADNTPENLTRKFSTFTKRYSKNAHFISNLVSKALLHSTIRTEYKSQPIAAVLHIDDAQKTCFDNVHIVLEDHTPDKLIMGFSELIGTDIEESLAEIVTNFNDLIESEAFSSQKEKILSAKIATYLNTI

SEQ ID NO: 55445 - protein, 718 aa, Vibrio parahaemolyticus 50
MDSNLNPLLCLNDVQNEQLSAFSYLKKASDCLSSPQLNALGREFLIRALDQLPLFEGQSVLLQNLLRKAGLFPYIKKYFPTLSPEKELVLDIYRSNYDDNFIFHSMQAKVFRLLTSGQNVVLSAPTSMGKSAIVDALIAERKFSTIVIVVPTIALIDETRRRIQKKFGHEFQIIHHGSQLKRKDKVIYILTQERVNERDDLRNIDLFIIDEFYKLAYSNDEPSRVIALNIALSKLLTISKQFYMIGPYIDAIRGMENLRCDYTFIPSEFNTVALNVHKYDIAANDIESKNEQLTKIVEKHQEQTIIYCKSATSIAQVAQFLGTLESVKDRKLGPLRKYHKWLVNNYGQDWTCSKALTNGIGIHHGALPRAIQQKSIDLFNSKQIKYLLCTSTMIEGVNTAAKNIVIYDNRKGSPSIDSFTHKNISGRAGRMNQYLVGNVFCLESIPDKEAQVVELPLGQRNDNSPINLLAGIQPDHLSDQSNLSLNQFVKLSDVPIEIIRNHSSYKVEVISDAYELITELSVSDMELLATMTKPRKYHLGLLSRFIKTVESGALSKVSLHFYDNDDLQNRLSWYIYADNHSSYIKDRIRYIYRSREDEKSRSETTDKELKIARNIFKHAVTRALLLLEELLNYEMMNLDIPHKADLGYLVHLFENSHLPPSFSALEEMGIPIETLEKLTTERSSEASIDVLTRYLRMYHKHFTKLSSIDHSFIKQAVY

SEQ ID NO: 55446 - protein, 469 aa, Vibrio parahaemolyticus VP2007-007; identical to SEQ ID NO: 55444

SEQ ID NO: 55447 - protein, 718 aa, Vibrio parahaemolyticus VP2007-007; identical to SEQ ID NO: 55445

SEQ ID NO: 55448 - protein, 298 aa, Vibrio parahaemolyticus UCM-V493
MEPVLKPQLSNADEIKSILKELPTTFCLEDGRQVNTLLVYLPCHEDGKASLSEFFECIKNGILQNYVFTCTEIERKLGKSSETAMDELFNKALRKISKHTAQGELGELILFTLLDVYLSAPKILSKVSMKDRATMPVFGADAVHAQMVDGSFRVYLGESKLYQKFKAAAASAASSIESAKEKFGDEFDLIESHMDFPNLDDELEERILDALNPYTSSDSIQHIHSPCFIGFTQPDIIFQNDSDYIGSYEKVANEYINDFFGKVQNKGLDVNEVTLLMLPFTCVSKLVEEFIAYTGIYK

SEQ ID NO: 55449 - protein, 832 aa, Vibrio parahaemolyticus UCM-V493
MNTLADKVNIKISSHPEFSKDKETLFNVYVGYLLGNEIELDRNFVKRIVSVIQYFGKSTEQETRREAAIFLAMLLDVSGELYPELVPIAKSMFIDSGDFPNISLLEHRYPDVKMDLGFYNNARFEFKKNLNSVKELDFPLTDFQRMLWENLESDEDVLTIAPTSAGKTHIILTYLVREVSESSNGAFAAIVVPTRALISEVSGKVYEIAKGFGQHENIEICTVPRDDKEFSDKTIFVMTQERLYELIQRGDLSFNYLFIDEAHNISDKSRGVLLHLTLEKLLEDSFPQIIISMPSESYKNAFSSVFSDIEFHKEITRHSPVAKIIMSVKLVGRNIEISSKNLNHTVTIPKAFTGVKLADIVLRLGKGQSNIIYRNKTNYCEDTARDIAERIDEFNVTDNLEEAADYIEKFIHEEFSLANNLRKGVAFHYGPLPSSVRVMIENLAKDGEVNFIACTSTLAEGVNLPAKNLFLQNPIQTVVGKPSERLEDVKLNNITGRAGRMLEHFSGNIFLIDPESWTFKDYFEDDEDEENKLPTYYKTLNTELTGVLHALSGTYPHDESDQYRFYTIANKLIREFSNDGLESTLGSKELSLQDDDVELLLKSVNKAYRSLRVAPFTLEANPTVGYIQQNKLFSFLDSIEDFNDWILPHPKSPDLYEVLLRVAFKLNELGVYINSDEYTINYICVISSKWVSGKSLKEIITEQIAWDKDNTDSSNVNKSVRNVIKVINNDIRFRLRNALSCYHLLLTNKMNQKGIDKTSVKLHTYLEIGACDENMVNLINMGLSREAANEIEELLGNTSRIETIYQLLEMLDSKPLNSLHPVTKREIRMLAG

SEQ ID NO: 55450 - protein, 520 aa, Vibrio parahaemolyticus
MSVNFADQLSVRVIFRDNKRSSGFVYPTRSHTYVFTAKHAICGDEPDDCKFKGRMCDTCLVKSVPKTKIKIDKPDFPGFKTKRVEKVLQSNNKDLAVLVLKDKDHGTFGALPTVKVYPFNEVRETDRFISCGYPSIGSNESIQPIYYSDFSTFRGSKLCFKITNDVTSNLECSKENLSGNSGSGLIKYDNSNALLLGIYTDTSNMAVCYGEIIDHTVNELITSNGYPSLEIDNVNKAFKTLIKSEFTKCFSKIDHNINMPDNREINLFRLSLDGKEYNYEKIKSRLIDCVPLFTLTRKQITKCRENNEFGSSTLRSVKEFLQIEGNNKVPELLLQGFLEAYLHAPKLYSAHQNEAATFQGAHINFSDSNSLEIIHCLAMVSPSLESSFKTAMKQILENFPKLKPFGGLIDNGLLDSHFSDQENEVLKKILIPSKESESLEYEDRLAIFIGYDRQIEKDLVYMQLGEFANELDERIVSDVRNSIESLKSELEEINVVNAVIDCFFVPLKVRRNSIMNLLRV

SEQ ID NO: 55451 - protein, 215 aa, Vibrio parahaemolyticus
MKSLGLYLYEEIMSNGYFKSIFERLSKSYSLLLIDGVYNYPLTEKEEKDLFRFVDLLASTEEQSARMKAYHVISLLDAFIGDSERFEYIASSVYSKLGLFALDFDENILPFDRRFEVATKKSSQKFDERFIFTDSQYEIYSKMVKAPHYSFSGPTSLGKSFIIKRYIEEIIKVSRSNIVILVPSKALINQFSLEIKSELKSVLHEKKYCVLTMVI

SEQ ID NO: 55452 - protein, 298 aa, Vibrio parahaemolyticus
MEPVLKPQLSNADEIKSILKELPTTFCLEDGRQVNTLLVYLPCHEDGKASLSEFFECIKNGILQNYVFTCTEIERKLGKSSETAMDELFNKALRKISKHTAQGELGELILFTLLDVYLSAPKILSKVSMKDRATMPVFGADAVHAQMVDGSFRVYLGESKLYQKFKAAAASAASSIESAKEKFGDEFDLIESHIDFPNLDDELEERILDALNPYTSSDSIQHIHSPCFIGFTQPDIIFQNDSDYIGSYEKVANEYINDFFGKVQNKGLDVNEVTLLMLPFTCVSKLVEEFIAYTGIYK

SEQ ID NO: 55453 - protein, 832 aa, Vibrio parahaemolyticus
MNTLADKVNIKISSHPEFSKDKETLFNVYVGYLLGNEIELDRNFVKRIVSVIQYFGKSTEQETRREAAIFLAMLLDVSGELYPELVPIAKSMFIDSGDFPNISLLEHRYPDVKMDLGFYNNARFEFKKNLNSVKELDFPLTDFQRMLWENLESDEDVLTIAPTSAGKTHIILTYLVREVSESSNGAFAAIVVPTRALISEVSGKVYEIAKGFGQHENIEICTVPRDDKEFSDKTIFVMTQERLYELIQRGDLSFNYLFIDEAHNISDKSRGVLLHLTLEKLLEDSFPQIIISMPSESYKNAFSSVFSDIEFHKEITRHSPVAKIIMSVKLVGRNIEISSKNLNHTVTIPKAFTGVKLADIVLRLGKGQSNIIYRNKTNYCEDTARDIAERIDEFNVTDNLEEAADYIEKFIHEEFSLANNLRKGVAFHYGPLPSSVRVMIENLAKDGEVNFITCTSTLAEGVNLPAKNLFLQNPIQTVVGKPSERLEDVKLNNITGRAGRMLEHFSGNIFLIDPESWTFKDYFEDDEDEENKLPTYYKTLNTELTGVLHALSGTYPHDESDQYRFYTIANKLIREFSNDGLESTLGSKELSLQDDDVELLLKSVNKAYRSLRVAPFTLEANPTVGYIQQNKLFSFLDSIEDFNDWILPHPKSPDLYEVLLRVAFKLNELGVYINSDEYTINYICVISSKWVSGKSLKEIITEQIAWDKDNTDSSNVNKSVRNVIKVINNDIRFRLRNALSCYHLLLTNKMNQKGIDKTSVKLHTYLEIGACDENMVNLINMGLSREAANEIEELLGNTSRIETIYQLLEMLDSKPLNSLHPVTKREIRMLAG

SEQ ID NO: 55454 - protein, 522 aa, Vibrio parahaemolyticus
MSVNLADQLSVRVTFRDSERSSGFVYPTNSHTYVFTAKHAICGAEPDDCKLKGQTCDTCIVKSVPKTKIKIDKPDLPGFKVKRVEQVLQSDNKDLVVLVLKSKDHGTFGALPTVKIYPFNEIQESDSFISCGYPAISSNEFIQPIRYSGFSTFRGGKLCFQITNDVTSNLECSKENLSGNSGSGLIKYDNTDALLLGIYTDTANMAICYGEIIDHTVNELITSNGYPSLEIENVNKAFKTLIKDEFTKCFSKIEHDIELPDNREVNLYRLSLDGKGYDYEKVKSRLIDCVPLFTLTRKQITKCREDNAFGSSTLRSVKEFLQIESNNKVPELLLQGFLEAYLKAPKLYSAHQNETATFQGAHINFASSNSLEIIHCLAMISPSFESSFQKAMKNILEDFPKLKPFGGLIDNGLLDSHFSKQENEVLKKVLIPSKDNDTVDYKDRLAIFIGYDRQIEKQLAFMQPNEFASELDKRIVSDVRDSIDSLKVELEELNIVSAVVDCFFVPFESTETFNKEFIESLK

SEQ ID NO: 55455 - protein, 851 aa, Vibrio parahaemolyticus
MKNLGLYLYDEITSNDYFKTIFEQLSKSYTSQLVDGLYDYNLTEKEEKDLFRFVDLLASMEEQSARMKAYHIISLLDVFIGETAKFRYIASSVYSKLGLFALDFDDSELPFDRRFEVATKKFSQKFDERYVFTDSQYEIYSKMVKAPHYSFSGPTSLGKSFIIKRYIEEIVQASRSNIVILVPSKALINQFSLEIKSELKTILHEKNYSVLTHGNLVTEDDDEKYIFILTPERLLSLYSQKVDITIDFLFVDEAHKLSNSTDSDTRSLTAYSAIENTINNYQNVKVVFSSPNISNPEVFLELFGKDSNHTTKVSESPVAQNLYLVDFKFNELTLFTSTEKYKVETNIFNTSRQANDFIYRVGSKQKSNMVYCSSRDKSISSALSFCKDFIKHKVVLSEKLKDAIEKVSAYIHKEYYLAYFLEKRIAYHHGQLPPVIRNIIEELFRDGEVDFIFCTPTLVEGVNMPTRNIFINCDSKIRLVQEKNKNANKSIAFWNLAGRAGRYCKELSGNIFCIQNSEGDRWEDTSIFENKNTEISTTIDTKLSSPKSLKEIEKALSDENYNSKEVSKLVEYLANLISIDTIRFNKNLNDSFLLRKFVALKKDEILELAKQKSKKIEDIPIDVINTYKALNFDVQSTVYSYISDNPERKKLPKLDYENILSTLKVFNNIYNWEATEKDDIKSEAQLSYYATLMNNWINGKPINAIINDSLANTSIIQLERGGAIVDFERDNPDHVNRVIDKTLYTIERVLTFIFEKYFNHYHKCLCSVLGEEQAGSNWSTFLEYGSKIPMEIGLQNLGLSRHTAHNIASRSELQNFIQMSPTGEVLGIEKSSLLQRLSRTSIEYNEIVTFV

SEQ ID NO: 55456 - protein, 522 aa, Vibrio parahaemolyticus; identical to SEQ ID NO: 55454

SEQ ID NO: 55457 - protein, 851 aa, Vibrio parahaemolyticus; identical to SEQ ID NO: 55455

SEQ ID NO: 55458 - protein, 522 aa, Vibrio parahaemolyticus
MSVNFADQLSVRVIFRDNKRSSGFVYPTRSHTYVFTAKHAICGDEPDDCKFKGRMCDTCLVKSVPKTKIKIDKPDFPGFKTKRVEKVLQSNNKDLAVLVLKDKDHGTFGALPTVKVYPFNEVRETDRFISCGYPSIGSNESIQPIYYSDFSTFRGSKLCFKITNDVTSNLECSKENLSGNSGSGLIKYDNSNALLLGIYTDTSNMAVCYGEIIDHTVNELITSNGYPSLEIDNVNKAFKTLIKSEFTKCFSKIDHNINMPDNREINLFRLSLDGKEYNYEKIKSRLIDCVPLFTLTRKQITKCRENNEFGSSTLRSVKEFLQIEGNNKVPELLLQGFLEAYLHAPKLYSAHQNEAATFQGAHINFSDSNSLEIIHCLAMVSPSLESSFKTAMKQILENFPKLKPFGGLIDNGLLDSHFSDQENEVLKKILIPSKESESLEYEDRLAIFIGYDRQIEKDLVYMQLGEFANELDERIVSDVRNSIESLKSELEEINVVNAVIDCFFVPFESTEKFNNEFIKSLK

SEQ ID NO: 55459 - protein, 850 aa, Vibrio parahaemolyticus
MKSLGLYLYEEIMSNGYFKSIFERLSKSYSLLLIDGVYNYPLTEKEEKDLFRFVDLLASTEEQSARMKAYHVISLLDAFIGDSERFEYIASSVYSKLGLFALDFDENILPFDRRFEVATKKSSQKFDERFIFTDSQYEIYSKMVKAPHYSFSGPTSLGKSFIIKRYIEEIIKVSRSNIVILVPSKALINQFSLEIKSELKSVLHEKKYCVLTHGNLVTDDNEKYIFILTPERLLSLYSQKVDISIDFLFVDEAHKLSNSTDSDTRSLTAYSAIENTIKNYKNVKVVFSSPNISNPEVFLELFGKDSKHTTKVSESPVAQNLYLVDFKFNQITLFNSDDRYKIDTDVFNTSRQANDFIYRVGSKQKSNMIYCSSREKSINSALNFCKDFIVRDLTLSNKLKDAIEKISTYIHNEYYLAYFLEKRIAYHHGQLPPVIRNIIEELFRDNEIDFIFCTPTLVEGVNMPTRNIFINCDSKIRLVQEKSKNANKSIAFWNLAGRAGRYCKELSGNIFCIQNSEGERWEDTSIFENKNTEISTTIDAKLSSEKSLNEIEKALSDENYNSKEVSKIIEYLANLIAIDTIRFNKNLNESFLLRKFVALKKDEILELARQKSKKIENIPIDVVNTYKSLDFNVQNIVYAYINENPESRKLPKLDYENILATLKVFYRIYNWEVTEKDDIKSEAQLSYYATLMNNWINGKSINGIINDSLVNTSSIQLRKGDPVVVFQRDNPDHVNCIIDRTLYTIERVLTFIFEKYFNHYHKCLCSILGEEKAGSNWSTFLEYGSKIPMEIGLQNLGLSRHTAHNIASKSELQRFVQISSTGEVLSIDKSKLLQRLNQTSIEYNEITTFL

SEQ ID NO: 55460 - protein, 482 aa, Vibrio parahaemolyticus
MTVGALEEFKLDSIYILQTSFADGGTKRGTCFSIEQDLLLTAHHVVKDATSVRVFLTSDTFAEGHHIEAECIYSNVALDVAVLKVPGGTTISSLGLYATSVNLDSEVKSCGYPIEKEHYPTPIKVKVTNSFEHMMSREYSFEVSQSDTVSKYSGMSGSPVMHDDRCLGILLVQQGSNTLYAVSVKDFLGDASLKEIMDAHGVNITVQDGIGYKAPDFPASPFKYCINCNAGLPNIKGIDIGFTMKQWNISEFTETVYDWIIDYCLSHKQKANFTGGRRSLFKYARSHYPADDLNALGDLCLHIAIRESYSTIPVMNKVFDVNNTTFSCTHAVLNFDSIELWIGASAVTTSIEEAVKSAIESVEYIMDIKSLKNRLFTLTSEIDDSWPHKEKLKRLANSSLDLDERFDKIIIPIFIMHDSKLITNYDKSNFLDLFNKKVANCRGLLQAGVNESVINLIDLRVFYFPVSDVNDVNGALLEELNS

SEQ ID NO: 55461 - protein, 572 aa, Vibrio parahaemolyticus
MDELKKKLFKYKGQYKIVTQVSQKPSERNVFILTQERVLEYGSLDSVDFFIIDEFYKLAPISKNDERCDRLNLAFRELYEKCKRFYMLGPNINGLVSGIEDELRCTFLKFDSYATVATNEFYYPLKTTGKDALVDEERDEILKSILTSIGRKEQTVVYCKSPKRVSSLMYRLLSADLLTPDDANDDLADWLAENFHSDWSLVDGVKHGIAYHHAQLPRAVGALIVDLFNESKINILICTSTLIEGVNTNAKNIVIYDDCITKKTKLDMFTFNNISGRSGRMFEHFVGNVYIFGDKPQVELPFIDVPVVTQSENASESLLLHLGADVSEENEGRVKKFYDQKVLPMSLLLKHQGIDPNKLIKLAEDLITNCNSWNRLMCWDSIYPTSGELRHLSNILFKHFNISSMGGGTVRSASQLHRKLLDIINRVDDRELIIQNYDYWKGRDKSYSVDDSVQAVFNFKKNLVNYNLPKIIYAVSDIQEVIFKRFEYSYGDYKPFASSLENFYFPAAINSLEEFGIPNQVAKKFVENNKNKIADIDSIDSVIEFLIASDENSYSYLSEYELGFVKKALSYI

SEQ ID NO: 55462 - protein, 297 aa, Vibrio vulnificus
MGSSLQAQLQNPDKIKDVLKKVPVSFTLSDGRKVETLLVYLPCIEDTKTSNDALLECIKDGILQNFVFSYKEIQKKLGRSSDTAMDDLFDKAIKKLSKHTAKGELGELILFTLLDVYIQAPKLLSKISMKTNPKMPVFGADAVHGQFLDEEFRVYLGESKLHKNFKSAATDATSSIVTTKGKFEDEFFLLDSYLDFPNLTDELEETILTYLDPYGADLEDRIHSPCFIGFTQPDIIFEDEASFLKHYKELACQYVGDFFSKVEKQKLKIEEVTLLMLPFGCVDKLVDEFISYMGITK

SEQ ID NO: 55463 - protein, 831 aa, Vibrio vulnificus
MSTIALKLGKNILSHQGFEQDRNNVFAQYVEQLAGNKPHLDRSLVKRLSTSIQVFHKSEDEKLKKEATALLAMLLDIAGDDYPDLIPIAKNIFINSGDFPNVSLLDKRHPNVYMDYGFNTSTKFELKAEMNSVEELSFPLTDFQRMLWSDLDSDNDVITIAPTSAGKTHIILTYLVNKIVKSNGAFAAIVVPTRALISEVSSKVFEIAKGIDAENELEICSVPKDEEFSTKTVFVMTQERLYELIQRGDLSFDYLFIDEAHNISDDGRGVLLHLTLEKILDDSSPQIIVSMPSDSYQNAFSAVFSGVEFQKEITRHSPVAKLLLAVELKGKNIEVQRYNTSDKAIIPKNFTGRKTADVVLRLGQGQSNIIYRNQTNQCENTAKDIADLILEYDTPPALEEAADYIEQFIHNDFTLASSLRKGVAFHYGPLPSSVRVMVENLVKAGDIKFIVCTSTLAEGVNLPAKNLFLTNPFRPIRAQQPEKLEEVKINNITGRAGRMVEHFSGNVFLLNHDSWKYQDYFEENDVKEEKIPTYYKTLNEELSLVVSALQGNYPHDKEGQYRFYTIANKLIRELENGSLDERLDAEELQLSSFERDYLVKHVEIARNALRIAPFILEANPTIGYIQQNNLSLFFDSLDNYDDWVLPHPKSKDLYSSIVRVTQKLYELGVYTNGDGYSIGHVSVVATKWVAGKSLKEIISEQIAWDRKVSATANVNQSVRNVIKIINNDITFRLRNALSCYHVLLTNSMKLKGIDKASVKLHTYLELGACDDRMINLINFGLSREAAKEIQESIPKSIEVKSIYDLLTLLERGLLSNTHPVTQKEVKFLLSQ

SEQ ID NO: 55464 - protein, 285 aa, Haemophilus parasuis 12939
MDYPKPPEPFLEVKVHDLTANPPVAALCAGYEGGKWRATQLAAHVMEWLPEFCLNAQEVRNLNSSNALKMLRKAARQVYQTEKHKNRGEFGEIFLHIALRQIYNSIPAISKIYYKDSVNGTVKGFDAVHVIKNDSKLELWLGEVKFYPEYNRAINDVVKELVEHTKDDYLRNENMFILNKIDDKFSFYPELSKLLDTNTSLDDIFDCVCIPILITYDSETLKNNNKRTDKFNEELKVEVMRINQKMYDKLSQIKLPPVRIHLFLLPLQDKSILINALDKELKDLQ

SEQ ID NO: 55465 - protein, 710 aa, Haemophilus parasuis 12939
MMLNISEIENRLKSKDTLSQGDSFLILQSICSLSNAASEDDSNRIQQLLLRVLDRKDEFANLAEVINDLVRHFGLYPYLDMNLLTIKDAIARELHKPALLNNNAELNDEGIVFHRLQAEVYQYLMNGENVILSAPTSFGKSALIDSLVESHKFNNIVIVVPTIALIDETRRRLFSLHSKYKIITHASQELQDKNIFILTQERAVEFPNLPRFDLFILDEFYKLDPRDDSDRSMILNHAFYKLYKQSKQFYLLGPNIQNIPEGLPERFNCKFIKTDYSTVVTDLIRVNSQNDNYQELIELCNKIQGSTLIFCSSPNKARKITQLLADNYIQQGVGLPEAAKWIAEKYHPEWTLVKGLKNGIGMHHGRIPRAIAHICVKGFNEEKLPFLVCTSTLIEGVNTKAKNIIIFDNKIARKKYDFFTFNNIRGRSGRMFQHFIGHVYLFNEPPQEMLPIVDIPVFSQDENTKESLLIQLDKSDINPDSWQRVQKYHEQDIISLDTLRNNSGIEPKKQLDLARYLSDNPIVLEEISWNSYPEYQQLLTLCNLIWNFFIEGNSFYGITTGKQLTFKINQLRNNSIEKIIESEINNKNPKTPDDAVEDTLNFVRQWAQFHFPRLAMAVCRIQNAVADRLGIDKADYSFFCGQVENLFLDPALVALDEYGLPLALAQKLEDKINSKGSLDLAIKNLSNLNIEDLELSSFEKEILDDVMKSI

SEQ ID NO: 55466 - protein, 311 aa, Chlamydia trachomatis
MTATITPTLAGADFDAIFTECSHSSSLQLVNPSQLRLFYLDTINGLFDYAGLEEFILDCLGDYVFSRAEIEDYIQRGKTRNIGLYALRRLRQQQTAGQIGSGSDLGEILLYVFLEKILGAPKILSKIELSRTGGTQPSRCDAIHLRPPNPSENLPYNTIVFGTSEIVDDIEDAIDDAFERINHIQTNQRNEVLMAENMVFEKVFDDRTTHYIKDLLIPAKGRGTKRDIGYGIFLGYKLGLNPFAYSSGGFDAQLVAKMRLDIAQHADLIMRKINELNLANYSFYIYVLPLNLPSTDRIEIMNHVLDQGGQP

SEQ ID NO: 55467 - protein, 876 aa, Chlamydia trachomatis
MNTLGDAIFSDINDNEFLNELYDDLLYNYGILKFPTRREPRPVDLEAALRFADLLSKSNHPYEKEHHRTWAQEIIILCDKLYPDNPLVRIYASSVFTAVGNYQGLKLIGGGNVPLSIFERAFSGFQEDYLRVPGTEDQMFFAPQKRIYDRLKDPEFSYSAPTSLGKSFVMRTFIINQIKQGATASYAILVPTKALINETRSKIINDLKETLAERNYRVISAAGDIALEGEHNFIYVLTPERLLYLLVAKPHLKLDYLFIDEAHKLSGKNSRAPFYYQVVSMLHDRPKPPRFIFASPNIPNPQTYLQLVDAAIDGDESAIATTYSPVTQFKFIMDASKQEILVYNDHAHHSTTIAPYQGADPLNNLLATLQLASAEDRAAQTVVYFPSKEKAIKAAKNWALKQPILADDELDALAEDISRDVHDQYYLVELVRKGLAYHIGYLPPAIRQRIEDLFRQRKIKTIFCTSTLLEGVNLPADNLIITSKKNGRASMSAVDFNNLIGRVGRIEYNLYGDVIMLVLPKETSREDFTQFLDEEIPPQKLSIETDTGLFRRIDKQRVVETLMQGKIALPEKKQNESEDKREMIRRYELILLRDIMEDRSSLVRREFTEHLDKEKEATIRQQFAKREVAQDVDLNISVDQVENLTHAIRNGLTYPERVEGSSFDYRQVLEFLEKLASIFHWDIYESSKLGYRNPKTQEHTKLRWYAVILCRWMEGRGLKFIMNQAIQYQMKHPDRFFVTDYLVERYTDSKEHRNIVMANTLKTIEEQILFSLSNYFLRFSNEYKKIHNVESFPNNWYEYVEYGSTNEKAIALQRSGFSRESATYILKNNPDYLRIDERGSLHLDFGLTSSPNINVKNEASEIFYNLPEVFDSLPPF

SEQ ID NO: 55468 - protein, 313 aa, Bacteroides fragilis str. J-143-4
MSNKIWNFDILVDDCFVNFNTKKQEINPDHNDRLLSVANGFEDGSWRYRQFKEFVFSNIAETALSAQEREKLIDNDYGRLIEAAKHLRLVDKEQNGKGSEIAEIILYGIMKNHYKALSAIPKIFYKQNDNDNAKGSDSVHIVIDPNGGFQLWLGEAKFYNSLEDARLYEPINSVEQMLRKPIMKKECGIMTNLNELDKQIENQTLLKKIKECFDENTSIDEIKPKLHIPILLLHECQITASTTEMSDEYKNSIISFHRDRAHSFFKKQINKLSSVHKYSEINFHLILFPVPDKTKIVNWFISQAKNLKNDADE

SEQ ID NO: 55469 - protein, 703 aa, Bacteroides fragilis str. J-143-4
MQTNDIYNTCLDISNVLNAGDISNARSKVITLLHEINGTNNNPYMELVNHLIREVGLLPYIDTYTASWEDRFVCEVFKVNIGERKPCVLHTAQSQVLKNLLEGKSVAVSAPTSFGKSFVIDAFIAIKQPINVVILVPTVALADETRRRICRKFSHQYKIITTTDVELAEKNILVFPQERAFAYIDKLPSIDILIVDEFYKASTNFDLERSSTLLSSMVELGKKAKQRYYLAPNIHEIEENVFTEGMTFLRMDFKTVVTHAWRLYKSRPKNEDKQSFKTRKLIELINTGIGKALIYTGTYKGIEEVTIILNRNLYNKDSELLANFSDWLEYNYGEKYILKDLVKHGIGIHNGQLHRSLSQIQIKLFEEQNGLDYLVSTSSIIEGVNTQAESVVLWSNKNGAHKIDYFTFRNIIGRAGRMFRYFVGRVYMLEEPPSQENTKLRLEFPDDVVKKLDGNDPGIKLNNEQYVKIQRYQDEMIELLGMDIWHRIERIPQIRSCKPSMLKIIAEKLKNDSNWPTNCDALQNNNTWEWRDALGDIIEILEYHRKGHLRYYACACSNGWKMTIKELYNTVKDYGITYEDIFTFERYVSFNLSSIIAVINIIRQELYPNSSNIANFVYKASNAFLPKIVFQLEEYGLPRMISKKIQNAGLINLEDDSKEITIVIQEFNTIGIEYLEQKIPNLHSFDKYILKHFMNGIRCITTN

SEQ ID NO: 55470 - protein, 313 aa, Bacteroides fragilis str. 1007-1-F #4; identical to SEQ ID NO: 55468

SEQ ID NO: 55471 - protein, 707 aa, Bacteroides fragilis str. 1007-1-F #4
MMQTNDIYNTCLDISNVLNAGDISNARSKVITLLHEINGTNNNSYMELVNHLIREVGLLPYIDTYTASWEDRFVCEVFKVNIGERKPCVLHTAQSQVLKKLLEGKSVAVSAPTSFGKSFVIDAFIAIKQPINVVILVPTVALADETRRRICRKFSHQYKIITTTDVELAEKNILVFPQERAFAYIDKLPSIDILIVDEFYKASTNFDLERSSTLLSSMVELGKKAKQRYYLAPNIHEIEENVFTEGMTFLRMDFKTVVTHAWRLYKSRPKNEDKQSFKTRKLIELINTGIGKALIYTGTYKGIEEVTTILNRNLYNKDSELLANFSDWLECNYGEKYILKDLVKHGIGIHNGQLHRSLSQIQIKLFEEQNGLDYLVSTSSIIEGVNTQAESVVLWSNKNGAHKIDYFTFRNIIGRAGRMFRYFVGRVYMLEEPPSQENTKLRLEFPDDVVKKLDGNDPGIKLNNEQYVKIQRYQDEMIELLGTDIWHRIERIPQIRSCKPSMLKIIAEKLKTDSNWPTNCDALQNNNTWEWRDALGDIIEILEYHRKGHLRYYACACSNGWKMTIKELYNTVKDYGITYEDIFTFERYVSFNLSSIIAVINIIRQELYPNSSNIANFVYKASNAFLPKIVFQLEEYGLPRMISKKIQNAGLINLEDDSKEITIVIQEFNTIGIEYLEQKIPNLHSFDKYILKHFMNGIRCITTNQKN

SEQ ID NO: 55472 - protein, 313 aa, Bacteroides fragilis str. 3725 D9(v); identical to SEQ ID NO: 55468

SEQ ID NO: 55473 - protein, 706 aa, Bacteroides fragilis str. 3725 D9(v)
MQTNDIYNTCLDISNVLNAGDISNARSKVITLLHEINGTNNNSYMELVNHLIREVGLLPYIDTYTASWEDRFVCEVFKVNIGERKPCVLHTAQSQVLKKLLEGKSVAVSAPTSFGKSFVIDAFIAIKQPINVVILVPTVALADETRRRICRKFSHQYKIITTTDVELAEKNILVFPQERAFAYIDKLPSIDILIVDEFYKASTNFDLERSSTLLSSMVELGKKAKQRYYLAPNIHEIEENVFTEGMTFLRMDFKTVVTHAWRLYKSRPKNEDKQSFKTRKLIELINTGIGKALIYTGTYKGIEEVTTILNRNLYNKDSELLANFSDWLECNYGEKYILKDLVKHGIGIHNGQLHRSLSQIQIKLFEEQNGLDYLVSTSSIIEGVNTQAESVVLWSNKNGAHKIDYFTFRNIIGRAGRMFRYFVGRVYMLEEPPSQENTKLRLEFPDDVVKKLDGNDPGIKLNNEQYVKIQRYQDEMIELLGTDIWHRIERIPQIRSCKPSMLKIIAEKLKTDSSWPTNCDALQNNNTWEWRDALGDIIEILEYHRKGHLRYYACACSNGWKMTIKELYNTVKDYGITYEDIFTFERYVSFNLSSIIAVINIIRQELYPNSSNIANFVYKASNAFLPKIVFQLEEYGLPRMISKKIQNAGLINLEDDSKEITIVIQEFNTIGIEYLEQKIPNLHSFDKYILKHFMNGIRCITTNQKN

SEQ ID NO: 55474 - protein, 313 aa, Bacteroides fragilis str. B1 (UDC16-1); identical to SEQ ID NO: 55468

SEQ ID NO: 55475 - protein, 662 aa, Bacteroides fragilis str. B1 (UDC16-1)
MELVNHLIREVGLLPYIDTYTASWEDRFVCEVFKVNIGERKPCVLHTAQSQVLKKLLEGKSVAVSAPTSFGKSFVIDAFIAIKQPINVVILVPTVALADETRRRICRKFSHQYKIITTTDVELAEKNILVFPQERAFAYIDKLPSIDILIVDEFYKASTNFDLERSSTLLSSMVELGKKAKQRYYLAPNIHEIEENVFTEGMTFLRMDFKTVVTHAWRLYKSRPKNEDKQSFKTRKLIELINTGIGKALIYTGTYKGIEEVTTILNRNLYNKDSELLANFSDWLECNYGEKYILKDLVKHGIGIHNGQLHRSLSQIQIKLFEEQNGLDYLVSTSSIIEGVNTQAESVVLWSNKNGAHKIDYFTFRNIIGRAGRMFRYFVGRVYMLEEPPSQENTKLRLEFPDDVVKKLDGNDPGIKLNNEQYVKIQRYQDEMIELLGTDIWHRIERIPQIRSCKPSMLKIIAEKLKTDSNWPTNCDALQNNNTWEWRDALGDIIEILEYHRKGHLRYYACACSNGWKMTIKELYNTVKDYGITYEDIFTFERYVSFNLSSIIAVINIIRQELYPNSSNIANFVYKASNAFLPKIVFQLEEYGLPRMISKKIQNAGLINLEDDSKEITIVIQEFNTIGIEYLEQKIPNLHSFDKYILKHFMNGIRCITTNQKN

SEQ ID NO: 55476 - protein, 313 aa, Bacteroides fragilis str. 1007-1-F #10; identical to SEQ ID NO: 55468

SEQ ID NO: 55477 - protein, 707 aa, Bacteroides fragilis str. 1007-1-F #10; identical to SEQ ID NO: 55471

SEQ ID NO: 55478 - protein, 313 aa, Bacteroides fragilis str. 3719 T6; identical to SEQ ID NO: 55468

SEQ ID NO: 55479 - protein, 706 aa, Bacteroides fragilis str. 3719 T6
MQTNDIYNTCLDISNVLNAGDISNARSKVITLLHEINGTNNNSYMELVNHLIREVGLLPYIDTYTASWEDRFVCEVFKVNIGERKPCVLHTAQSQVLKKLLEGKSVAVSAPTSFGKSFVIDAFIAIKQPINVVILVPTVALADETRRRICRKFSHQYKIITTTDVELAEKNILVFPQERAFAYIDKLPSIDILIVDEFYKASTNFDLERSSTLLSSMVELGKKAKQRYYLAPNIHEIEENVFTEGMTFLRMDFKTVVTHAWRLYKSRPKNEDKQSFKTRKLIELINTGIGKALIYTGTYKGIEEVTTILNRNLYNKDSELLANFSDWLECNYGEKYILKDLVKHGIGIHNGQLHRSLSQIQIKLFEEQNGLDYLVSTSSIIEGVNTQAESVVLWSNKNGAHKIDYFTFRNIIGRAGRMFRYFVGRVYMLEEPPSQENTKLRLEFPDDVVKKLDGNDPGIKLNNEQYVKIQRYQDEMIELLGTDIWHRIERIPQIRSCKPSMLKIIAEKLKTDSNWPTNCDALQNNNTWEWRDALGDIIEILEYHRKGHLRYYACACSNGWKMTIKELYNTVKDYGITYEDIFTFERYVSFNLSSIIAVINIIRQELYPNSSNIANFVYKASNAFLPKIVFQLEEYGLPRMISKKIQNAGLINLEDDSKEITIVIQEFNTIGIEYLEQKIPNLHSFDKYILKHFMNGIRCITTNQKN

SEQ ID NO: 55480 - protein, 313 aa, Bacteroides fragilis str. 1007-1-F #9; identical to SEQ ID NO: 55468

SEQ ID NO: 55481 - protein, 706 aa, Bacteroides fragilis str. 1007-1-F #9; identical to SEQ ID NO: 55479

SEQ ID NO: 55482 - protein, 313 aa, Bacteroides fragilis str. 1007-1-F #7; identical to SEQ ID NO: 55468

SEQ ID NO: 55483 - protein, 707 aa, Bacteroides fragilis str. 1007-1-F #7; identical to SEQ ID NO: 55471

SEQ ID NO: 55484 - protein, 313 aa, Bacteroides fragilis str. 1007-1-F #3; identical to SEQ ID NO: 55468

SEQ ID NO: 55485 - protein, 707 aa, Bacteroides fragilis str. 1007-1-F #3; identical to SEQ ID NO: 55471

SEQ ID NO: 55486 - protein, 313 aa, Bacteroides fragilis str. 1007-1-F #5; identical to SEQ ID NO: 55468

SEQ ID NO: 55487 - protein, 707 aa, Bacteroides fragilis str. 1007-1-F #5; identical to SEQ ID NO: 55471

SEQ ID NO: 55488 - protein, 313 aa, Bacteroides fragilis str. 1007-1-F #6; identical to SEQ ID NO: 55468

SEQ ID NO: 55489 - protein, 707 aa, Bacteroides fragilis str. 1007-1-F #6; identical to SEQ ID NO: 55471

SEQ ID NO: 55490 - protein, 313 aa, Bacteroides fragilis; identical to SEQ ID NO: 55468

SEQ ID NO: 55491 - protein, 707 aa, Bacteroides fragilis; identical to SEQ ID NO: 55471

SEQ ID NO: 55492 - protein, 313 aa, Bacteroides vulgatus str. 3775 SL(B) 10 (iv)
MDKIKNFDIVVNTCLADIESRSKKSDFDKNDFLLSVVNGFEDGKWREDLFRQFVMNNIAQTGLSADERENICTIDPYTQITRSIMNLRLVDCENGQGSEIAEIVLYGIMRYHYNALPVVPKIFYKQNSNDNAKGADSVHIVIDEDKMDFTLWLGEAKFFNDIIDERLYDPINSVFEALGTEKIKKENSIITNIKDLEYVINNPDIRKKVKEVLRHDVSIDEVKKRLHVPIMLLHECSITKGARELSPEYLEEIKHYHLNRAERFFMSHNNKQKKEGVYGFEKIMFHLILFPVPNKENIVNWFVKRANQIKQDA

SEQ ID NO: 55493 - protein, 679 aa, Bacteroides vulgatus str. 3775 SL(B) 10 (iv)
MDTARTEVIKLLDRLNREGKEYSPMVNHFIREVGLFPYIDKNTASWQEQAVFEAYKTDLGGGEQKTLHSAQSRVLKRLLAGDNIALSAPTSFGKSFIIDAFISIRKPDNVVIIVPTIALADETRRRIEHKFSGMYKIITTTDATLRERNILILPQERSFAYVGKFESIDMLIVDEFYKASSSFDDSRSTSLLSAMIELGKIAKQKYYLAPNIHNIKENVFTKGMQFMRFTDFKTVITMASKVYEKMGIDENKNDFKATKLLDILRKHKTKTLVYAGSYDNINTISKLLTNNMPNKENDLLNNFYDWLRINYGESFSLCNLSRIGVGVHNGRMHRSLSQIQVKLFELRNGIDTIVSTSSIIEGVNTQAEQVVVWSNKNGNRKFDYFTYRNIIGRAGRMLKYFVGKVYLLEEPPAQENTILDIEFPEDVVEMLDSENPGVEINDEQNNQIKEYESYMSETLGKDVFNKIRNNSLIKLCKPSQLRFLVGKIKENRNWPNGFESLASTNSYYWRNPISDVADMLGDNMKGLMKIAIWKFPQNWQKSMAEIHGELVKDGYEFSQEDLFHAERYMSFNLCSILNVISILKRLIYPDTHNISLFLAKAANAFLPKLVYQLEEYGLPRTLSRKIQNSGLIDLENDEMEVSDIIEEFKKIGYDKLTESIQDIHQFEKFILKYFYSGIS

SEQ ID NO: 55494 - protein, 313 aa, Bacteroides vulgatus str. 3775 SR(B) 19; identical to SEQ ID NO: 55492

SEQ ID NO: 55495 - protein, 619 aa, Bacteroides vulgatus str. 3775 SR(B) 19
MLESEVFDICYNINELILNSQMDTARTEVIKLLDRLNREGKEYSPMVNHFIREVGLFPYIDKNTASWQEQAVFEAYKTDLGGGEQKTLHSAQSRVLKRLLAGDNIALSAPTSFGKSFIIDAFISIRKPDNVVIIVPTIALADETRRRIEHKFSGMYKIITTTDATLRERNILILPQERSFAYVGKFESIDMLIVDEFYKASSSFDDSRSTSLLSAMIELGKIAKQKYYLAPNIHNIKENVFTKGMQFMRFTDFKTVITMASKVYEKMGIDENKNDFKATKLLDILRKHKTKTLVYAGSYDNINTISKLLTNNMPNKENDLLNNFYDWLRINYGESFSLCNLSRIGVGVHNGRMHRSLSQIQVKLFELRNGIDTIVSTSSIIEGVNTQAEQVVVWSNKNGNRKFDYFTYRNIIGRAGRMLKYFVGKVYLLEEPPAQENTILDIEFPEDVVEMLDSENPGVEINDEQNNQIKEYESYMSETLGKDVFNKIRNNSLIKLCKPSQLRFLVGKIKENRNWPNGFESLASTNSYYWRNPISDVADMLGDNMKGLMKIAIWKFPQNWQKSMAEIHGELVKDGYEFSQEDLFHAERYMSFNLCSILNVISILKRLIYPDTPDVFRTP

SEQ ID NO: 55496 - protein, 307 aa, Campylobacter gracilis RM3268
MKYLTSKYEYESIKTYCFHIVFDINDEGRVYQKIDEWNEEIFNEIPFFALGKKRALKISSESSPRKATRDGMELLYKVKEIKEANEYFISADEDAEDKYLKRGEFGELILYYLLERQFNKPQLISKIYFKDSPSGMVHGFDAVHYDKEKNELWIGESKFYKSLSNALQDLANDLFGHFNVNFFDSEFAIINNRLSDYYDDKEVSDEIRKLIKSSTFIQRLSNINACFFALFDSKILDNFKFNDSGNTHNDFKDILEKFAKDTRKKFDQKIKDFGNKYRLKINLFLFPVESKFKLVKQLHEKLKKEQN

SEQ ID NO: 55497 - protein, 689 aa, Campylobacter gracilis RM3268
MFEILDLSDLNKSFKIAKEISANEDMDSLILVLENWKYVNENIRPVFIDLIESFGFYPYLKDKNELLNTAALVRCEYHKSKFINDFENNRVAFHYWQKVLEEKISNRQNLLISAPTSFGKSLLIQEFVARKKYSNILIIQPTLALIDETRKKLQNYQDFYNIVVNTSQDINETNNLFILTSERVLDILPKINNIDLFIVDEFYKISNHKHDDRVSQLNIAFYKVMFRNPQLILLTPSVDSVDNDFIKKYSLNFFKTEYSLVRQELEKISCSSKEERKMKLFGLLNSLSEPTIVYVKSPAQAEELSNEFIRDNKKGTENTFPIFEWIDENVSVKWNLKKYLQKGIGLHNGQYPRHIVNAQLDYFNNNKINILFATTSLIEGVNTVAKNIIIYDMRKGTSKLTYFDFNNIKGRAGRMMKYYTGKVYCFDDPPRQEMENIDVPIVTQDDSLQSEILINLNNEDIKDQKRRIYEELIKDLPADLLQIFKSNYYSIEKQKHLYNCLKGRKKILNQLSWDAPIPTYKTLSRTLCIVDHLLEGNKGDSYKFLAQKCHQIIRGGNLHSIISNEIKYQHTLDANRGKNEESIINLSVSKVFGFIRNQAKFEIPKRLSVLESIVNYLNGKQAANYSAFISILEHEGVDNKLSILLDFGVPASALKKFKDMPNNNIIEYVKKNFEKIDLSTYEVDILKKL

SEQ ID NO: 55498 - protein, 307 aa, Campylobacter gracilis; identical to SEQ ID NO: 55496

SEQ ID NO: 55499 - protein, 689 aa, Campylobacter gracilis; identical to SEQ ID NO: 55497

SEQ ID NO: 55500 - protein, 310 aa, Porphyromonas gingivalis F0568
MSNFAGKSYMPMLLRTDVQNGFLNLFSKIMENEPLWNGNKLNLFALKITNNCFSYETLTEELGNILTTYALSRSTYDELCSQKKYASLVKKAKEKLRKVENNDGELGEILLYCMLESHLNAPKLLTKLELKTAANNYVNGADGVHLLKIDDSTYQFVFGESKLNSDLRTGIYEAFKSINTLLENGLNKLRYEISLVNSNILKETATEESVILKKLLIPTENDEDLNIDHSFGIFLGFDIPISEEERKMKNSDFRTLMNGKIEKAVRGVLTTLNEQIKKREFVGYSFYIYIIPFSELGITRKKIIENLKTM

SEQ ID NO: 55501 - protein, 849 aa, Porphyromonas gingivalis F0568
MILADEIALEILSNQYFLKLFRVCIERSICHTLSIDNQDLYSEKEFKDLLRFADLLSISSVSEARNYAYRIITYLNPYFQQDPYYCTISKAVYYNLGNFPAVSYLEKENNNQSELPFDRSVELEAKKIIQEVPESEGIFFTDTQYKLFSELSCAREFSFSGPTSMGKSFIIKAFIRKIIQNKPPENLVVLVPTRALINQFALELKKNLGTLLEQYKYRIAANSNISEFSIEETINYILVLTPERLISYISQENPPIGFLFVDEAHKIAQNEDSRSITTYTSIEKTLKKHPNIKLYFSSPNVSNPEVFLKIFRNTQGKNHFKTDETPVAQNLYFADLENGEFSYFSNNELVKIKNPLPKNAKTINDILAHLGKRSNLVYCNTRSRTIDYAKSFADTINLEKGNKSLNKASRIIREYIHPDYYLAEIIKKGVAYHFGNMPQLIRNIVENLYQEGNIRFVFCTSTLLEGVNMPTQNLFILNNKKSTKTLKPIDFWNLAGRAGRLSKELQGNVFCVKHSDCSWDDTSFFDKKEIELVPSVFSRINHNLRKIETLINGGEVKSGSEEEKNILRYIANIICIDTLEPKTGYHSPIINELIRKNKSSIIELAKSKASKLETPYSILNSNESIGLDAQDAAYKRLKYLHAQKTSITLPKLVNYESCKNTLLSLHKLYNWELTNKHLSDKNSLKYYAMLMNKWINDESLNQIISGSVDYYSESQKALKVSYNNYEAFNKSNKMHVNILIGNIINDIEHILRFQFEKYFNHYYLMVKNLLGEEKAGENWATLLEYGTQNRIMIAIQNMGLSRHTTNKINKEGKGALTIENGKLKGINKAFLLAKFTPGTLEYDEVKNLL

SEQ ID NO: 55502 - protein, 304 aa, Porphyromonas gingivalis
MAMRVSLKKLIQDSIVVQYHLPYDVVDKHIPCSCISTEKDYCLLQNGTDIDVANIIYNGIVDYAYSDNEIDLTQLDKLQIRALLSKLKFDPNASESIQLGYGFQGEVMLHLLLSHFFHAEKALARGYLYSALENAETKGYDSYLMIENNETIFLLFGEAKFYLDGYKRSLDSIFNNIDKALSDSYFNRNFIAMENHYEHIEPKSRIREIIDQWRTDPLINMAEEAKQHNMNLVYPMLVIFDDKMTEYDNLIMDIISYIQTKYNAVQPTLTIPYTIFFLFFHVDNSRIIKTQVLQWINQKQQLMP

SEQ ID NO: 55503 - protein, 770 aa, Porphyromonas gingivalis
MDKSKAAVDAVKLINQAKENLSLQPLMIKAVCSFFDFMKGKELSQADRLFLHYLANRAGLPQYYYPMLNIGEDVDEEVSLQTFSNYINESSLIVGEGIMLHRYQKELLERFKRGQRNRIFLSASTSFGKTFLIYEIVRKMEYTNVAFIFPTLSLLSENLFKIHLLPEYKWVKDNYVIHTLSDKEEISGRNLFIFTPERFLSFLDKNKEIQLDFVFVDEIYKLDNGFIIDEVAQENERDVAYRIALHELLKNPHIDSLLAGPYIALPTEDKKDTQFSFKTFLDYYDFVIVNYNHYEIVNKVEVFVKTASNIKIDNTFHLTFTNKTKSDRVVQLVTQLLNRGENAIVYCSTKASTEKYAKFLISENKYIKDIDSEKVIRLTNHIDSLFVNGKGAQWIVSKALKKGIGIHHGSVPKYIQQEIISLFNQNILKVLICTTTITEGVNTTAKNVIVLSGKKGTKDLKKFDAQNIEGRAGRFMQHYQGRVFILDKKFADRMNEEDELLQHKFFDKNIDKKDVDIVLSDSNYLTTEQENRKKQLEAIKESGIMPKACFEEFRTISYDDKIYLYNTIARFSTTDHEKITELIRRYVGQRKSYLPGLELICQTIRPIIKNDNLRYYVENGNDQPGNCYLVGMISAFISKGFSGSVNYYIKKEEDVDKGVRKAANFVFNMLRYQVVKYFGLFNLLYKQFESIRKGVNVDEVNGIEALLLRLEYSADTRLGRQVSDIGASFNVVKYYDIKEKNSDNSEIVGEYYNQLDDYEKYNITKINQIL

SEQ ID NO: 55504 - protein, 324 aa, Nitrobacter hamburgensis X14
MEFDALATALAIIKKDWSVLSSRIHTAEHDIVTNHKHLNLRLHYPALRDAQATVEELVRTIALYLTHFSLPRKQVEAIYATQETMKTAFERHQAISRLEQEARSLFIRARKSSQRTGEAGELLLYLLTEWLLDAPQIIAKMSLKTNAQMPVYGFDGIHVRFDAKTNRLVLFSGEAKLHSDITKAIASAVTSIKTGLSREKMQHEIELVQRHIDFSGLDETARTALLRYLDPFDEAYNNRLEVVTCLIGFDFTGYARLSPDELEDLDTNFKTSATAKLREVGPIFAKALTDAGLANQRVELFLFPVPSVSVLRDLFQNQIGWTRD

SEQ ID NO: 55505 - protein, 858 aa, Nitrobacter hamburgensis X14
MQPLADKVWANPHFHAAARRLQRAWLSHDIGVGRDDRPGLEEIVRIVRASAILACSKTADHRDQAYRTMTSAFDLYGASELPLDQATRVVLARLGNFPALATRPSIRDAMPSLPASLITEELIVSDRRTITRRDRSVLLTHYQFGLWRRLVAGERVAVAAPTSAGKSFVLQNFIAARLEGSSPQTIVYIVPTRALIAQVSADVRKLLIIDDGTSGDVDVITVPVEAGQPLPRRAIYVLTQERLRMMLSAHPTFHAQIIIVDEAHSVGDGARGVLLQWTVDDLLQRLPTTQLLFASPGIRNLDVFGRMFDVDDITIMPSGDPTVAQNFLVAAFDDAEAGDLTVRYVEPARTLTEIGRLALGRRSVTRVEKQVNLAISLGQGASNIVYANGAGDAEHIALEIAGRLDRPPTARRQALAQLAAETVHWSYALVTCAKKGVAFHYSNMPTQIRTAVEEAVIRGDIDYLVCTTTLLQGVNLPAKNLFLCRPEKGDRVPLESVDFWNLAGRAGRLMKEFQGNIFLIDYDHWRKKPLDHPRDATVIPAVEAGLLQKGADLLRVIERPETQRREIDHVDAIFGRLLHEHFSGTLSKMLSRIPSYGDATPGSLALQKAIAEAAVDITLPTSVLRISPNISPHKQQALYQMLRLRAESTPASAMALIPKHPSDRDAYQSYADILEICHKIIEGRPDTSRLHRFLALIAVFWMRGRPLPQIVQNQLRRNPDRDRREIIRDTLELVEKRVRYQCVRLFSCYGAVLAEVLQDVNLPDAVKTLPSIPLFLELGASDKTTLSLMSNGLSRATATRLTPRAPSRDLETEDAMDWLRQAPVETYRLPALLLEEILEIRGDKAAVTPDDAERHREE

SEQ ID NO: 55506 - protein, 323 aa, Herbaspirillum seropedicae SmR1
MTVHVDEHQPGRHFDNLLGRRNVDARIKNCSVHEEGLPLVSAHFLYPAFKGGKPSVAELVKMLMREITGFCATKLQRRRAKEKDRLSTYDARETEDLADWAKALFIKTKESSSRSGEGGELLLYVFIEHYLKAPLVLSKMRLKTSPSMPIHGADGVHAMWDEHGERLTMFFGESKMHESFASAMSDAAESISWLAKNADGRMDNELQLTSGNIDLDGFPEELQEYLLRFLHPYDTDEGNRRSDRFAILIGYDYAAYNKLAKKGVEEAEEYFKELYRKSLSQKLRTAQSHLERHEISLAAVDLFFLPLPDVQSFRDEFNRELHG

SEQ ID NO: 55507 - protein, 857 aa, Herbaspirillum seropedicae SmR1
MGNFNLQLAQRVASSQKFQIAYETLQKESLASLSGRTPSIDIGERNKLLRSALILAQSGSKQYSTLSQDIVYALATLPLETSQRAVCEHILAMLGNFPASDFLKGNNLAHGRLPWNLKLSEEVRRDENYVSVLGKEILLTDFQADVWDELKTQQFLSIAAPTSAGKSFLIQLYLKSLLGNSDRLLDIAYVVPTRSLIHEVHASLIKAFTGFENPPVISSIPRADERLAATQSRIFVFTQERLRTAMDEADLALDCLIVDEAQQIADGSRGMLLLSCLEDVNERAPQAQILFITPGSRSGASIGSLMGLGELPSVETTLRPVRQNLIYVNFKSAKKKQHLQLTLHRENQKPLALENVDLEGEPVSNAGARFLTAVMTLGDEGQNLVYASGKAAAEKMAEAIAAALGGKDNFVKQTEALLELSEFVKKHVHPQYALVDSIKSGVAYHYGSMPTTLTKAIEEYFANGALKYLVCTSTLLQGVNLPARNIFIRNPKKGMGKPMGPDDFWNLAGRAGRLSKDTHGNVFLIEYKKWDRQPVEEVRQKEVTPSLSKAFTTSHTEVMDFIRDENHVSGAKDTNFAESVFARLFIDAKEGVMEQTIERATRGIAMESAVSISDAIREHLDKVMLPPELLKRNSSVSPLRQQAMFDVLLAVVKRGGTAQLVPHHPLQSGQVKERLESIMDLIHRHLEGKETNQQYYFGWFALSWMRGSSLRDMIEHQIQYERRKAEVNGDEEPEPGKTIIKVLDDVENKLRFHYVRYIGCYIDLLKHAVGVVSPDRELDVPPIPLFLELGACSGTMIGCMELGLSRIAARELTDLLGKSDLDAVAIKRRLINLKGASLKLSPIIVSEIKRIGLETSA

SEQ ID NO: 55508 - protein, 323 aa, Herbaspirillum seropedicae; identical to SEQ ID NO: 55506

SEQ ID NO: 55509 - protein, 857 aa, Herbaspirillum seropedicae; identical to SEQ ID NO: 55507

SEQ ID NO: 55510 - protein, 310 aa, Flavobacterium hydatis
MSLKTDIRKDFLDLFYSDIKDQELENLNKLNLFTLRVTNNQFVYNELIELLADQLHYFALSRTEVRKLVDEGKFRTLTDKARGLLRNHLEIKKNTSSTTKETEGGELGEILLYCLLESHLNAPKILTKLELKTSNQMFVNGADGVHLLKLNDKDYQLIFGESKLHSDLQQGIYKAFESIGKLLSQKGVKKDFEIELVSSQLVKEAYDENSYDLLKKIIIPSASTDETNIDHSFGIFLGFNIDIDPDEKKLPNHEFRENIRTKITAQVNSLLNSINYQIKKAEFTGYNFYIYVIPFSDLEETRKDIIEELL

SEQ ID NO: 55511 - protein, 859 aa, Flavobacterium hydatis
MSQLKIIDKLTEDILRDEYFKILFDKCSLINAEQAINKEIKSILSNKELKDSLRFADILSNSLDSAARNRSYQIVTFLNYNYCDNEIYRTMSKAIYSKLGNFPAVRYLENLNSNHSLIPFDRMIEVEAKKIIQHVPDSEDQVFTDSQYLLFKNLSSSLRYSFSGPTSMGKSFIIKAFIRKVIKNIPPENLVVLVPTRALINQFTIDLKGELQSILERYNYKIATNSNISDLLTEEVHNYILILTPERLISYLSQKNNPPIGFLFVDEAHKLAQEKDSRSITTYSAIERTLSKYGKNVKLYFSSPNVSNPEVFLNLFDSQTSDNYFQTDESPVSQNLYFIDILSERVELIEKNDFKKIETENFNEKFSTISKVIDYLGENSNNLIYNNSKPKTINGAVDYVKNRENKKIEITTAIANASKQIRDYIHKDYFLADLIENGVAYHHGKLPQLLRNLVEDLYKSEEIRNVFCTSTLLEGVNMPTKNLFILNNKNGLGKLEEIDFWNLTGRAGRLNKELFGNIYCIKHEYCTWENKSTILLKKPITLKPTILTKIDKNLQKIEKILLNKNISGTETEKEILDYIANIICIDTLEIRSSYKSPVIEKLIQKNKQNIIEIAKSITKDITVPREILNTNQSINISKQQKIFNVLKGRHLKKQDLRLPNTDISYAVCLQILESMYDLYEWDKAEKKLSNKNSMKYYAVIMNQWMNGITLNQIIVQSLNWHDEKSLQLQVDYNEFAVFEKNNLNHVNIVIEKIIDDIEYVLRFLFEKYFNHYYQIVINLLGEENSGENWATLLEYGTQNRIVIALQNMGLSRHTAMTIYNKCRYALNIQDSKLVSINKSEILKKYNESSIEYHEINKML

SEQ ID NO: 55512 - protein, 298 aa, Capnocytophaga sputigena ATCC 33612
MIDENFSVFNTNTTLTPTNNKKILSLINDFEGGDWRYEKFQNFIWDNIVETALSAKEREKLIEQPFSSLKEAARNLRLINRPDKGEGSEIAEILLYGIMKHHYGALPVVPKIFHKQNPNDNAKGVDSVHIVIENNDFSIWFGEAKFYSDIKDASLNKIIKSIENSLRENSLKKENAIITNLPDIDVVIEEEELRKRIKSLLSNGTSIDKLKPKLHIPILLLYECAITKRYNDLTQDYKREVEKYHKDRAQSYFSKQISKIGSIWKYSEINFHLIIFPVPNKNKIVDNFKSNAEHYRNQ

SEQ ID NO: 55513 - protein, 661 aa, Capnocytophaga sputigena ATCC 33612
MKYNEIVNHLIREVGLYPYIKTDTANWEDRFVCEAFKVDTGGESRVLHREQSFLLKKLLENKDIAVSAPTSFGKSFVIDAFIALKNPNNVVIIVPTIALTDETRRRIYKKFADKYKIITTPEIELGERNIFIFPQERAINYEAKIKNIDILIIDEFYKADIEYDKERAPILLKAILGLQKKAKQKYFLAPNISDIEDNPITKEMLFLPLDFSTVYSDIYKCYDEVDKINDSFKTSKILEILKEEKTKTLIYAGTYSNIDFISNVLKDNIQEVQNLILSQFSEWLKINYAPYYILADLVKKTVGIHNGKMHRSLSQIQIKLFEELEGLYNIISTSSIIEGVNTSAEKIIIWSNKNGRVKLNNFTYKNIIGRGGRMFRHFIGKIYLLESPPQNTPSQLKLEFSDDLINSLDIENLKENLTKEQEKKVIAFRNEMDGILGEGAYSQMVKSNQIQSLAPNRLKNIAILMKENPDEWKGLSYLNSNNPNDWEKSLYLILKQIGNIGATYKDMVAFIKVISQNWTMTIPRMLSLLQGNGVTVEKFFEMERNMAFKISSVLNDVNLLYNHIFDEKIDISSFIAKTSYAFLPRIVYELEEYGLPRMISRKIQNSGILNLEDIEIPIHSIIAQFNEIGLENIKLKIPTLHPFELYILGYFYDGIRINNLN

SEQ ID NO: 55514 - protein, 541 aa, Afipia clevelandensis ATCC 49720
MSVTDLTGTIDTPASDAGGVAARRGFKYQDHVAAFFLLAMIDDPRLAKVECETADDIFLFWQTGETEYPEYVQVKTTEGDRKWTKDEVTTRSPPKKPTSLVEKSLLCDRYGPNARFRIVSRRDVNKSLACLKLERGARFRREPVAELGKKLTKQLKTVSPLGNDLVYWAEQTVWQVTGDVTALIALNHKKISVLAERFGGNPTASHVDQIYQDLLRIVDDAATASRVSDPEKKVLTRSTTIAWWTEHLANTEAAQQRTSKPYRAKTDAFFADLHHMSEDSLRRALSSYDVRFENERWRSQQLADHLVDWLPEIALKASDLASVQHLQLRRKTRDAVSAIKRQRAVSDQQLVGETLLHVVIRQSFGSEPIACKLFYQSATGMRSFGSAHIVHALRGDELWLGRATIATADSHEAILKATLADLEHVLDPDFLKEERETILALREPLHLMPTSLEAALARNAPIDDLVEALCIPILIAYDSTVLGGGYARDYRTRLVAEVQASYAALKPRLPSTLQNVKVHIFLVPIECVVTLTGQFTALMGG

SEQ ID NO: 55515 - protein, 724 aa, Afipia clevelandensis ATCC 49720
MDYGELRNALQEPIPPDQRVGILRGIAQHVNNTHTHHEGRDLVIRALAVLDRFDKSQRVVLMSLVRNVGLFPYLSETIAAADVADQLAFELHRPDNADSAIVFHSLQARIYHQLLRGANVVLSASTSSGKSLVIDEIVASEKFRKIVIVVPTLALIDETRRRLLRRFGERCAIITHPSQNARADRITVYVLTQERVLSREDLADTQFFVIDEFYKMNLATEKKSDRAVDLNLAFHKLAKTGAQFYLLGPNIQAIKGLDRYEHHFIPSEFSTVAVDVVNLNLPTHGDARDVGLLELCKMLDGPTIIYCQSPGSASQVAKLLIERGGLAPHDAAAAAVHWIAEKYDPDWIVAHALQHGIGIHHGGVPRALQQYFIRLFNNRKIPFLVCTSTIIEGVNTVAKNVIVYDRRKSRDVLEHFTYKNIEGRAGRMNEYFVGRVFVLEAPPDDQSFTVEFPLGVQSADTPMSLLLDLPADDLQPLSKHRVEDLFARSSLSPVTLRANRHVPWEVQEAIASEIRARLPEIQPLLGWTQPPTGPQLETACDLIFRFLNKRALQEYRINSGAQLAWHLNALRMGDDLSAYVKTCVARRYPGDSPSDAVETALRLVRNVICQRFPRDLMAIDALQRDVLGGARLHTGNYAFFAEQAENLFMPSILFALDEYGIPLQTAQRLQGFLLPASSLDEVLHRLGRIELQNAELSPFENDILHDVRQTLYPQARPGGPVSAG

SEQ ID NO: 55516 - protein, 295 aa, Rhodobacter sphaeroides ATCC 17029
MVKHIGVMDQQLRLSVRGIPSRFLEVRCSSCEEDTNALALCAGYEGELWRAKKLAAHLFAWLPQVALDQARRDTFDVSNWEELVELAAAHVYRTKKTARRGEIGEILLHIACVQEFGTLPILCKLVLKTSHNDTVKGFDAVHVVHSGDDFELWLGESKFYSDPKEGIDDAVRSIRDHLLPAFLDTEKAMLYGHVPDHVPKAEEIRNLLHKNTSSDELLNKSVFPVLVAYQSLSVASHKRLTPDYVSDLQRECGNLLTHLRQKSAGIPVRIQVIFVPVHVKKDLIAHFDKKLEAFQ

SEQ ID NO: 55517 - protein, 711 aa, Rhodobacter sphaeroides ATCC 17029
MSLLGTLRGISETTPLSADDVFEAILEASRISNSARYEDPEALEIAIRLLDASERGLVPFGSHTAIEHLAEECGLFPYLDIDTLTPFRATLVEAFSVNLNQHKFYLHAKQVEVLVHLLKGENVALSAPTSFGKSLLLDAFIERANPSTVVVIVPTIALIDETRRRLQGNFGSRYQVISKASDVRREGRVIYVLTQERFLNRDDIKIIDFLFVDEFYKLDPGRDDARFRTLNVAFYRGQRIARQFFLAGPNVASLSVGPAWKDRITFMRSNYQTVTVNAIDRTRSLKRFSTFLSDLRSVGEEQSLIYSRSPPASRRLLEELLGGGYAQECEIGTELGLWIAENYHPQWVLVDAVGKGIALHHGKIPRALAQLFVQLFNEGRVPVMICTSTLIEGVNTSAENVFVYDKEIGTRPFDFFSFSNIRGRVGRMMRHFVGRVFLYHAPPQADELVVEIPALSDPSEADDYILMNYEKDDLDGSALRKQSALPLEYNLSFETLKEFGHFGGEALHNTKDTVRRMIGDKPKHFNWSGHPDYNQRVALAKAIRPLLTSKKDKSTRLTAKQMAWAWDMLSKLKSLPEFLHWFQITFSADEVQEGIERAFEFLGSCEFNHATATAAVNRLVLELRPDMNADYSLYSFQLESWFRPPWLKELDEVGIPLPLSERLLRFVGRQDDYKAVLRLLKGLPAQVMDTLSPIDIMLISRATEAERTQLF

SEQ ID NO: 55518 - protein, 313 aa, Rhodobacter sphaeroides ATCC 17029
MAEITDAQLAGILSGDPDELGVHLHLVERDIVINGHKTTVYCHCLTIDGNGKIKIKRLAEFMRHAAADYAIPRTRIEEAKQRDAKFRSTSAVAALHEKARAVFTDLANTGEGGEMLLFLLAERFLGIPHVLCKMDLKTDSRMHYHGADGVYASVSDDGKLKLFWGESKVYKDPTDAIRECLSSLAPFLIEEDHLDSSRERDLMLLSDKADLGDPELSAAFRRFFDASSPMSNRVEYCGVALVGFDAEIYPADDGQGVLDDLVTAAKKELGRWSASVGRRLTEEKLQHFDIHFLCLPLPSVDKFREAFLEAMGR

SEQ ID NO: 55519 - protein, 868 aa, Rhodobacter sphaeroides ATCC 17029
MSQTELQDWLYDTSLRGELQQLGMVTTLLELDNVAPEPTLADVKFDWPRLILGASILARSKKRLHREASLRIATSAMLLSTSDPVRDAAAVLFDKLSNRRSVALAEKRGRLKPNLEARLGVALRIEDQRNQLENSILLEATGERLPVNEFQLEFWRAAGQDRAWLSASAPTASGKTFLVLKWLVDCIATEKIQRAVYLAPTRALVSEIEASLTEVAAQAGLDVEISSLPSAQKYASAKKSGRRSVFVFTQERLHLLVNLLHERIDIDLVVVDEAHKIGDPQRGVILQDAIERLLRSSPNMRVTFVSPATQNPEVLLDDAPETTPTIPIDSDVATVLQNIVVAHQVPAKPLKWALKFRHNEECLPLGTLTIASKPGSLAKRLAFIAAAIGQRGGTLVYTNGAAEAEHVAELISQLLPKAKEIDQELADLSDLARKCVHRSYSLGPLVEAGVAFHYGNMPSLIRLEVERLFKTGKLKFLVCTSTLIEGVNLSCRTIVVRGPRKGKKTPMEPQDFWNLAGRAGRWGDEFQGNIICIDASDKKAWPSGVPQRTRYPIQRETDTALSKLDELASYIEQRPLGVDIDRHQARAFEQVSAYLTTAYVRDRSLTAAPWAKRQSSATLQRLEQALAKATDGLDLAADIGARNPGVSLIGLQSLLAYFRTYGGSPEDLLAAPSESDDAYQRFSNMMERINDNVLTVFVPKTLIPLHALTVLQWLKGFSLPTIIRKRLEYLQRRDGEVDTASVIRSTLEMIEGTARFLAPRYFSAYVDVLNQHLRTIGREDLIDQDLDIGVALEFGVSTMTLRSLMDLGMSRIGAVALYEIVALDQLDEAACIQWVVERRERLDAIGLPSIVVREIREKLLARAVLKEE

SEQ ID NO: 55520 - protein, 320 aa, Rhodospirillum rubrum ATCC 11170
MGALLSKITATDLASTLTGDPEALHVHLTLVARDVSIKGHTVKIHCHCLTVDGNGRVQPHRLAEFMRNAVVDYAIPRSKVADAKARDLKYNSTEATTELVERAKRSFTDLANTGEGGEMLLFLLAERFLKLPQILCKMDLKTDTRMHYHGADGVYAGVTPSGTLKLYWGESKIYKKVGDAIRDCLASLAPFLIEPEHEDAERERDLILLSDKADLTNSELTGALKRYFDRSSEMSTRVQYCGVALVGFDAPFYPASDVKVLADQIVDGSRRALSDWSDKIGARLAAEKLSDMEIQLFCIPLPSADGFRAAFLKAMGIKGG

SEQ ID NO: 55521 - protein, 869 aa, Rhodospirillum rubrum ATCC 11170
MSLADLQSWLREEGIREDLDAITRMTVRTEIDNLQPDPIHLEIDWSRLLLAGSILARSDQRTDQEAALRIATGAIALTDKQAIRDAGAVLLGKLSNFRAVALASKRHLLAEDLEGRLGVTLRLEAQRREMERSILVESSGTWLQVNDFQQRFWTNANMPNWLSASAPTASGKTFLVLQWLVDQMVVGAATIAVYLAPTRALVSEIEANLQALLGKGGPIEISCLPLREKYDAARAGSRRLVLVFTQERLHLLANVLGKDFLIDLLIVDEAHKIGDNQRGVILQDAIERATRANQKLKIVFISPGTQNPEELLSDAPEGVETVAVNSDAPTVLQNLIVADQVPRKPKLWNLAVRQQDVLLPIGTLELSSTPEGSRKRLAFIAAAAGQRGGTLVYANTAGESEKVADLISQLLPAPDEIDTELAALADLARKGVHPNFRLAPLVERGVAFHFGNMPSLIRIEIERLFRSGKIRFLVCTSTLIEGVNLSCRTIVLRGPRKGIGRPMEPHDFWNLAGRAGRWGDEFQGNIICINPHDKTAWPTGVPQRARYPIKRESDAVLELGDELADYLSGRDSHDLSALGPSDKFEPVGAYLLTTYMRLGTITAANLAKRHDDASLVKLDKALERLATQIDIDVDLAARHPGVSAMGLQRLLETFRAYSGDVENLLPAEVASMDSYDRFVAIMGRINTHLFPAFGPENFNRLYALVVVNWLQGLSLATMIRRNIEWHQKVGKEFRLPALIRDTMDLVEQIARFKAPKYISAYMDVLYMHLRQIKRDDLIDHDLDIGTQLEFGVSSRTLLSLMELGLSRMSAVALYERIAKDNLSKETCIEWVAERRDRLEEMDIPTIIVRELRERLLPPDDQDIPVQSRE

SEQ ID NO: 55522 - protein, 320 aa, Rhodospirillum rubrum F11; identical to SEQ ID NO: 55520

SEQ ID NO: 55523 - protein, 869 aa, Rhodospirillum rubrum F11; identical to SEQ ID NO: 55521

SEQ ID NO: 55524 - protein, 246 aa, Staphylococcus aureus O11
MNNNTSIVRISRETFKKIYSIPEIKEASDYYLNNNEVEDKYLKKGEFGELILYHFLNHYFQAESLISKIYFKDSNNLAAHGFDAVHVNVSNRELWLGESKLYQDGKSAIRELVKDLNTHFNRDFFNSEFTIINNRVQDDDAELDDFMKTLISPETLCLDKLANIKIALFAGFTSKYISNRNEFEDKNTFDKELSKESVDLLNSLNKKKDSHAWVNYLDIYLFLFPLNDKKELVKDLHIKLKGAQQI

SEQ ID NO: 55525 - protein, 281 aa, Staphylococcus aureus O11
MENNNIKYQNFSDMFELAKYVSSKIDQEEGRNIVIRVLENWDSVCKESKEIWVNLIERAGFYPYISNLDHEKLSLQGSLRRNWFKSENLEDVYFHVKQKEIEIALNKNENIVVSAPTSFGKSLIIEEVIASKKYDNLLIIQPTLALIDETRRKLNKYNDYNIVVNSKQEMKDKNIFILTAERVLEMKSLPQINFLVVDEFYKISNRINDERIDVLNIAIARIMYMNPQILFLTPNIDEISKSFLEKYNINFLNTTFSMVTNEMINIEYNSSKDKKRNYLIY

SEQ ID NO: 55526 - protein, 216 aa, Staphylococcus aureus O46
MNNNTSIVRISREAFKKIYSIPEIKEASDYYLNNNEVEDKYLKKGEFGELILYHFLNHYFQAESLISKIYFKDSNNLAAHGFDAVHVNVSNRELWLGESKLYQDGKSAIRELVKDLNTHFNRDFFNSEFTIINNRVQDDDAELDDFMKTLISPETLCLDKLANIKIALFAGFTSKYISNRNEFEDKNTFDKELSKESVDLLNSLNKKRIRMHGLII

SEQ ID NO: 55527 - protein, 281 aa, Staphylococcus aureus O46
MENNNIKYQNFSDMFELAKYVSSKIDQEEGRNIVIRVLENWDSVCKESKEIWVNLIERAGFYPYISNLDHEKLSLQGSLRRNWFKSENLEDVYFHVKQKEIEIALNKNENIVVIAPTSFGKSLIIEEVIASKKYDNLLIIQPTLALIDETRRKLNKYNDYNIVVNSKQEMKDKNIFILTAERVLEMKSLPQINFLVVDEFYKISNRINDERIDVLNIAIARIMYMNPQILFLTPNIDEISKSFLEKYNINFLNTTFSMVTNEIINIEYNSSKDKKRNYLIY

SEQ ID NO: 55528 - protein, 304 aa, Staphylococcus aureus
MANQIVFNADNQKKLHTFYIDFDLSDTGELEQVKEEFYNTLFEDIPEFAFGKRQVEKRLNNNTSIVRISREAFKKIYSIPEIKEASDYYLNNNEVEDKYLKKGEFGELILYHFLNHYFQAESLISKIYFKDSNNLAAHGFDAVHVNVSNRELWLGESKLYQDGKSAIRELVKDLNTHFNRDFFNSEFTIINNRVQDDDAELDDFMKTLISPETLCLDKLANIKIALFAGFTSKYISNRNEFEDKNTFDKELSKESVDLLNSLNKKKDSHAWVNYLDIYLFLFPLNDKKELVKDLHIKLKGAQQI

SEQ ID NO: 55529 - protein, 281 aa, Staphylococcus aureus
MENNNIKYQNFSDMFELAKYVSSKIDQEEGRNIVIRVLENWDSVCKESKEIWVNLIERAGFYPYISNLDHEKLSLQGSLRRNWFKSENLEDVYFHVKQKEIEIALNKNENIVVSAPTSFGKSLIIEEVIASKKYDNLLIIQPTLALIDETRRKLNKYNDYNIVVNSKQEMKDKNIFILTAERVLEMKSLPQINFLVVDEFYKISNRINDERIDVLNIAIARIMYMNPQILFLTPNIDEISKSFLEKYNINFLNTTFSMVTNEIINIEYNSSKDKKRNYLIY

SEQ ID NO: 55530 - protein, 304 aa, Staphylococcus aureus; identical to SEQ ID NO: 55528

SEQ ID NO: 55531 - protein, 281 aa, Staphylococcus aureus; identical to SEQ ID NO: 55529

SEQ ID NO: 55532 - protein, 304 aa, Staphylococcus aureus; identical to SEQ ID NO: 55528

SEQ ID NO: 55533 - protein, 281 aa, Staphylococcus aureus; identical to SEQ ID NO: 55529

SEQ ID NO: 55534 - protein, 304 aa, Staphylococcus aureus; identical to SEQ ID NO: 55528

SEQ ID NO: 55535 - protein, 281 aa, Staphylococcus aureus; identical to SEQ ID NO: 55529

SEQ ID NO: 55536 - protein, 304 aa, Staphylococcus aureus; identical to SEQ ID NO: 55528

SEQ ID NO: 55537 - protein, 281 aa, Staphylococcus aureus; identical to SEQ ID NO: 55529

SEQ ID NO: 55538 - protein, 304 aa, Staphylococcus aureus; identical to SEQ ID NO: 55528

SEQ ID NO: 55539 - protein, 281 aa, Staphylococcus aureus; identical to SEQ ID NO: 55529

SEQ ID NO: 55540 - protein, 304 aa, Staphylococcus aureus; identical to SEQ ID NO: 55528

SEQ ID NO: 55541 - protein, 281 aa, Staphylococcus aureus; identical to SEQ ID NO: 55529

SEQ ID NO: 55542 - protein, 299 aa, Streptococcus oralis SK304
MEVNNNSIKIKEVTTHLGTFDILSNTKLEVFSFIINANEFDYRNAIEYLLESVAEFALSRKINKEYKDSPLHLSKKAREKFRDYTKNTGELGEFFLYCFLEGHLGAPKILSKLELKTAKNMYVNGADGLHYLKLDDGNYHLIFGESKVEKKLTDGLRSAFESISDFKEGKNKKGDNKSGIMFEKGLLNSNLSREIEDEDEKMFLKSIIYPSSKSDFYVDDAFGIFVGFEYNYSELQKLSNIEFRKAIKEKILEATKKQIKNINRYVQVNKLFGHTFYIYVLPFADIEIDRKMILKELLS

SEQ ID NO: 55543 - protein, 851 aa, Streptococcus oralis SK304
MNFIEELTEEALRDEYLTSLVTKIEKSYGRFLFNGNYIRLDNKEFYDLMRFTDILSRSNNTKAKNLVLKILALCSEHPNIKENQDFKIFASSALVKMGNFPSLNIVNPDGELNSEIVIDKVVKEVFQESPKEGYFFTDAQYKLFENLKDSNHFSFSGSTSFGKSFVIESFIKYIIDTKNSSENIAIIVPTKALINQNVLKLKDELNNDKYEVVAYPKIPLLYKLKNKRFIFVFTPERLISYFAENSNPSIGYLFVDEAQKLLNDDTRAPLLYHSIAQAKRKSVNIYFASPNIPNVEDFLKLFGSSREESMAIYEKSVTQNKFLVDSFNKKSAMILENEIEYPLGGLNYFETEDENIREILTKLGRGCQNIVYCNTVKYTLNFSVNFAINLPDIKNEKLEKLIKRVSSTIHKDYYLIDCLRKGVAYHFGNLPQVVREGIEELFKEGVIKYLFCTSTLLEGVNLPAKNIFIFSEKIGLQKMDDIDFWNLSGRAGRLTKELSGNIFCCYIIDKKGYWKDSDFAILKKKKIEQKIPVLLRKRNQNFYQNINNLLNNAPLTNKKLPEPKKKILEMYSNILLYQDFVEGSSILKDKFLEKIGDSGRKTLKKKRLELVVPEKIIEQSININLDSQNKILTGIATPFPNKFDYDACLEILKILCQKYNWLILESGGNHPLLKKESQLKYLATLMLNWISGRPLNQIINYMINYYHNKGNPRDFEIDNNFYIPFDKFNRDHVNALINQIIRDINTKIQFKIKNYISNYVLLLIEKGIEIDSEWASYLEYGTTEKQVVELQNLGFSRTTSLFLNKNFIEQFIFNEMGEIIEIKEEELQKKLDVAEFSEEFHEISEILRWEK

SEQ ID NO: 55544 - protein, 305 aa, Streptococcus suis
MSHNYTKNFCFSENVHVFYIDFDLEDSGAVTQKDTKKQFYNELFNDITSFAFGTKEVMKRVKTPQDMTEIQREALEKMYQIKELRDAREYYLTSNVVEDKYLKRGEFGELILYHLLNEYFNSDSLISKIYFKDSAGLPAHGFDAVHIDVENHKLWIGESKLYEKSTSAIDELIKDLHEHFNRDFFHSEFVTIQNRAINDLGLELDDFTKMIIDPKTKVLDRIAGINVALFAGFTSQNINQKFKSHEELVERLNSEIEILKTRADNKVVEHPWNQQLNIFLFLFPLDSKKDFVKDLHLKLKGARQL

SEQ ID NO: 55545 - protein, 711 aa, Streptococcus suis
MISLDEFLKQEVFNDFNDNFELIKEVSNIVDTDIARKALIHVLDIWENVNENAKEIWLDLIEGAGFYPYFVSHIKDVSGDDISLKTQIRTAFYKSNNLEGVYFHEEQKEIEYALTKGDNIAVSAPTSFGKSMLIEEIVARKQFSNILIIQPTLALIDETRRKLQKYNDFYTVVINTKQSIGENNIFILTAERVLEFPNLPQINFFVIDEFYKISNRRNDGRIDALNVALMKVMEHRPQSLFLTPTVDSLSERFREKYNIEFYRTDYSLVNTNIIEVRTPRTNKFYSTTAKKKRLFELLLSQSEPSIVYVKSPGEAYKLANEYFEFLKEKQIELETLGNNDLLEWIDENISPQWELRNLLYHKIGTHNGSLPRHMVTSEIELFNNKELKVLFATTSLIEGVNTAAKNMFIYSSYKGQRTKIDFFDFANIRGRAGRMNQYFTGNVYVFFEEPSQENFVIDVPSIDQEEVSDEIIVNIPDEDLRDKTRKEELFSDLDEDLQEIIKKNLVSVKGQINLYKFISSHKEYLVDLVWSVSPNLDQLRLVLGLGYKYLYNNDKERFINRQAGSAMAIANNPLKTVILNQENFFRDQGEEYPLKKAIDYVLEFQRKEAGFAIPKILAVVDSIQKYVFEKAGMEFGDYSIFASMLESEQVPENLQFLIDYGVPSSALKKLRLVISSDLTDNQVIKTLREQSQFLLKRLLPYEQKLLMRAIS

SEQ ID NO: 55546 - protein, 305 aa, Streptococcus suis; identical to SEQ ID NO: 55544

SEQ ID NO: 55547 - protein, 711 aa, Streptococcus suis; identical to SEQ ID NO: 55545

SEQ ID NO: 55548 - protein, 301 aa, Streptococcus mutans NLML8
MSHNHSEHIENKENVHTFYIGFDLDNSGNMSQVKSKFYDELFDDITAFAFGTKNVMERIKTTQDISKVQREALRKMYKIPELQEASKYYLESDNVEDKYLKRGEFGELLLYHLLHEYFNADALISKIYFKDSLGLPAHGFDAVHVDSENRILWLGESKLYSSSNSAIDALMKDLEEHFNTDFFESEFAIIDNRVHDSGIELDDFMKTLINPQTKVLRKLANINIALFAGFDSKALREYSDDQTFKENLESEIELLRERAISKVANHSWNEHLSIFLFLFPVDNKREFVKDLHLKLKGAQQG

SEQ ID NO: 55549 - protein, 708 aa, Streptococcus mutans NLML8
MIDVDYFLQCSELNDFDQNFTLIKYVSSKIDEPEARKIIIHILDIWDNVNKDVKEIWIDLIGRAGFYPYFVDKVKSRETFNLSVQTQIKTEFFKSDYLPNVYFHEQQKEIEQALSDGENVAVSAPTSFGKSLLIEEIVARRQFDNILIIQPTLALIDETRKKLSKYKDFYNLIINTCQKVDRKNIFILTAERVLEFLNLPQIDFFVIDEFYKISNRLNDSRIDALNVALLKIMNQKPQAMFLTPTVDSLSKAFREKYQINFFKTDYALVNTNIIEVRNRNNNPFTEDSKKNKLFEMLSEQDESSIVYVKSPNEAYKLAGEYIDYLDRLNYEVRNNNLEIFEWIDKNISPNWQLKKLLKYGIGAHNGALPRHVVTTEIDLFNERKLQVLFATVSLIEGVNTVAKNMFIYSQHKGTNKIDFFDFANIRGRAGRMNHHFTGNVYLFIDKIEGEEFVIDVPSIDQTPVSDEILINIPDDEAKEIERKHELEKDLDAEIQDIIRNNLISVKGQKSLYKYIEEEKKNLTYLEWEGVPDYDELWQTLHLGYKFLKGKEAKGFSQNKAVTALKFVNQSLRKTINDQFEYFENQGKKDSLNKAIDYILKFQRNEASFEIPKILAVVDSIQKYVFDKSDMKTGDYTMFASLLENEQVDERLQFLIDYGVPSSAVKKIKNLPDELVEDSQIIQYLKNNFVNVSANMITYEENLLWQAIQ

SEQ ID NO: 55550 - protein, 298 aa, Streptococcus anginosus SK52 = DSM 20563
MVQPSKKATEAVKKFQFIDSIELFAGQGNSTTMQLFMPQINSREFDVLSIQETLMEVLIDFSLTRITIEKYEKNRQWARLSKEARQKFRDYSTNKGELGELFLYTFLEGSLGAPQILSKMSLKTTSGDYTKKSDGIHYLKVPNTDRYHLIFGEAKMYQDVISGFRDAFESISTHKSGKEFEKSLISSQIENEFSDSEDRELINIILYPHEADSVIKVSDAFGIFIGFEIDDTAGKTKTEDEYEEWVKRLVTDIVKSKISTIEGHITSKGLVGNNFYVYLMPFVDLDNTRLVITKGITE

SEQ ID NO: 55551 - protein, 447 aa, Streptococcus anginosus SK52 = DSM 20563
MTKQTIIHELNEKAISDGYLYKLLEKIQYKYGVELLSETAVSLTDREFLNVLRFADILSRSKLALNKNIALKIVSTLYDFYKENEVYQLFAQNVMVKLGNFPSLTLLEKNGLQFDNREIEVDRMIKQIFQRTSVENKFFTDTQYEAFHEIIDSNHYSFSAGTSFGKSFLFSEFVNWIIEEKNGSENIAFLVPTRALITQVVEDIRKTLRNEEYKIVSNPDIPALFRHNKFIFVFTPERLVSYFAGNTNPIISTMIVDEAHNTISDDERSPIFYHAITLAEQKSVKLYFASPNVPNPEIFLELVGNSQEESKQITEVNVVQNKFYVDFEANKVQFYYDFLPTKKFDEFDSKFDSLEKLIINMTQESQSIIYCNSVHNTVSRAQFFSKNISKSSNKTLIELSNYIRETIHGDYYLADLVEKGIAYHFGALPQEIRKRIEETFKQGIIKF

SEQ ID NO: 55552 - protein, 298 aa, Streptococcus anginosus SK52 = DSM 20563; identical to SEQ ID NO: 55550

SEQ ID NO: 55553 - protein, 772 aa, Streptococcus anginosus SK52 = DSM 20563
MTKQTIIHELNEKAISDGYLYKLLEKIQYKYGVELLSETAVSLTDREFLNVLRFADILSRSKLALNKNIALKIVSTLYDFYKENEVYQLFAQNVMVKLGNFPSLTLLEKNGLQFDNREIEVDRMIKQIFQRTSVENKFFTDTQYEAFHEIIDSNHYSFSAGTSFGKSFLFSEFVNWIIEEKNGSENIAFLVPTRALITQVVEDIRKTLRNEEYKIVSNPDIPALFRHNKFIFVFTPERLVSYFAGNTNPIISTMIVDEAHNTISDDERSPIFYHAITLAEQKSVKLYFASPNVPNPEIFLELVGNSQEESKQITEVNVVQNKFYVDFEANKVQFYYDFLPTKKFDEFDSKFDSLEKLIINMTQESQSIIYCNSVHNTVSRAQFFSKNISKSSNKTLIELSNYIRETIHGDYYLADLVEKGIAYHFGALPQEIRKRIEETFKQGIIKFLFTTSTLLQGVNLPAKNLFILSDKIGKANLKELDFWNLAGRAGRLSKELYGNLFVIRVDGTLTSHRLLEFDELPKIESKVLSGKANFYRNIGNILENKEMTNKSMSAKNKREVAEYATILAYQRKKNISSQLVDKFIQKNNESSKIFKKISEIDVPKDILMVSTTIKPKYQEYIYQEQEKLIFQAKYDANTCREILEMLSKKYNWTEEEDKRYLGNKKRLGYYSVIMSEWIQSKPLNLMIRSTIRYHEKNKVPIPINNNPSNLEPFSIYKANHINHVINELLKDVENILRFKVKNYVMNYLKLTGQDEGEWQNYLEYGTNDNIVI

SEQ ID NO: 55554 - protein, 309 aa, Streptococcus equi subsp. zooepidemicus MGCS10565
MVAYNTEYFLEETDDKTHCFYISFDLGDDGEIYQKIDDWSEEIFDDIANFALGKSKVLELSKDSPRKAHREGRRLLYNIDEIKNANEYYLGQQYSKEDDKYMKRGEFGELILYHLLDRKLNKPQLISKLYFKDSFNAVVHGFDAVHYDTQNNDLWLGESKFYKDKNSALRELSKDLHNHFNIDFFNQEFAIISNRLSDLSIDNDAIKQLIDPNTKFLSKLIKINACFFALFDSNILKSFEFEEDSDKVSGKFEEKLKESMKQTRSYFDKQISNFQNKKRLKIHLLLFPVTSKNELVRKLHYKLKKESEA

SEQ ID NO: 55555 - protein, 686 aa, Streptococcus equi subsp. zooepidemicus MGCS10565
MDKQLQDFNLGFLIARDISESQDYHKLIEVLERWDSVHDTLKPVFVDLIESFGFYPYLNDEKLSSLNLSAKYRNEFHKSNISIGGDEKIRFHSEQKRIEEIISKKQNIILSAPTSFGKSLLIEEFISRKIYKNIIIIQPTLALIDETRKKLRKYTAYNIVVNTKQELSDNNIFILTSERVLELFPKISEIKIDLFVIDEFYKISNSKSDERVSQLNIAFYKIMQINSPQLLLLTPNVDDISSDFLNKYNIKFISTEYSLVNQNITHIEYSGKDSDKKEKLFELLKSIPDQTIVYVRSPKRAEELSLEYITRITKIGVELPIIQWIDENISEEWNLKIILNHGIGMHNGQFPRHIVNSQLDYFNQGKLNVIFATTSLIEGVNTAAKNIVIFDMKKSNKPLSYFDFNNIKGRAGRMMQHYSGNIFYFDTPPLKTLEKVDIPLIEQKDNLQSEVLINLESTDVKDNLKERYDTIKSSVSEELWTIFRENYYDVESQKQLYNYLIQNPNLLTDLSWNNHSPSYDTLLQTMKAISHGLDNVSNNSYKHIALKANKISKGNIKDVIDSEVQYQLDKADNEDLHKVYNKAIFDIFKFVRTEAKFKIPKKMSVLQSIVNYILEDKKADYSSFIAKLENEGVGGSKSILLDYGVPSTAIKKIRTNLGSTEIIDYIKNNLDSLNFTNYEREIVEKL

SEQ ID NO: 55556 - protein, 301 aa, Streptococcus intermedius B196
MSHNHSEHLEIKENVHTFYIGFDLDNFGKISQVKSRFYDELFDDITAFAFGTKNVMERIKTPQDISVVQREAFRKMYNIPELQEASKYYLESNNVEDKYLKRGEFGELLLYHLLHEYFNADALISKIYFKDSMGLPAHGFDAVHVDSKNHILWLGESKLYSAANSAIDALMRDLEEHFNTNFFDSEFAIIDNRVHDSGIELDDFMKTLIDPQTKVLNRLANINIALFAGFDSKSLQDYSDDQTFKENLESEINLLRERANKKIVNHPWNEHLNLFLFLFPIDNKREFVKDLHLKLKGAQQG

SEQ ID NO: 55557 - protein, 708 aa, Streptococcus intermedius B196
MIDMDDFFKCSELRDFDDNFSLIKYVSSKIDESEARKIIIHILDIWDNVNKEAKKIWIDLIGRAGFYPYFMDKVKSQERVHLSVQTQIKTEFFKSDYLPNVYFHEQQKEIEQALSNGENVAVSAPTSFGKSLLIEEIVARRKFNNILIIQPTLALIDETRKKLSHYKDFYNLIINTRQKVKERNIFILTAERVLEFPDLPHIDFFVIDEFYKISNRLNDSRIDALNVALLKIMNYKPQAMFLTPTVDSLSETFREKYQINFFKTDYALVNTNVIEVRNKNNNTLTGNSKKNKLFKMLSEQDNSSIVYVKSPKEAYKLAGEYIEYLKQSDYEIRNNDLEIFDWIDENISPDWQLKNLLKYGIGAHNGALPRHVVTTEIDLFNERKLQVLFATVSLIEGVNTVAKNMFIFSQNKGTNKIDFFDFANIRGRAGRMNQHFTGNVYLFIDKIEGEEFVIDVPSIDQSPVSDEILVNIPDDEAKEIERKHELEKDLDAEIQDIIRNNLISIKGQKSLYKYIEEEKEKLTFLKWDGVPAYDELWQTLYLGYKFLKENENEGFVKNKAVTALKFVNQPLKKTINEQCEYFESEGKRDSLNKAIDHVLKFQRNEASFEIPKILAVVDSIQRYVFNKAYMKAGDYTTFASLLENEQVDERLQFLIDYGVPSSAVKKVKKLPKNLEEDLQIIQYLKNNFKDFNDNLIAYEKKLLWQAIE

SEQ ID NO: 55558 - protein, 262 aa, Streptococcus intermedius SK54
MPQINSREFDVLSIQETLMEVLIDFSLTRITIEKYEKNRQWARLSKEARQKFRDYSTNKGELGELFLYTFLEGSLGAPQILSKMSLKTTSGDYTKKSDGIHYLKVPNTDRYHLIFGEAKMYQDVISGFRDAFESISTHKSGKEFEKSLISSQIENEFSDSEDRELINIILYPHEADSVIKVSDAFGIFIGFEIDDTAGKTKTEDEYEEWVKRLVTDIVKSKISTIEGHITSKGLVGNNFYVYLMPFVDLDNTRLVITKGITE

SEQ ID NO: 55559 - protein, 666 aa, Streptococcus intermedius SK54
MTKQTIIHELNEKAISDGYLYKLLEKIQYKYGVELLSETAVSLTDREFLNVLRFADILSRSKLALNKNIALKIVSTLYDFYKENEVYQLFAQNVMVKLGNFPSLTLLEKNGLQFDNREIEVDRMIKQIFQRTSVENKFFTDTQYEAFHEIIDSNHYSFSAGTSFGKSFLFSEFVNWIIEEKNGSENIAFLVPTRALITQVVEDIRKTLRNEEYKIVSNPDIPALFRHNKFIFVFTPERLVSYFAGNTNPIISTMIVDEAHNTISDDERSPIFYHAITLAEQKSVKLYFASPNVPNPEIFLELVGNSQEESKQITEVNVVQNKFYVDFEANKVQFYYDFLPTKKFDEFDSKFDSLEKLIINMTQESQSIIYCNSVHNTVSRAQFFSKNISKSSNKTLIELSNYIRETIHGDYYLADLVEKGIAYHFGALPQEIRKRIEETFKQGIIKFLFTTSTLLQGVNLPAKNLFILSDKIGKANLKELDFWNLAGRAGRLSKELYGNLFVIRVDGTLTSHRLLEFDELPKIESKVLSGKANFYRNIGNILENKEMTNKSMSAKNKREVAEYATILAYQRKKNISSQLVDKFIQKNNESSKIFKKISEIDVPKDILMVSTTIKPKYQEYIYQEQEKLIFQAKYDANTCREILEMLSKKYNWTEEEDKRYLGNKKD

SEQ ID NO: 55560 - protein, 320 aa, Enterococcus faecalis TX0860
MSRSIEIKKVLKCKISESNLYSYFIDFDLDSEGNLGQRLAEFVHLLTQEIPNFALGFYEGDSIPQEKLLDTLIDAANSIYKIDCYQKVSQIYETGECLEDNISDKYLRRGEFGELILHSVLKYYFETFPLIAKIYFKDSYGHAVHGFDSIHIQPKTNTLWLGESKLYTNGKSGVDALVEDLYEHFNIDYFHSEFNVISKRLKDSKTIIDNHGHDTEYWVSLLNQYTSISEKLDNITIPLFCAYETDFFDSFENDFDTFETKYMEEISMLHERFLNKSSHHPWSKKMNIIVILMPLESKKKLVSMLHKKLKTIQSLGVGRI

SEQ ID NO: 55561 - protein, 720 aa, Enterococcus faecalis TX0860
MDWNKVDIYSVKELSFEDSFSLAKFTSNLSLSNKKDIARKIIIHILEIWENIDSSTKEIWMDIVESAGFYPYLISNSTMDTTSEIRKAFHSSNYLDNVVFHKEQKYLSTLIEKKENIVVSAPTSFGKSLLIQEIVASRKFKNILIIQPTLALINETRIKLKPYQEYNYNIVVNTSQKMEEKNIFILTAERILEYPNFPIVDYCILDEFYKVSSSRDDERSDVLNIALKKILDNNKTIFYFLGPNIDEISQGFENHYNAKFIKTDYTLVDTKVEMINIDFQTDKPRSMEKERKLKLFKMLSEKEKEQSIVYLSSPDRALKVAKEYLEYLSTNNLLAKEQQLPINEWIQENINSNWSFNKLIQQKIGVHSGTIPKHLTHSIIDYFNKGLLQVLFCTSTIIEGVNTSAKNVFIFDEKKGPNRIDYFDFSNIRGRAGRLLEHFTGYVYVFHPIPEKEKMELDIPFFDQEKISDEILINFEKKEVKSEHISRFEELMNYDDDLLKVIKKNAVSVSGQKKIIENIKITLKEKPELVLWSGIPKYEALAYILNICWDNLLKDTETTRPMTRNKLPVVAYNSLISKSTSESLNNEFKYLKDNNPKWTNQRVLDQAVTNYFREQRHWISYKVPKWIGVVDSLQKEVCKQMGVINVGDYTYAASQLENEGMNSTLSILLDMGIPSSAINKLKYAVDGITDFRDLVKHVKRIADSNQYSLIEYEKNKIYDL

SEQ ID NO: 55562 - protein, 320 aa, Enterococcus faecalis T2; identical to SEQ ID NO: 55560

SEQ ID NO: 55563 - protein, 720 aa, Enterococcus faecalis T2; identical to SEQ ID NO: 55561

SEQ ID NO: 55564 - protein, 320 aa, Enterococcus faecalis EnGen0061; identical to SEQ ID NO: 55560

SEQ ID NO: 55565 - protein, 720 aa, Enterococcus faecalis EnGen0061; identical to SEQ ID NO: 55561

SEQ ID NO: 55566 - protein, 317 aa, Enterococcus faecalis EnGen0351
MNKKNKIQKILSCKISEANFYSYHIDFDICGKDILQQRIDDFVQIMCEEIPSFAFGFHRGENVPQDEILNTLVEAAKSIYKITEYREVAEMYKKGESIDDKIDNKYLRRGEFGELFLHSILKYLFNTNPLIAKIHFKDSFGHAVHGFDSIHINTESMTLWLGESKIYTSGINGVDALVQDLFEHFNTDYFNSEFNIISKRITDSYEMLDSMGFDSEHWIELLNRYTSLSEQLNNIVIPMFCAYETLTLDSYELDFEKFSKEFEDEVYKLKKRFDEKSKEHPLINKLNIIVILMPLKSKKEIISKLHSKLTLIQALGG

SEQ ID NO: 55567 - protein, 585 aa, Enterococcus faecalis EnGen0351
MNWDIVNIYEVNKLDFNESFSLAKYVSNLSLSNRNSYARKIIIHIYEIWDNVDDNTKGIWSDLAESQGFYPYIRERMDNTSEIRRSFHRSEYIDNIVFHKEQKTLSYLIKKKQNLIVSAPTSFGKSLLIEEIVACDKHNNILIIQPTLALINETRLKLKKYKNYNMIVNTSQQVEEKNIFILTAERVIEFPNLPKIDYCVLDEFYKISSYRDDERSDVLNIAIKKILARQDTAFYFIGPNIDKISSGFEKKYNAKFIKTNYSLVDAQVELVNINYKNDGKRKQEMEREEKLFELLYCKKNEQSIVYTSSPDRAFRLAIKYYEFLKLNNYLEEEELLPINEWISENINSNWSYNRLLLQKIGVHSGTIPKHLTHSVIQYFNYKKLNVLFCTSTIIEGVNTSAKNVFIFDKKKGPNEIDYFDFSNIKGRAGRLLEHYTGKVYVFHKIPPKTEIELDMPFYDQEKISDEILINFDKEELLPKNIKRYEELIEYDKEFLPIIKKNAVSVEGQKKIINDLYEKIQTQPELVLWTGKPSFKAIKYILGICWDNLLKETETTRPMTRNKLPVVAFKYLISSSFNEILRQEYI

SEQ ID NO: 55568 - protein, 303 aa, Enterococcus faecalis EnGen0357
MSNKSTIHTPNHEQSLHIFHIDYDIDDSGSMNQMENKFYNELFNDIPNFAFGKYQVEKRLKDGDSIIPIVREAMEKIYSIPEIREAREYYTGNLDVEDKYIKRGEFGELILYHLLHEYFNADALISKIYFKDSLSLAPHGFDAVHVDSEKRSLWLGESKLYKDGNKAIYELIKDLEGHFQTNFFHSEFTIISNRVQDDDGEDDEFIKELISPETKCLDKLANIKIALFAGYSSDCINQVNPSEDTFLEKLKIEGQKMMDILNTGKEKHPWKNHLDVYLFLLPIKNKTEFVKSLHLKLLGGQQI

SEQ ID NO: 55569 - protein, 721 aa, Enterococcus faecalis EnGen0357
MEIEVQKILKIKKLESIEDSFKLAKYVSSRVDDEEARRIIIHVLEIWDNVNAQSKSIWMDLIERAGFYPYLNDKDETSLGIQAKIRKQWYKSEHLEGVFFHAKQKIIEQKIYQGKNVAVSAPTSFGKSLLIEEIVARNKFNNILIIQPTLALIDETRRKMSKYNNYNLVVNTLQEPRERNIFILTAERVLEYESLPVVDFFIVDEFYKVSNRRGDERIDVLNIAIHNVLSNGPQALFLTPSIDALSDDFINKYDIDFLRTDYSLVNTNVQEVRFKNSKEKKNILFQMLAERKEPSLVYMSSPYKAYSLANEYKEFLCKNNFVRKQVDLPLTEWIDKNISEDWDLKRLLNFRIGVHNGELPRHVVTSQLAYFEEKILDVLFVTTSLIEGVNTSAKTMFIFETKKAKTKIDFFDYSNIKGRAGRMNKFFTGDVFIFGDIPTEEDFKIDVPFVEQKEISDEVLVNLDDDIKEEHNNRVDNIKKNIPEDLMELIKKNVINIAGQKKLYRYIEDNYQSLMPTLIWSGIPDYLQLSKSLYLVYRFLESENINVKYTNMLASRSLSMVNSVSLKKVINEHGNYLFSEERKKKNITSDNISTIEKNAKEKAIREILRFARKDAGYKIPKLLNVLRTIQEYVYSKHQLPFGDYSYFSARLENEQVDERLRMFIDFCVPTSAIRSISKVIPGHLESETDIINYIKINFQSISQNLIEYEKKLLFQAINNGV

SEQ ID NO: 55570 - protein, 320 aa, Enterococcus faecalis EnGen0287; identical to SEQ ID NO: 55560

SEQ ID NO: 55571 - protein, 720 aa, Enterococcus faecalis EnGen0287; identical to SEQ ID NO: 55561

SEQ ID NO: 55572 - protein, 320 aa, Enterococcus faecalis EnGen0300; identical to SEQ ID NO: 55560

SEQ ID NO: 55573 - protein, 720 aa, Enterococcus faecalis EnGen0300; identical to SEQ ID NO: 55561

SEQ ID NO: 55574 - protein, 305 aa, Enterococcus faecalis 02-MB-P-10
MKLSNKSTIHTPNHEQSLHIFHIDYDIDDSGSMNQMENKFYNELFNDIPNFAFGKYQVEKRLKDGDSIIPIVREAMEKIYSIPEIREAREYYTGNLDVEDKYIKRGEFGELILYHLLHEYFNADALISKIYFKDSLSLAPHGFDAVHVDSEKRSLWLGESKLYKDGNKAIYELIKDLEGHFQTNFFHSEFTIISNRVQDDDGEDDEFIKELISPETKCLDKLANIKIALFAGYSSDCINQVNPSEDTFLEKLKIEGQKMMDILNTGKEKHPWKNHLDVYLFLLPIKNKTEFVKSLHLKLLGGQQI

SEQ ID NO: 55575 - protein, 721 aa, Enterococcus faecalis 02-MB-P-10; identical to SEQ ID NO: 55569

SEQ ID NO: 55576 - protein, 301 aa, Enterococcus faecalis 06-MB-DW-09
MDVSNESNDITKVTNHVHTVEIPVASKLEIFTFLINANEFNYTNACEYLLGSICNFALSREIRVKYRDRPAVLAKKARNKFIEWKRNTGELGEFLLFCFLEGHLNAPKILSKLELKTSSEMYVHGADGLHYLRLPSGNYQLLFGESKLNLDLTTGLREAFISIKNFKEGINDKGNEKSGISFEKGLLTSNLEKEVTLAEEKDFLEKLIYPTSEEDAPIVDDAFGIFVGYEMNYDQQRKTLTNDQFRDYINTTVKAEVESKKENIEKYINTYNLHGHSFYIYVLPFSKLDDSRKMMIKELIT

SEQ ID NO: 55577 - protein, 864 aa, Enterococcus faecalis 06-MB-DW-09
MNFIEEMSKKALNDSYLKRLIHKSEKVYGEAVFKNEVGENLTEKEYRDSLRFADILSRSRDENARNISLKIISLLHENCKYKNEDYFKLFSTSVLTKLGNFPSLEVSENNLEFDEEEIQREKIIKEIMQQAPESDKIFTDAQYKIFEKLKNSNHYSFSGSTSFGKSFVFEAFMKYIISERNASDNIAILVPTRALINQVSLKLKTEIKNENYKIISHPKVPLLYKSEERKYIFVFTAERLISYFADSDNPTINYLFVDEAHKLLNDDSRTPLLYHALTQAKRKSIKMYFASPNIPNVEVFLQLFNNSTEESTAITESPVTQNRFFVDCLNEKSIMFSDFGKSITLKGLQFSRKIDEQEREIENLREVLIKLGKSNQNIVYCNTINYTINHARYFSESLEDIENSEILDLITDIRSSIHEQYFLINCLKKGVAFHFGGMPQQIRERVERLFKEGHIKYLFCTSTLLEGVNLPAKNIFIISSKIGIRKMNSIDFWNLAGRAGRLAQDLSGNIFCCHIIDKDGYWKNSRDIEVLQTKKIESLKPAIMRENDQNLYKNIQNFLAQKPYTTENLRTGKDFEKRKSIESYGNILTYHNSLKSDSLLRNVFLEKNPDGRETLKEIDSKIKIPEEILAQSTTIRVDVQNEIFNSDNLQELPSQTDYRSCLKLLEILYDRYHWNDDESGGKKPLVNKGSKSKLEYYAVLMHHWVNSKPLNYIIKQTIEYYDDKGISRNFQLSQNEYVRFEKNNPNHINVLINNLMSDIENTIRFKIKSYVNNYILLMSAKNITPKNIWSEYLEYGTTDSLILEIQNFGFPRHIATFLKNNYEDCFKYDYNGEIIEFNEKKIKNEIDASKYRMEFVELSEILEW

SEQ ID NO: 55578 - protein, 303 aa, Enterococcus faecalis KS19
MSNKSTIHTPNHEQSLHIFHIDYDIDDSGSMNQMENKFYNELFNDIPNFAFGKYQVEKRLKDGDSIIPIVREAMEKIYSIPEIREAREYYTGNLDVEDKYIKRGEFGELILYHLLHEYFNADALISKIYFKDSLSLAPHGFDAVHVDSEKRSLWLGESKLYKDGNKAIYELIKDLEGHFQTDFFHSEFTIISNRVQDDDGEDDEFIKELISPETKCLDKLANIKIALFAGYSSDCINQVNPSEDTFLEKLKIEGQKMMDILNTGKEKHPWKNHLDVYLFLLPIKNKTEFVKSLHLKLLGGQQI

SEQ ID NO: 55579 - protein, 721 aa, Enterococcus faecalis KS19
MEIEVQKILKIKKLESIEDSFKLAKYVSSRVDDEEARRIIIHVLEIWDNVNAQSKSIWMDLIERAGFYPYLNDKDETSLGIQAKIRKQWYKSEHLEGVFFHAKQKIIEQKIYQGKNVAVSAPTSFGKSLLIEEIVARNKFNNILIIQPTLALIDETRRKMSKYNNYNLVVNTLQEPRERNIFILTAERVLEYESLPVVDFFIVDEFYKVSNRRGDERIDVLNIAIHNILSNGPQALFLTPSIDALSDDFINKYDIDFLRTDYSLVNTNVQEVRFKNSKEKKNILFQMLAERKEPSLVYMSSPYKAYSLANEYKEFLCKNNFVRKQVDLPLTEWIDKNISEDWDLKRLLNFRIGVHNGELPRHVVTSQLAYFEEKILDVLFVTTSLIEGVNTSAKTMFIFETKKAKTKIDFFDYSNIKGRAGRMNKFFTGDVFIFGDIPTEEDFKIDVPFVEQKEISDEVLVNLDDDIKEEHNNRVDNIKKNIPEDLMELIKKNVINIAGQKNLYRYIEDNYQILMPTLIWSGIPDYLQLSKSLYLVYRFLESENINVKYTNMLASRSLSMVNSVSLKKVINEHGNYLFSEERKKKNITSDNISTIEKNAKEKAIREILRFARKDAGYKIPKLLNVLRTIQEYVYSKHQLPFGDYSYFSARLENEQVDERLRMFIDFGVPTSAIRSISKVIPGHLESETDIINYIKINFQSISQNLIEYEKKLLFQAINNGV

SEQ ID NO: 55580 - protein, 306 aa, Atopobium minutum
MSPILNFSNQGNNLSSIFTEVKHSESLGLVNPEQLRLFHLNVSSNLFNFASLSNYLINIVSEYVFSRAQVEKLSQSSNPRSIGIQALRVMKKNGAADVRGTGNELGEILLYAFLEDILGAPKLFSKVELNASSTSFGKSSDAVHLLTLENTPFPCYQTVFGSSDITGDIRSAIDNAFTTINKVEHDIKRVDSILIDSNIFEESFDAETAEKIKDIMVPSANTKMANDIAYGVFLGYSLGLNPQSRSNLDFLKAMDAKMQTDIKQHASYIANKIKQFNLGTHSFYFYIVPFNDAEKDKKEIIEDLLM

SEQ ID NO: 55581 - protein, 883 aa, Atopobium minutum
MSDDKVKLGEAIFNSISENEYLNKLYEKALLSYAQKTLSMPIDNNSLNSTELHDLLRFADLLSKSNHATKYEEHKMWAQEIIVLLNFLFPDNKNIKAFGGSVFSNTDNTRGISILNTDFEDPFILSRLFQEYKKSYLRIPSQENMHFFSAQKQAYDHLNDKYFSYSAPTSMGKSFLMRMFIKEQITNEKHQNFAIIVPTKALINEVSQKIIREDLNDLLSKKNYKVITASTDIALEGKHDFVYVLTPERLLYMLIAHPNLKIDYLFIDEAHKLSAKNGRAPFYYKVVDMLRKRKCPPKFIFASPNIPNPEVYLRLLTDISEGDVSALKTSFSPVTQIKFLLDLKNKKMSVYNQHSKNLIEVADVKSGNIQLADFLQIVESQNRSSDIPNHHQTIVYFNSKSKAVNTAKNFADRLNDLNDKDLNALSNDIATSVHKDYYLADIIKKGIAYHIGYLPSSIRMRIEDLFRAGKITTLFCTSTLLEGVNLPADNLFITTKKVFTRKMTPVDFKNLIGRVGRIEYNLYGNVIFVTESDDKSESSEYVDMLKTDVPTQLLSIEAGAGVLTKPERKYIVNTLKSGSVVIEKRKNNQSEESYELTRKFGLILAKDIVTNNNSFVRQSFSDLLTPTDEKNIKSKLNENGFVPDDDINISSDQTAALSKAIIDGLQYPQRSDGHFHYTDIMEFLEKLCTIFKWEQYEFSTLGKVTNGQHKKLSWYGVLLMQWISGLGLNNIINEGIDYHREHPDNFWISKTQIVTYQDTIEFRNILFADTLEVIDNIILFRLSNYFLKFSNEYKRIHKVTSFSNGWYEYVEYGTTNAETIMLQRIGFSRETATYLKRHKEYLINAENGQCKLKRTLLECPNISVRNEAQNMILNMPEVFAHKI

SEQ ID NO: 55582 - protein, 325 aa, Bacillus cereus ATCC 10987
MEILKEEYASGDLLDLIIGNLQREKGSELNAFLTNVTFNKKLTGVQSNIHCYMIGFNGNDQPRVKDLARAVAARLIDYAIPRSEIMEAQEKDQKSNTTVNTVELKMKAKQLFTSLKKSGEGGEMLLYMLVQAFLGLPQLLCKMPLKTSSEMHYHGADGIHIGYDRNTKKLALYWGESKLYKSFDSALKNCLDSLKPFLFDDGGTQASQNRDLQLITDNLDLCNEELEDAILDFLNPNSPSFKKMQYRGVCLIGFDNGAYPLVPNSKDEDSVLNEIKDELGRWEKKLEKQIKNRTPLDSFILEVFLVPFPCVKTFRDSFLGELANV

SEQ ID NO: 55583 - protein, 863 aa, Bacillus cereus ATCC 10987
MSKKRLVHKLYNLDGFQESLLPVVVQSVTLQFININTENNEFMKKVIDWEYMLLCGSILAKSDNGEHLDVAYRIAQYCLNSLETNEHQKLAATIILDSMTNASTIQLAMEKELIPATYKENVPLTFQLEMIKRGIQYSVLDQGTNNLLYVNRFQLDAYKGAMENDWTSISAPTSAGKSFIILQMLIQYLKKQNNQVIVYIVPTRALIQQVEYDLHKALSVNKLGKVYVTSVPIFPKDMENESVVFVLTQERLQWMLLDNHEIKPSMIIVDEAQKIGDGSRGILLQQVIEEIIRRTSEAKFIFSSPMTSNPEIFLNKATSGSLTKSIVTEQVTVNQNLLWVSQVPRKPTQWNIELCLKDSRIYLGKFAMRNRPTQVSKRLPFIAFELGNKEGGNLIYANAPAEAEKCAKILWDLQGDEADTTDKEIHDLIKLIKKVINKDYVLAEILTRGIAFHYGNLPLIIKNEIERLFKNGKIKYLVCTSTLIEGMNLPAKSIFIRGPKKGIGTPMNEIDFWNLAGRAGRQGKEFQGNVICVDVTDSKLWNGEPPSIKKKYVIEPSVDMVVQNIDQLIDFIEAGTPRKEASSNPELEYGFGYFLGEHIRNDGLNNSPFLDSYEKETVKIVEKTITESLQDIEIPKEIILKNSAVSPIAQQKLLQFFKECDEEIEQYVPLLPESDEALDQYCRIVEKISGFLSGDPAAITYPHALLVVEWMRGYSLSRIINRNWKYWKEKNKNLQTVIRDTMRDIEEYARFKFVKYSSCYIDILKYFLECNGYEEIVKDIPELSLWLEFGVSQETQISLMSLGLTRTSAIAVSEYIVATDLTPKQCIGWLKEHNLESLDLSPIVVMEIYNVLSVHTKVDLLNN

SEQ ID NO: 55584 - protein, 325 aa, Bacillus cereus AH820; identical to SEQ ID NO: 55582

SEQ ID NO: 55585 - protein, 863 aa, Bacillus cereus AH820; identical to SEQ ID NO: 55583

SEQ ID NO: 55586 - protein, 288 aa, Bacillus cereus biovar anthracis str. CI
MKALTRRIKNLIFKFNVSPEKISTEKHPFTLNYEDGKYRQLELVRIIKDSVIHFALTADEIKNLKKTDDFGEMERKAWSRISKAHKNSKGDYGELLLFLMLTVFFPTKKFVTKVRLRSSTKDQIKGFDCAHFTVDDDDISLWLGEAKFHNNFSNAINGAMGSIEEHCGFDYLNDEISILSSNIEMNENFPHYEVLDNLLNGGISLDTIKIKIPVLLTFDSALLKKHSDLKDLDFVKNMEKEFLRKFKAIDEKKRVLKPNIEVLFLIIPFQSVKEIKDRLEMLEEVLLR

SEQ ID NO: 55587 - protein, 739 aa, Bacillus cereus biovar anthracis str. CI
MVITERNLEIINGLKDKLKTDKSLNFKEYKTLLEKAYQLFSSNDPKLYNLGLSVICYVAEAQPVDKFIQQLLYDCMVASRVFLYTDMYERTDGNFLQNVETSFLDLISKEYYTLDTDTVLTKDQKSLFDDFQKYRRLVVSAPTSFGKSRIISEIIAHNVYKNIAIILPTIALLNETYQTFKKNKELSKYNLVNSLAQPIAEQNNILILTPEKMDLMLDQNPSLTIDFFTMDEVYKIQDDKERSNIFTHCLYRLTKMRSDFYLIGPYFEGFSQEFLNRTGAVFRKYSAEIVQKDTYDLSRIEYQTEYKIEDVTYKKLKDKDKNLINVLNAIKGQSLVYLGQRGRTEAKAKKIASKREQKYNNEPIDYIKENIHSEWSLATYLERGVAFHHSAMPKHIQSEIVDSFNKELVDVLICTSTLTEGVNTTAKNVIIYDNFKGKSDFYLNGFDVKNIKGRAGRFLSHFLGKVIVLEEIHQEEEKGIIEFSYYDDENLNIEETIQVDRDDLSGKNLQRRLAAEEELNMRRIPLSVIKMNKFIPVHQQINLINFLRKNSKVLRYLTFQSSIPNKWQLVEILELCHQYLFNQRDKEDKNFHISNLIRLTNFYIYKSPLIRDLINNQNGKHIDTKVRSTFYLISHYFEFTLPRYLTIFENLFNFVYKERYNKSDAISLKTLITKLEFGYINKHEVALREAGVPVNIINKIGEKFKDCEDLEEIRIKIKLDPFLLEELTSFEQNLLLKYL

SEQ ID NO: 55588 - protein, 279 aa, Bacillus cereus Rock1-3
MLKEFVTLLTEEVPSFALGYHQGVMVAQENILRVLIEAANSIYKIDAYEKAATTYLNNECWSDDLQDKYLKRGEFGELILHFILKYFFNTLPLVAKIYFKDSYGHAVHGFDSVHIDPTENTLWLGESKIYTDGGRGIDALVEDLFEHFNSDYFESEFTIISKRIKDTKQNLVDAGTDPEHWVNLLNKYTRLAEKLNNIIVPMFCAYETKVFSKYGDPTEFESEYIKEISKLNKRFMKKKGSHPWNAHLNIVVILVPLESKKKLIAALHRKLKNLQMLGD

SEQ ID NO: 55589 - protein, 720 aa, Bacillus cereus Rock1-3
MDWNQVDISNIESLNFEESFSLAKYISQKDVVTEEIANNIIIKVLDIWENVDDSTKDLWVDLIESAGFYPYLLRIIEANNQLDTTSEIRSAYHSSKKLENITFHKEQKILANLIAEEKNLIVSAPTSFGKSLLIQEIISLNKYKNILIIQPTLALINETRVSLRKFSNNYNIIVNTSQEMESKNIFILTAERVLEYEGLPEIDYCILDEFYKLSSFRDDERSDVLNIALRKVLKSDPIFYFIGPNIDNIPEGFKERYNAIFFKTQYSLVNTEIVKVDLEYQTTGVRRQAKEKEQKLFELLYTQRHEQSIVYVSSPQRAYNLAVKYYDYLNENGLVKEEQCLPVSEWIQENLSEDWGFNNLIKNYIGVHSGIIPKHLVHSMIEYFNEGKLDVLFCTSTIIEGVNTSAKNVFIFDNKKGPNLLDFFDFSNIKGRAGRMLKHYTGKVYIFNSVPQREDINLDIPYHDQKYINDEILVNLDRDEVHTSHLERYDELHDYNEELLKVIKKNAVSVAGQKEIIKQLRQKLKSNPELIVWDKFPNKYQLNFLISLSWNYLLKPTETTRPMTINKLPVTIRKHISNSLYVLIMEEQKYLKQQNPKWTEKRVIDTAIENVFREKRHWISYKVPKWLNVVNLLQKVLCKNEGLATSGDYSFFASYLENEGVEERFSLLIDMGIPSSVINKIDHLIPDDLKGQELIYFIKNLKRDDVSSLMAYEIDKIGQL

SEQ ID NO: 55590 - protein, 509 aa, Bacillus cereus Rock3-28
MSEILYHITAKLFCKKQATAFLINENTAITARHAVTDNIKNQTPIRLEFYGLSEGQETKEVFASIIGDSKRYDVAILSLEKSVRSLESWPNLSSQKVNLEDNWECVGFPVGWDSGEGGSRFCYIKGGIYQDSSFEQVVKYDLHLDGKYINDGWDESLEGLSGSPVMINGEIKAIVVVEEYSLIKSPIKSISINRIVNFLEENGIKFNSSFGPKNNLINSRLDAQKNKCEELFKKVDYYGNKPDIDLLISAYYLKYSKDGTSQMKQFSEYLADSISDYACTLADLEKLEKRIIKPLSIVKKTNKVIGQIKGQEKLGSIILWMLVEGILGAPKGLKRISIDDEHDVFNELHIGMNTDYKLVLYLGEGKLKSDLKTAVQESIQSLGKIMNINDDIFYPDDYIYDQIESSEIKKLLSDFKKFDRRWDDIVLELTVFTGYDSDLLKKIEQRGLPKEHMEAFIGQKYIEECTKNEQIIYEMLTENSPIKNININWFIIPFNTIEVFENLVITEIT

SEQ ID NO: 55591 - protein, 851 aa, Bacillus cereus Rock3-28
MNGMNSEKLMNQSDRETLLILLERLKKIQVQQDLFSNVTEHFSKLEIKILAEAGNTLASSIDNQDKMNALEIAISLPQVMPSKGIFLCSFLILRKLGNFPAIKLLETTTGISEYKDLLNGMTALEEYIFESFNEKTFIDKQYLLTNFQKKVSEIINGHQGISISAPTSAGKSYIVLKYILDLIYQNRNNITVVYVVPTRALIKQVMNDFIEHINELGLKNIYVGCSSEVENITSNLGKSNILVLTQERLYQLCTRADVTKLNIAMIVVDEAHNIQSDGRGVLLEGALKFVQALFPNAKTLFASPLVSNPEKLLTTFNIIDGEKEKDYFPLVIQNIIKVKKLAKRIKINVIYQDEEIEVSEIPYEDKGKSRASILANVAMKLWNEQTSIIYSNEPMLSTDVARILYESDNFPVLNDERLEDFADFIEEYISPNYELAQFIRCGIAFHFGSLPTIIRAGIEELFKSGALKIVSCTSTLLEGLNMPAKNIFIYKPEKGRHNPMDKLNFWNLAGRAGRMGNDFSGNIICIDPESWKENLLLGERSFPIIPSSEYKLKNQVNDFKEYIFDRKNPSGMDDYNEQLVSMVVRDRVVGKKLIDSQYKDENNEKDLIEIDEVTEIIINEFKPPLSLLSNTPGIMPDRINDLWEYFEKNKEKYKEFMPIFPTYMYDKGYNRFKVIVKLINKFFMNRVQWSEDHIKRLSINSYKWMLGFSLSDIIFYDKSSNIYTNKKLTGYVKGQIDFLNNRIRYEMVKYTQVYIEVLRVFLESINQKEDAEKLVKLSSYLEYGACSTPALEFIAIGLPREAAIRLDKEFGKNHKVEDPNYYLEWLKTLDVNTLEMPNYLKQQIVQVQKIF

SEQ ID NO: 55592 - protein, 301 aa, Bacillus cereus H3081.97
MELSLASTDFLKVFKHLDSYEFGDTGNKINLFLCPINANKFDYSRIINELMEPVADFAISRRVKSSYANKPMTLSKVAREKFVEYKKNTGELGEFLLYCFLEGHLNAPKIFSKLEMKTSTSMYVNGSDGVHFLKLPDGNYQLVFGESKTIKKLSNAIYDAFKSIDQFINEVNDKGNAKSGINFEKRLISDNLDRESWDNTEKEFLTKLIYPTTDETFDVDDAFGIFVGFQITPTDAQKKASNSAYKKAIETDVKAQLSKELKHIQDLIEKYELFGYTFYIYALPFTELDKTREDIMKGLTT

SEQ ID NO: 55593 - protein, 854 aa, Bacillus cereus H3081.97
MSFLKELAHKALSDEYLETLIYKLEKQYGYHFAGSHINSPLTSKEYNDLLRFSDILCRSDIIQARNLAYKIISLLYNFYHEDNFFKMQAATVLVKLGNFPSLKLAINNEELTLDEVKLESIIKETYQIAPDSKTIFTDAQYKVYEKLKDSNHFSFSGPTSFGKSFIIESFIKYLIKEKNASDNIVILVPTRALINQVTNKLKKEISEPKYKILSHPTVPLLYKNKGNKYIFVFTPERLISYLSNDNPAINYIFVDEAQKLIAQDDSRAPLFYHALMLAKRKSVNLYFSSPNITNSGIFLQLFGNSTEETLSVTETSVAQNRFFIDCIEKKALMFTENGKEIKLPYDNFSTNEHKNLRNAITILGKNVQNIIYCNTVDDTINYALQFAKNLNENKHPNLTSLIELVETTMHEEYYLIDCLKKGIAFHFGGLPQRIREKIELLFRYKIITHIFCTSTLLEGVNLPAKNIFILSNAIGLKKFSDVDFWNLAGRAGRLTKDLSGNIICLRIVDKKNRWDKPKKDLKIVKEKKIKEVSSILITNKKNFYTNIGNSIEEKPFTRKSIPNNEKKMLDSYGNILAYHGLSKTDSILRSMFINKNSEGASILNKLDSKNRVPNNILEQSMTIKLKYQNNILTKEKFLSEIPTEVNYTNCLELLNTLYDYYNWEEEESGGNKPLAKNKNILTYYAVLMNSWINSKPLNLIIKEVIKDYITHKKDIFLSNNQPEPFNVKNRIHINKVVNNVVSDIENVLRFKVKNYVSNYTLLVNNISEEKDLPQSNDWSEYLEYGTTENLIIELQNLGFPRHLATFLKNNYIQLFIIEDNNIIDFLEDELKNTIDKEKFSEEYTELSEILDWEI

SEQ ID NO: 55594 - protein, 316 aa, Bacillus cereus BAG1O-2
MSRAVEVRSVLTCKINDTNLHSYFIDFDINDDGNLEQMLKEFVTLLTEEVPSFALGYHQGVMVAQENILRVLIEAANSIYKIDAYEKAATTYLNNECWSDDLQDKYLKRGEFGELILHFILKYFFNTLPLVAKIYFKDSYGHAVHGFDSVHIDPTENTLWLGESKIYTDGGRGIDALVEDLFEHFNSDYFESEFTIISKRIKDTKQNLVDAGTDPEHWVNLLNKYTRLAEKLNNIIVPMFCAYETKVFSKYGDPTEFESEYIKEISKLNKRFMKKKGSHPWNAHLNIVVILVPLESKKKLIAALHRKLKNLQMLGD

SEQ ID NO: 55595 - protein, 720 aa, Bacillus cereus BAG1O-2; identical to SEQ ID NO: 55589

SEQ ID NO: 55596 - protein, 316 aa, Bacillus cereus VD133
MSRAVEVRSVLTCKINDTNLHSYFIDFDINDDGNLEQMLKEFVTLLTEEIPSFALGYHQGVMVAQENILRVLIEAANSIYKIDAYEKAATTYLNNECWGDDLQDKYLKRGEFGELILHFILKYFFNTLPLVAKIYFKDSYGHAVHGFDSVHIDPTENTLWLGESKIYTDGGRGIDALVEDLFEHFNSDYFESEFTIISKRIKDTKQNLVDAGTDPEHWINLLNKYTRLAEKLNNIIVPMFCAYETKVFSKYGDPTEFESEYIKEISKLNKRFMKKKGSHPWNARLNIVVILVPLESKKKLIAALHRKLKNLQMLGD

SEQ ID NO: 55597 - protein, 720 aa, Bacillus cereus VD133
MDWNQVDISNIESLNFEESFSLAKYISQKDVVTEEIANKIIIKVLDIWENVDDSTKDLWVDLIESAGFYPYLLRIIEANNQLDTTSEIRSAYHSSKKLENITFHKEQKILANLIAEEKNLIVSAPTSFGKSLLIQEIISLNKYKNILIIQPTLALINETRVSLRKFSNNYNIIVNTSQEMESKNIFILTAERVLEYEGLPEIDYCILDEFYKLSSFRDDERSDVLNIALRKVLKSDPIFYFIGPNIDNIPEGFKERYNAIFFKTQYSLVNTEIVKVDLEYQTTGVRRQAKEKEQKLFELLYTQRHEQSIVYVSSPQRAYNLAVKYYDYLNENGLVKEEQCLPVSEWIQENLSEDWGFNNLIKNYIGVHSGIIPKHLVHSMIEYFNEGKLDVLFCTSTIIEGVNTSAKNVFIFDNKKGPNPLDFFDFSNIKGRAGRMLKHYTGKVYIFNSVPQREDINLDIPYHDQKYINDEILVNLDRDEVHTSHLERYDELHDYNEELLKVIKKNAVSVAGQKEIIKQLRQKLKSNPELIMWDKFPNKYQLDFLISLSWNYLLKPTETTRPMTINKLPVTIRKHISNSLYVLIMEEQKYLKQQNPKWTEKRVIDTAIENVFREKRHWISYKVPKWLNVVNSLQKVLCKNEGLATSGDYSFFASYLENEGVEERFSLLIDMGIPSSVINKIDHLIPDDLKGQELIYFVKNLKRDDVSSLMAYEIDKIGQL

SEQ ID NO: 55598 - protein, 316 aa, Bacillus cereus; identical to SEQ ID NO: 55594

SEQ ID NO: 55599 - protein, 720 aa, Bacillus cereus; identical to SEQ ID NO: 55589

SEQ ID NO: 55600 - protein, 301 aa, Bacillus cereus; identical to SEQ ID NO: 55592

SEQ ID NO: 55601 - protein, 854 aa, Bacillus cereus; identical to SEQ ID NO: 55593

SEQ ID NO: 55602 - protein, 316 aa, Bacillus cereus
MSRAVEVRSVLTCKINDTNLHSYFIDFDINDDGNIEQMLKEFVTLLTEEIPSFALGYHQGAMVAQENILRVLIEAANSIYKIDAYEKAATTYLNDECWGDDLQDKYLKRGEFGELILHFILKYFFNTLPLVAKIYFKDSYGHAVHGFDSVHIDPTENTLWLGESKIYTDGGRGIDALVEDLFEHFNSDYFESEFTIISKRIKDTKQNLVDAGTDPEHWVNLLNKYTRLAEKLNNIIVPMFCAYETKVFSKYGDPTEFESEYIKEISKLNKRFMKKKGSHPWNAHLNIVVILVPLESKKKLIAALHRKLKNLQMLGD

SEQ ID NO: 55603 - protein, 720 aa, Bacillus cereus
MDWNQVDISNIESLNFEESFSLAKYISQKDVVTEEIANKIIIKVLDIWENVDDSTKDLWVDLIESAGFYPYLLRIIEANNQLDTTSEIRSAYHSSKKLENITFHKEQKILANLIAEEKNLIVSAPTSFGKSLLIQEIISLNKYKNILIIQPTLALINETRVSLRKFSNNYNIIVNTSQEMESKNIFILTAERVLEYEGLPEIDYCILDEFYKLSSFRDDERSDVLNIALRKVLKSDPIFYFIGPNIDNIPEGFKERYNAIFFKTQYSLVNTEIVKVDLEYQTTGVRRQAKEKEQKLFELLYTQRHEQSIVYVSSPQRAYNLAVKYYDYLNENGLVKEEQCLPVSEWIQENLSEDWGFNNLIKNYIGVHSGIIPKHLVHSMIEYFNEGKLDVLFCTSTIIEGVNTSAKNVFIFDNKKGPNLLDFFDFSNIKGRAGRMLKHYTGKVYIFNSVPQREDINLDIPYHDQKYINDEILVNLDRDEVHTSHLERYDELHDYNEELLKVIKKNAVSVAGQKEIIKQLRQKLKSNPELIMWDKFPNKYQLNFLISVSWNYLLKPTETTRPMTINKLPVTIRKHISNSLYVLIMEEQKYLKQQNPKWTEKRVIDTAIENVFREKRHWISYKVPKWLNVVNSLQKVLCKNEGLATSGDYSFFASYLENEGVEERFSLLIDMGIPSSVINKIDHLIPDDLKGQELIYFVKNLKRDDVSSLMAYEIDKIGQL

SEQ ID NO: 55604 - protein, 316 aa, Bacillus cereus
MSRAVEVKNVLYCKINNANLHSYFIDFDLDDDGNLEQMLKDFVTLLAEEIPSFALGYHQGVMIPQENILRVLIEAANSIYKIDAYEKTAETYLSGECWDDDLQEKYLKRGEFGELILHFILKYFFNTLPLIAKIYFKDSYGHAVHGFDSVHINPTENTLWLGESKIYTDGKRGIDALVGDLFEHFNGDYFESEFTIISKRIKDTQQNLADAGTNPEYWIQLLNTYTKLSAKLSKIIVPMFCAYETNVFSKYHDSQEFEKEYIEEISKLNARFIEKKESHPWNDHLNIIVILVPLESKKKLIAALHRKLKSLQMLGD

SEQ ID NO: 55605 - protein, 720 aa, Bacillus cereus
MEWNQVDISNIESLNFEESFSLAKYVSQQHLITEENANKIIIKVLDIWENVDDSTKELWTDLIESAGFYPYLLRIIESSNQLDTTSEIRSSYHSSNKLEDITFHKEQKILANLIAEEKNLIVSAPTSFGKSLLIQEIISLNKYENILIIQPTLALINETRISLRKFNENYNIIVNTSQEMGPRNIFILTAERVLEYEGLPDINYCILDEFYKLSSFRDDERSDVLNIALRKVLKSNPIFYFIGPNIDHIPEGFKERYNAIFFKTQYSLVNTEIIKVDLEYQTIGVRKQEKEREQKLFELLYTQRHEQSIVYVSSPQRAYNLAIRYYSYLNENGLITEEQCLPVSEWIQENLSEEWGFNNLIKNYIGVHSGIIPKHLVHSMIEYFNDGKLNVLFCTSTIIEGVNTSAKNVFIFDNKKGPNTLDFFDFSNIKGRAGRMLKHYTGKVYIFDNIPQREAIDLDIPYHDQKFINDEILVNLDRDEVHSSHIERYDELHNYNEELLKVIKKNAVSVEGQKEIIKKLKQVLEYNPRLIIWDNFPDKHQLNFVISLAWNHLLKPTETTRPMTIKKLPVTIRKHISNTLHTLIMEEQSYLKREHPKWTEERVIDTAIENVFREKRHWISYKVPKWLNVVNSLQKVLCENEGLATSGDYSFFASYLENEGVEERFSLLIDMGIPSSVINKIDHLIPEDLKGQELIYFVKNLKKDDISSLMAYEIDKIGQL

SEQ ID NO: 55606 - protein, 301 aa, Bacillus cereus; identical to SEQ ID NO: 55592

SEQ ID NO: 55607 - protein, 616 aa, Bacillus cereus
MSFLKELAHKALSDEYLETLIYKLEKQYGYHFAGSHINSPLTSKEYNDLLRFSDILCRSDIIQARNLAYKIISLLYNFYHEDNFFKMQAATVLVKLGNFPSLKLAINNEELTLDEVKLESIIKETYQIAPDSKTIFTDAQYKVYEKLKDSNHFSFSGPTSFGKSFIIESFIKYLIKEKNASDNIVILVPTRALINQVTNKLKKEISEPKYKILSHPTVPLLYKNKGNKYIFVFTPERLISYLSNDNPAINYIFVDEAQKLIAQDDSRAPLFYHALMLAKRKSVNLYFSSPNITNSGIFLQLFGNSTEETLSVTETSVAQNRFFIDCIEKKALMFTENGKEIKLPYDNFSTNEHKNLRNAITILGKNVQNIIYCNTVDDTINYALQFAKNLNENKHPNLTSLIELVETTMHEEYYLIDCLKKGIAFHFGGLPQRIREKIELLFRYKIITHIFCTSTLLEGVNLPAKNIFILSNAIGLKKFSDVDFWNLAGRAGRLTKDLSGNIICLRIVDKKNRWDKPKKDLKIVKEKKIKEVSSILITNKKNFYTNIGNSIEEKPFTRKSIPNNEKKMLDSYGNILAYHGLSKTDSILRSMFINKNSEGASILNKLDSKNRVPNNI

SEQ ID NO: 55608 - protein, 316 aa, Bacillus cereus; identical to SEQ ID NO: 55594

SEQ ID NO: 55609 - protein, 720 aa, Bacillus cereus; identical to SEQ ID NO: 55589

SEQ ID NO: 55610 - protein, 301 aa, Bacillus cereus
MLKTLVRKSFLEHFHHDIKDHFLIEKKCRLNLHILKITNNQFELSPLLRELSNSILTFCLSKKEYQQYIDEQRFGELNLIAQERFRDYQSNDGEFGELLLYCLLESHLGAPKILTKMNLKTSHNDYVKGADGVHLLKLNDDEYQIVFGESKMYKNVRSGLKNAFESINSFLTHSKNNVDYEMQILNAHFHQEVLEENAYEEIKKIILPSAQEDEIQTDKAFGIFVGFNLEVDKDLKKRLSNKEFNIEIRKRVSEIVQKEFSYIESLIDKYDLYGYNFYIYCIPFSEMSETRKAVIKKLKGE

SEQ ID NO: 55611 - protein, 853 aa, Bacillus cereus
MKILERLAIDAYEDTYFKELFDKANDLLFKNIFKESDAIPLNQKELIHLLRFCDILSNSKKAQHRNISYKIITLLHPFYQENSFYKTVSTAVLNKLGNFPALELLDYSTPLPVDRELERKIKKTIHKVKDFENTFLTDHQFELYQKMKNSNSFSFSGPTSMGKSFIMKIAISDLIKKVTKPNIAIIVPTRALIHQLATEIKTELSFLIEENGYTVLTSGNLDGIDFQHSNLIMILTPERLLAYLSDNTYPIINTLFIDEAHKLANKQDKRSVTLYTAIERATYVNRNVQIIFASPNVTNPEVFLQLFNQNTEQVFYSNEAPVAQQLFYIDLLDKKVIHYTEYNPKTFHPKILENKDSLDMIYTLSQGYSNIIYCNSVRHTVDKAIQFSMRFGKIISSQKEKEKINKVIETIKKTVHPDYFLIDCLKKGIGYHFGNLPQVIRHNIEALFKEGIIKYLFCTSTLLEGVNLPAKNIFILQNKNGRRNFEKVDFWNLAGRAGRLRFELSGNIYCIRDDKSSWKKINDLVKNKEQILLKPTVSNNLETKIKQLESAIQNKDIDKANKSEKEIIRYLANIISIDTLELPTGYETPIIQKLIERNEHEILSLAQEKIKTITVPKYILKTNQLIDVQQQEAAYQYILKQIDNPKSVTFPTVINYDNCLEILNKFHSIYKWEEYDSRLGYKPSLRYFALLMNNWINGTGLNELISQRINYYSDNHKNIYEYVENERQLVPFIRHNKNHINILINELIKEIEEILRFHIQKYVNHYYLVLQDVLGKEHAGTNWGNYLEYGTRNSSAITLQNLGLSRHVANYLLNEYSKYFSFKDGRLIKIMKNELLKELDDNSIEKQEVLLFL

SEQ ID NO: 55612 - protein, 235 aa, Bacillus pumilus
MATETSIFKSELIFEQFVEKTYFRGFSVGYEFEEFRYEALVELIFSAVLDFSLPESEKKSITPVNAQRKMRNAAKAVYTSDKYSKRGEFGEILLHIIMRDYYNSIPAISKMYYKDGSNETVKGFDAVHIVPVEQELELWLGEVKFYNNMSNAIRDVIPELVVHTEKKYLRNEFLFISNKIDPLWEYADKVKNLIDERTSLDKIFQRIRIPVLLTYDSEVVKSFKVMSCVMITKTH

SEQ ID NO: 55613 - protein, 631 aa, Bacillus pumilus
MSTKMLLRYEFYRSENIPDIVMHQKQAEIYDTISNQKSVILSAPTSFGKSLLIEEIVASLMYKNIVIILPTLALIDETRLKMTKYTDKYKLIFSSKQNIASNNIFILTPERLMEIENIPKVDFFIIDEFYKLDSTRSEDERINVLNHAFYKLIKLTNKFYLLGPNISSIPAGFEREYNCEFIPSDFTTVSCDEVFIEREKGREFEQLIELVQNFNDPTMIYCKSPKSAEIKVSDYLEKTQNNLTLTDEHTDAINWIKQNIHPDWLLIRALSYGIAFHHGAMPRHLGRYIVEEFNRGSIKYLFCTSTLIEGINTTAKNVVIFDNKKGTVPITYFDYRNIRGRAGRMTKHFLGKVYSFYTPPNDLEINVDFPWYTQDTASDEILIQVEDVDLKPESREKMQFFKDQDLLDVDVIKKNNNIPVKGQLELAEEIKKNIDHYNKLLSWTNYPSYEQLECCCNLIYNYLRFKRTRDEVFSGKQLAFLVNKYVQLNSNMANYIRYFISNDSRIDTVDKAVQKASNLSRKWFEFRFPKLLLALQQIQESVFKQHEKPYGDYKFYASLVESACCSPTLASLQEFGLPISLLKHLEPYLDLRTLEDEGDLDKLILQIKKLDVDSLSLDPFEDKILNEFIKG

SEQ ID NO: 55614 - protein, 281 aa, Bacillus akibai JCM 9157
MTTDAPIFESDLIFDQFIEEIQFRAFSVGYEFEEFRYEALVDLIFSALLDFALPASEQTITAINAQRKLRRAAKTVYATEKYGKRGEFGEILLHIVMRDYFGSVPAISKMYYKDGPNETVKGFDAVHIVPRDNDLELWLGEVKFYNNIRNAIRDVLPELHAHVDKVYLRNEFLFINNKIDDSWEYSDRLKRLIDERTSLDKIFSRIKIPVLLTYDSKVVRSFSQACEEYKKHLISELNEYHDVFRGNELPNVDIVLILIPFEDKKKLVDKLHEKLRILQLI

SEQ ID NO: 55615 - protein, 714 aa, Bacillus akibai JCM 9157
MKTNTEYYQIKQLLEHKIDLSMDECFSIFSWLTASIQKEDTEGSARDILLRLLDKADVLPIEARTILNDYIERFGYFPYLQDLDKASVRTLLRYEFYRSEHIPDIVMHQKQAEVYDSLYNKQSVILSAPTSFGKSLLIEEIVASREYNNIVIILPTLALIDETRMKLMKYAKDYKLIFSSKQSFDERNVFILTAERLIEIEQIPNIDFFIIDEFYKLDSSRSEDERLNVLNHAFYKLLKCTDKFYLLGPNIASIPSGFEERYGCKFIPSEYTTVACDEIYIKRKKNKEFDQLVELVQQLREPTMIYCKSPGSAEKYVKKFLDKGKTFLDKNTSHTDSIEWIEKNIHPEWLLIDALRHGIAFHHGSMPRHLGRYIVEEFNKGNIKYLFCTSTLIEGINTTAKNVIVYDNKKGRDLISFFDYRNIRGRAGRMTKHFVGRVFSFYTPPEDIDVDVDFPWFTQDNASDEILIQVEEKDLKDDSIEKLKPYKEQNVLDIEIIKKNNNIPVRGQVELAQLLHENVDYYHKFLGWTSYPTYDQLRVTCELLYKYLRFANTRDEVYSGKQLALYVNKYVRFKSNMARFIDFFVTSDKDNVDKAVQKATKISRNWFEFRFPKLLLGLQEIQESVFKQHGKTCGDYRFYASTIEAAFCTPALSALQEFGLPISLLRKLEPYLNLKEIEKEEDLDKVIAQIRSLHINEIELDAFELKLLKDFLRN

SEQ ID NO: 55616 - protein, 297 aa, Bacillus subtilis
MREQLLSLINKTIVYKYDLPNHSLGIDRSIFSTENDRCYSTICNQSLIEIIYNSIIEYSFNEFDINGKEYDNLHAIALKTKLKYNEVASETSKISYGFHGETILYCILYAKMDAKPVISRGYFYNPLESSETKGYDSYHLIERNGTTELWFGEVKFRNNHTSGINSAIDSIEKAISDAYLSTNFLAITNHKNNFNISGTKVEEIISKWEENPLVDIIEEIKKYDIKLIYPIIIIYDIKDDYDNSIKIAIEHIKNNHSLKTFSLSIPYSIYFIWLPVDKVRDIKAEVIKWIEQRKPLI

SEQ ID NO: 55617 - protein, 765 aa, Bacillus subtilis
MDRTKEAANIIYNLNLYKKGQIKDYKFINIVCNYFDQIKDVNLTESDFKFLRYIANISGIPHFYNLLKQFNNVLDIQNFDLNTFSSILHESTLHIDENSMLHRYQKQIIDKFEINSLNRYFLSASTSFGKTHLVFEIIKKMRYSNVVLIFPTIALLTENLERILSNHHYKYFKEKYLIHTLSEVNNLGERNLFIYTPERYLSFLEKSNTNFDFNFAFVDEVYKIDNDYIIDEETKENERDVAYRLAVHYSLNNKTDVLFAGPYMEFSFPNTTNYNPSFNTFLHDNKISLINYNEYETVNKSYFYVKKNKTFPHDNKFNINYSSNKKTNRLIETVKSIINIHQNTIIYCANRGKNGGVEYYADVLINSQVLKEHSYTKYIDLIDHLSSNFEPNWILVKSLKHGIGIHHGLIPKYIQKEIINLFNNGLISVLISTTTITEGVNTSAKNLIVMHSKKGNKNLKKFDAKNIAGRAGRFGFHYSGRVIDLSNSLLNIIEKEGEALKHKNYDLSAPKEEIDLFYSNEKYLSDKEMTKKREIITEQRKRNIPDFIMNQYKVISRMDKIKIYDAIVKLKDDDFSHINKLIRTINYKLKIDFTGFQIVLDVLKPIVKNQDLKFLIDHKGKNNNYSTLTYLVHYYLKDGFKGSVQYKLKNRETIDQAIQQTAKFIYSTLKYQTVKYLGVFNLMYKYFISNKEQKKIEDIAGIDKLIIKFEYNAITENGRIASDYGVPSKVVDYYEESEKKLQIKKDFDKYELEAFERIEKIFNKD

SEQ ID NO: 55618 - protein, 528 aa, Bacillus thuringiensis serovar monterrey BGSC 4AJ1
MLEIIDKLHMLTSKLSCGEQGTAFLIDKNRAVTARHAVKQNILYQHPIKLEFYISEGNTIIRSARVIDHDKTHDIAILELDKAVTHVNGWLQFSSRKIGNVDDWETVGFPRDWITEGEGSRYCYIKGDIFLRTKTDATAKYDIHLASDYIKEEWPHGFGGLSGAPLIVNGDIVGVIIDEEYSAIKSPLKAVSIEKSIDIFTRNNISVLNDSANQPLRMKHLLSERMESQQNTCKELFRNFEYYVSPPLSELSISVNSYHLKYDEGGTHRIKELAKHLGEMLIKYACTLSDINKLNNSLTVKNLEIIKEKTDKCISRIKSQGELGPLMLWMLLEGVLGLPRVYTRANLYDLEPLNQVHVGINNDNKFSLYFGDGRLKDSFDLAIQEVIESLTGSFDSKSPSLDAQDSMYLLDNYAFDCIDSCRLKDLLDPFTKPHERDWTKVAWEVTIFTGYNSSTLSNLAKRNLSKEELEQVLRHSYEREYRANLLKIYDLIKENIHINQLKIHWFMLPFNTVEELENLVLEEIRRGI

SEQ ID NO: 55619 - protein, 847 aa, Bacillus thuringiensis serovar monterrey BGSC 4AJ1
MGIQDIIKSIESADIIPQLLIKIKKMEIQKDLFSHTTETITHQEIKLLIEIANILAASPEIEHKKEALHIATSLPLITEFKGVQLTSLMILRKLENFPAIHLLEEKRNISEYRNGLSGLSLFEAYFQESLNTRNFFGKDFVLTKFQKKVSNLVSEFKNLSISAPTSAGKSFIFLKVILNLIYEEKGATAIYIVPTRALIRQVMNDFLENIKQFNLEDIYIGCSSEISSLLGRTGKSNILVLTQERLYQLCTKENVKTLNTKIIVVDEAHNIESGGRGVLLEGALKYAQILWPQVRLLFSSPLVSNPEKLLSTFKLEDSCPEKDLFPLVRQNIIEVQRTSKKLIVSSDFKKNKFEIARISYVNNGSSRAKILANVVIELWNEQTSIIYASEPMLSSNVARELFNSGKFPQLNDERLDEFADFIEEYISERYELSKFIRCGIAFHFSALPPIVRAGIEDLFKCGALKIISCTSTLLEGINMPAKNIFTYKPNKGKNTPIDRLNFWNLVGRAGRMGTDFAGNIICIDPNKWDENPLEGEVLQQVIPASEKKLVDKDESEKLKEYIANRDKPSGIDDYNEQLASMIIREKIRGEQLVNSIYKSQENIQVLKEIDEITETILNEFTAPIELLELNPGIDPDRINDLWKFFMQNEELYKQLIPRFPYEEEGYQRLRLMIKIIKKVFLFNEDWSEKFIEKITAVSHNWMIGAPLSKIIFYNKTVLQKEPKKITSYVKEQIDFLNTTIRYKLVKYSQVYTEVLKVFLDRIGKKEEAKKVVNISVYLEYGACSAPALEFMAIGLPREAAVKLEKLINKKQNATSEYYLKWLKNLDLDALKISSYLKKQIKNVRETL

SEQ ID NO: 55620 - protein, 283 aa, Bacillus thuringiensis MC28
MSSSTPVFESSFIFEEYIEETHFRGFSVGYEIGEYRYDALVELIFSALVDFSLPHSEISTFTPINAQRKMRNAAKAVYATDKYRSRGEYGEILLHIVMRDYFNTVPAISKMYYKDGPNETVKGFDAVHIVDQENDLELWLGEVKFYQSISGAIRDVVPELQAHVDKDYLRNEFLFISNKIDDSWEHAEKMKMLIDGRTSLDKIFKKIRIPVLLTYDSKVVSSYKEVSEEYQMQLIEELNKYHDTFRSNELPKNIDVILILIPFEQKKRLVELLHKKLEVWQQI

SEQ ID NO: 55621 - protein, 720 aa, Bacillus thuringiensis MC28
MAADMIKDMDYNYIKTLIANEKLSTEQCFSIFTWINRVLQDEKSESEGRDILLRMLDRKNDLPSEIHSILTDYIEQMGYFPYLPIHDYDVSTKTLLHYEFYRSENIPDIVMHRKQAEVYDAISNQQSVILSAPTSFGKSLLIEEVVASKMYANIVIILPTLALIDETRLKLIKYTDEYKLIFSSKQGLGNKNIFILTPERLLEIESIPDIDFFIIDEFYKLDSSKSEDERLNVLNHAFYRLIKSTRNFYLLGPNISSIPNGFEKEYNCEFIPSNYATVACDEIFIQRKNNQELEQLAELLRTLHEPTMIYCKSPQSAEKNVRDFLLKNKEHLYKNDYHIDAINWIAKNIHPEWLLIEALSYGIAFHHGSMPRHLGRYIVEEFNKGTIKYLFCTSTLIEGINTTAKNVIVFEDRKGTNRISYFDYRNIRGRAGRMTQHFLGKVYSFYSLPDATDESVDIPWYTQDNASDEILIQIADEDLKDSSKDKLKPYTEQDVLDVGIIKKNNNIPVKGQIALAELLQNNLESYHENLNWTNYPSYKQLETCCILIYDYLRFKNSKDFVYSGKQLAYYVHNYVKVQSNMARYIKFFLDNDDKVKTVDQAVQKATKISRNWFEFRLPKLLLGLQQIQESIFMKNGKTCGDYKFYASQIESAFCTPVLSSLQEFGLPISLLKQLEPYLHLKKLEEEEDLDEVIRKIKKLDVDSLPLDAFESKILKDFVRN

SEQ ID NO: 55622 - protein, 300 aa, Clostridium botulinum A2 str. Kyoto
MEFPQHKVPESFQNIFYHLIQNEEININDGIINLFCMKIHNKSFDTSSLVDELSDSIVSYCLSQTDYDEFYQKHNIGKMYRQAASLFRDYASNKGELGEIILYSFLESHLNAPKIISKMKLKTSTNDYVKRADGIHMLKLDDENYELILGESKMYESLNDGIKDAFNSIHELKTRTTNNIDDEINLISTNISSEFAKENYELIKKIIKPSKNEDYEYDVSFGVFVGFEMKIKKILDSNPSQIDFKKQIKEKAQQDVLNKIDTIRQQIINLKLGDHNFYIYFIPFFDIDKTRKDIIKQLTQ

SEQ ID NO: 55623 - protein, 846 aa, Clostridium botulinum A2 str. Kyoto
MFIEELVKDIYEDEYFIELYDKICNLFVRATFKFKTEKLSVKELKDILRFADILSNSQEALAKNKAYKIISLLKKTYEKNEVYKAYSIAILKKLSNFPALDNCEDIQLPIDREIEYGLKKIEYKIPIGNGHFTPTQYKIYKMIRQSNFFSFSGPTSMGKSFIIKQFILEKIQKDNFVKGFCILVPSKALIKQYLLEFIKVLSELNITKFNVLTTPNVLDFTEFEEDNFIFILTPERLLNLLSSTTKVQLDYLIIDEAHKLFNDDDRALTYYTSIDYCMTKFKFIKVIMSSPLIKNPNIYGNMYYRKESTSIRALETPVSQNLFYIDLLKTTIDFYDDNKPYHFNISRILKLHTANGILHKVGQGNSLIYLNSKNEMIEYAIDLCAYFKENNIDILNVEEKAKVNQVCELIAKIIHPEYYLIECIKLGIGYHYGNLPLIIRERVEELFKNGTVKYLFCTSTLLEGVNMPAKNVFIFSDKIGRKNISKIDFWNLAGRAGRLGYEFYGNIFCLKIKENMWKHKEIFIEKDDISAQDILKDTLKKKNKEIKNVLLEEEIKQDISKKEKYINYISNIIQIDTIAKQDTSMIKQIAEIDNETLDICKEFENKVDIDVLNANRSIDIKVQNNVNNYLVMNKMPSIINTKVCFSVLSNMYDLYRWDIKEKNLKNRGALKYIALLMAEWMNDMPLSRIIHGTMQYYHKNAKEVWVNNQPIGIFDISNQSHINILINQTINDIEHILKFDLEKYFNHYYMLLKSKYGEECIGANWAMNLEFGTRNNKNIIIQNNGFSRYCANILLTEYTKYLVFEGDILKTIDINILNSEEIRNIVLKNELKTWFGIKNIYIDNID

SEQ ID NO: 55624 - protein, 315 aa, Clostridium botulinum
MIDNLKSNFKLNPGAFNARLKEVKYEWKVNNIVTEGRFFYLSFKNGQPNLDDFIDYIYYKVPKFCIPAKEHEIARKKALETEDDRYMMELYDKAKELFIKSKQQQKKAGEPGELILYILLEEAIGAPQVACKMYLKTNKNMPVHGSDGIHLYYDNERDMLRVIWGESKLYNSLSTALDEICESVKSFRESNDETAPIARDIEILKDYISIRDEQLRTGILKYFDPYEEESNNKVDCHACFVGFNYSKLVDEKDIEKIIEDEFRDEYLNRIKSACSLFEEKIKKNKLDKLEFIFFLIPFKDINELRDKFYKKLEGK

SEQ ID NO: 55625 - protein, 492 aa, Clostridium botulinum
MIDELANRIWQNSKFKIEYANLIDESIKLELNLNSNTKKINKESCIRLVKSLLIFASCEKEFLRKISYNIGVALLNILDRNSEEFDSIVELIKLAFSRMGNFVAIDLIKFKNEDIKTHIPRMLWFEEKSYEMNNTINLLSKEVKLTNFQFRLWKLLNEGKSISLSAPTSSGKSYILKSYMLSVVNQFKNKSYIYIVPTRALITQVSQDFIELIKEYGLEGINIITTPNIEENMEEHLENNIYILTPERARVLYNSKKIKFKVAVVDEAQTIEEMERGLILQDIVEDIIMYNDDLQLVFISPLINNPQILNEIFDRDRAISLKESESPVSQNIIGIKSEKSSLEFEILINDVFHSLGKLKLKNNIENKDNKLAIIAKTVGEENQNIIYTTGPAKCEKICKSLIELNEEIKEDEANNDLIELAKFIEEYIHKDYLLAKCIRNGVAYHYSRIPSVIKKNIEKFFEQKKIEIYSMYKHVIIWDEFTSKKYIYFRTL

SEQ ID NO: 55626 - protein, 309 aa, Peptoclostridium difficile CD3
MGEPKLYVDDSFLNVFDELLRLNDPSSCNINLFSMKIKNKDFDYNLLSEDLTNRLITFCTSSKLYNEMKGQDKVGALSKLSRKSFREYVKVKRLQEEYINTRTKDGEIGELILYAFLESHLNAPKILTKMRLKTSTNDAVKRSDGIHLLKVDDGYFELIYGESKLNESLNTGIQEAFKSIHEFKNRDDNNIDDEFLFLVNNIESELLNDEYEYVKNILIPSKNNVEHDVSFGIFVGFDIKIPSAIQEKRQREFRNEFKEYIKDRVIKKIISIREKIDELSLDEHNFYIYFVPFVNLNKVKVEILDSILE

SEQ ID NO: 55627 - protein, 837 aa, Peptoclostridium difficile CD3
MLERLAKDAYDSEYFWELYKTLTNVFLKNIFNEEKSDITQKELVDSLRFSDIFSNSNEEKMRNLSYRIVSLLYDRYKDNDIYITYSNAILKKLNNFPALKNTPYRELPIERELEFFISKERFKSPIENEHFLPTQYNIYENMVNKQSLSFSGPTSMGKSFVIKQFILGEILKGVLKNFCIIVPTRALIKQYVIDLNRDLKKININKYKVVTNSNILEYLTPNEDRYIFVLTPERLNILLFNRNKVNINYLIVDEAHKVFDHDTRALTYYSSIDTCMSINKNISVFFSSPLIKNPEIFKDSYKKINFKDYRTDESPVTQNLFYIDMNEKKVEVVDNLYKNIDISTTIDNDDINNLYYHIGKGYNNIVYLSSKAKSIEYAMDFYKYMCSNNIRTISDEESKEIDNVCEMIKENIHKDYYLIKFLKKGIAYHFGKLPSIVRESIEDLFKRGIIKYLFCTNTLLEGVNLPAKNIFIMANYIGNSKMKGLDFWNLAGRAGRLGYEYYGNVFCINDYNRQHAWKDKDVLYNKDNIKINDNLDSALKKNKVKIEKNIQSNELSLDFSKDDNYNNYLSNIIKIDNMVDKGSSILEKAKLNNLDIEYEDVDKNINYDTINSAKSIDYKIQKRLYKEDNLKVLTNNINYKNCYETLVLMHNKYRWDIKEKRLKDKKTLEYIATLMNLWMNGMPLNIIINSSIEHKSKNKSNIEIARNQYKRFNKEDINHINILINNIITDLEDILRYDLEKYFNHYYSILIDKYGIDLCGINWSLYLEFGTRDPKNIILQNAGFSRYASSILIKDYSKYLIFKGNIFEGIKKEIFNHETKNKLSLFNEIKNSSYIIL

SEQ ID NO: 55628 - protein, 309 aa, Peptoclostridium difficile DA00126; identical to SEQ ID NO: 55626

SEQ ID NO: 55629 - protein, 837 aa, Peptoclostridium difficile DA00126; identical to SEQ ID NO: 55627

SEQ ID NO: 55630 - protein, 309 aa, Peptoclostridium difficile DA00142; identical to SEQ ID NO: 55626

SEQ ID NO: 55631 - protein, 837 aa, Peptoclostridium difficile DA00142; identical to SEQ ID NO: 55627

SEQ ID NO: 55632 - protein, 309 aa, Peptoclostridium difficile DA00165; identical to SEQ ID NO: 55626

SEQ ID NO: 55633 - protein, 837 aa, Peptoclostridium difficile DA00165; identical to SEQ ID NO: 55627

SEQ ID NO: 55634 - protein, 309 aa, Peptoclostridium difficile DA00191; identical to SEQ ID NO: 55626

SEQ ID NO: 55635 - protein, 837 aa, Peptoclostridium difficile DA00191; identical to SEQ ID NO: 55627

SEQ ID NO: 55636 - protein, 309 aa, Peptoclostridium difficile DA00195; identical to SEQ ID NO: 55626

SEQ ID NO: 55637 - protein, 837 aa, Peptoclostridium difficile DA00195; identical to SEQ ID NO: 55627

SEQ ID NO: 55638 - protein, 309 aa, Peptoclostridium difficile DA00197; identical to SEQ ID NO: 55626

SEQ ID NO: 55639 - protein, 837 aa, Peptoclostridium difficile DA00197; identical to SEQ ID NO: 55627

SEQ ID NO: 55640 - protein, 309 aa, Peptoclostridium difficile Y384; identical to SEQ ID NO: 55626

SEQ ID NO: 55641 - protein, 837 aa, Peptoclostridium difficile Y384; identical to SEQ ID NO: 55627

SEQ ID NO: 55642 - protein, 309 aa, Peptoclostridium difficile Y215; identical to SEQ ID NO: 55626

SEQ ID NO: 55643 - protein, 837 aa, Peptoclostridium difficile Y215; identical to SEQ ID NO: 55627

SEQ ID NO: 55644 - protein, 309 aa, Peptoclostridium difficile F601; identical to SEQ ID NO: 55626

SEQ ID NO: 55645 - protein, 837 aa, Peptoclostridium difficile F601; identical to SEQ ID NO: 55627

SEQ ID NO: 55646 - protein, 312 aa, Clostridium symbiosum WAL-14673
MANRIFDKKNVILLKVNEDDLNTFLVDMDIDDEGNPKYCLDDFTKAICNTIPEYVFAQYEDPNIHQNDIVEKLREAAHCIYKIKDFQLMKQWCVDKDINAYNELKKSSTAKRGEFGELLLHLILREFKRTIPLISKVYFKDSASVPAHGFDAVHISTDEKILWLGESKLYDDSKEGIKALVKDLNEHINIEYLNDQFVIIKKNLDNNSIPDREQWIDTITNCTKLSDKLNIINIPMLCTYTHDIYKKFSDMNDPNAVAYHKLNIRELKEYFDKQNKMPLKDRVNIILMLFPVNDKNELVINLHKRLWHMQSI

SEQ ID NO: 55647 - protein, 738 aa, Clostridium symbiosum WAL-14673
MDKTTEIILEVENVEIISCEQSFKIVSYCTQLLSQHSAEAELSARKIVIHVLNNWGKVDDNLYEVWADLIETLGFYPYIQKNSTDLKIMSFADDVRMSYFQSDFLENTYLHKEQKKISNYLLAGKNIIASAPTSFGKSLLIEEIVASKKYKNIVIIQPTLALLDETRLKLKKYADDYKIIVRTSQPYSEDKRNLFLLTAERVMEYEPLPQIDFLIIDEFYKLSLRRKDGRADTLNNAFLKVVNKFHPRFYFLGPNIDGITDGFAEKYDAIFYKSDFSLVDCNVIDKSNLINWSSSDKQIDKEKISILCELLSELRNEQTLIYCSTPARARRMAKVYLEYLQRIGRENNNQLPLIEWIDKNVSPEWSLAKELQYGVAIHDGSLQKHIGASIIKYFNEGRLNCIFCTSTIIEGVNTSAKNVILFDEKKGGNEIDFFDYSNIKGRSGRMMEHYVGRVFNFCHVPMQESIVIDIPFYEQDPEILTNEILINIKKDDVKQEVRKRYDQINALPADLLNIIKQNGVSVNGQIRIYNKLIGDMKSKGTLQNIQWSQLPTWDQMYYVLELAENNLFNFDSKRGVFSVKQLARYLNMYRTKKNIIDIVNDIFNSKIETVKTLTDERKAKYYDEAIETAFHIYRHWFQFTIPKAFRVVDSIQRLLCEKKNVKPGSYTFFVQQLENDFIRENLSILVEFGIPSNAVRRLEKVIPASLLEDEVIDFIKKNRSNMKKYLLLYENERLDQCI

SEQ ID NO: 55648 - protein, 305 aa, Desulfosporosinus orientis DSM 765
MKISIGENDFLDSFEHLWEKNLDENGVSKLNLFVLNINANSFDYSCLIKNIRDPMIDYSVSRKIKETYKQRPATLTYEAQKKFKNYINNTGELGELLLYCFLETHLNAPKILSKLELKTSTSMYVHGADGIHMLKLDNGNYQLLFGESKTIADLTVALRDAFDSIYEFKNEVNEVGKEKSGINYEKTLLYNNLDKEIFSEKERDFLKMIIYPSRERNFEVDDAFGIFIGYEIEMSDDDKKLPNSEFRKKLKEKISNDTIKRISYINKKIIDLKLFGHSFYIYIVPFTELDNNRKHIMKEITQWGS

SEQ ID NO: 55649 - protein, 848 aa, Desulfosporosinus orientis DSM 765
MGVLKEFASKVFEDDYFLELYSKVEEIELNKFFHFRHKNLTEKEFFDLMRYADILSYSDKAKEKNCSYKIISLLFEEFSSSKLFISLAYAILIRLGNFPALEIISKKCSNIISPDEVEMEKIIKEIFQKDPYGKYIFTDPQFNIYQALKNNNHYSFSGPTSLGKSFIMEAFIKYLIHEHHYCENIVILVPTRALINQVTLKMKSELKDVKEYRVLSHPVIPKLHTNSNTKYLFVFTPERLISYLANVNNPKIDYMFIDEAHKMVSNNDSRGPLFYHAILQAERKSVKLFFSSPNVPNTEVFLQIFEKSTEETMSIKESPVAQSRYFLDLYNNKITLFSDFNKDVEIQLSSINENEKNFNFWLNKLGKNSKNIVYCNSTKDTIEYAIRFSRVLPIKKNEKINELVQLIKEHIHRDYYLIECLKKGVAYHFGRLPQRVREKIEQLFSERIIDYIFCTSTLLEGVNLPAKNIFILSNAIGLSKFKDIDFWNLAGRAGRLSKELSGNIICTKIVDKRNSWGNLEKDIQIIKNKDVKKIQPLVIKGQKNFFENIARSLENREFTRKNVSSGEIEIWNHYANIALIHELRDDQSVLKSNFITKIQNGKEILKKKTKENYVPANILTVSSTIKETYQNRIWLKDNLITLPTEVTKENCYGFLIQLYDLYNWAEEESKGHAPLAKNINKLKYYAILMKDWMTSVPLNKIIWSIISYYKERGEFWDVDGFIEFTGEEKWVINLIINELMRDIETNIRFKMKNYFTNYYLIMCEKYGEKNAGANWGDYLEYGTTDLKIIELQNIGLPRHLATYILDNHLDCLEFEDGALINIFEDKIIQDLDKNKPEYYEFIQTFGLN

SEQ ID NO: 55650 - protein, 466 aa, Lactobacillus gasseri CECT 5714
MNSSKLGINQPPSFFMKLRKTPKKLGSKMAREANFTYLINLVNPYLPDAEVTSKEETVRLIIKQVSNNQYLPMPASSTLNKYAADGISRTAAKKLLKFINKETASLEEYFSKIGADQLTLIANKLKKDGISSDVYRGKVPALLAKLFTEECERVASRKNNRKQRIPIQSEEEDIFTKTVSDEMFAAVFRHVNVSEMDAVKNSNAIHAFVLKPELLPFNYEKLRQLVESNITNYAVARGIRKNDVVGLRAARLLRNYTQSGIPSNLLGELLNYVFLEHAEHAFKLYTRAEIYKSSRIIDNEGVYLKDNEEKIQLVFGVSQLNDSLQDAIDNVIEELKDFQNNQSNELVVARDMLDTSVLESQLGEERSKEIIKMIVPDDDEVDEIPSYGIFLGYQFETDKDLVDCSANVAKTRCLETVKEDMNQAIRQLNQAIKSCHLQKSSFYVYMLPFTKASEDGNKIMREVIGE

SEQ ID NO: 55651 - protein, 867 aa, Lactobacillus gasseri CECT 5714
MPSKKLGQYLYDNLNHNTYLRKLVKILLIQYANFLFGANWQLTQKQKSDLLTFADLLSKSINKGGTEKQRNLALRIIALLTKMYPKDPSVGIVNDEVMSSLNNFLRRQDSGYIQTITLSRLWNDVIKDARKRERKIPGQQGKYFIGKQDQLFRSLENELNSFSAPTSMGKTFLIKKYIELKIISGEKSNFAITVPSKALITEVRSSLIDELGGNLANNSYRIVSRAEEYELDYQNQSFIFVMTPERLSNVLMQNQNLSLGHLFIDESQKITEEDSRSIFYYEIFDRIKSWQQKPKITFASPLIPNPGIFNQLVSDDESDDGLSISESPVTQIKFIIDRYSQKLLEYDDLTHKAINLVQFSENSIPHIILNLSNAIGSDKQSLIYYSSKAAAISDAVLLARQSDEINDGNLNSLANYISRKIHPNYVLVDLVKKGIAFHIGDLPVDVRTKIEDAYRQGALKFVFCTSTLLEGVNLPADNIFVTSLNNGQRKLTPLEFLNLIGRVGRLNHSMIGNVFLITGEREKSRSNLDAYLKDLNNNLKKEKLSVEKAVKPKQVAAIKQSLKTGNIKLEQLKSDKNYDLLRKLSLLYIQEVRNNRQGVIRKHFSSSITNDDEQIILDSLNKRYKDNLEENINFSSDQSEKLKQEISDAGIQEYPNIYNGDKLNVHDTKAFFLKLSNIFNWQLYERKFIAGNQSPEIQDKVIDDYTKMTLLWISGLSLRRICDIAIRIRRSGDYRFLDRLDRHRSDISNINWDTITINAVMRQLQTIQFILGKYFLKVTTELTKNGIPPVNDWYRYMEYGTCSDLRIWLQQNGYSRDASAYIEDNQDKFIIQVGDNYFISQNIFQANDLDTVNETKEIKVNVPEIFI

SEQ ID NO: 55652 - protein, 432 aa, Lactobacillus reuteri SD2112
MANNEFRILIDSLRIAMSEDDGHSIEGSINIVLGKYTNNWKENTYSSQNLKKLYYKGLNYNAAKKIKGAVINEESFRKYIDSFSSSDKESMAAQLQTVNKDVTQLEANAVPYFCVNLLNELIEEAITGQQKKPTKSGPNGYLKKTVSDDSFSSVFTEVATKELPLIKNSNAIHAFILKPDFFPFSYKNLEDLILKNITSYASARGIEKNDVAGIKATRILRYYMHSGVPQNLLGEMLTYIFLEHIDDAKKIYTRAEISANSRTINSEGIYLKDNKGKSQLILGASQLNDNLQDAIKNVVSELKEFRNNRSQSLVMPIDLIDSSILREQYSEEESKAILKILVPTENKIDEVAAYGLFIGYKFAPDDNLKNCSTDEAKLKCHKIVESDLHQVIAQLDDEIRLNEWQRSSFYVYMLPLISASTDGNTIMSELIG

SEQ ID NO: 55653 - protein, 869 aa, Lactobacillus reuteri SD2112
MVKKNKSLAEYLYDNLQQNHYLRKLVKQLFTQYAYFLFQAKWSLDKKEKTDLLKFADLLSKAQSNNGSSECKNLALKIITMLQEMYPEDPNVDIVRNTVLSSLKNYLPRENHGYIKINTVDFLWDEVIDNYNKNQRKIPGQENQTFIGDQDKIFNSLENSINSFSAPTSMGKTYLMKKFIEYKVKMGEELNLAITVPSKALITEVRSSLLTDLVDNLSEHSYRIISRAEEYAFDYENRNYIFVMTPERLSNLLLDNGDLRLDYLFIDESQKATEMDDRSIYYYEIIDKVQKWKQKPRITFASPLIPNPDVFLQLIDGSIKNNIRVDESPVTQTKFIIDRYNKELSVYNDQTKKKQHLCEFTENAIPHIVKMITDVMKDKTQSLIYYGSKRDVMSDAIVFSRQFPTIESKELDELAAYISRKINPKYVLVDLVKKGIAFHIGELPIDVRTKIEEAYRKGILRTVFCTSTLLEGVNLPADNIFVTSLGNGKKKLSQLEFLNLIGRVGRLGHSMIGNVFLITGEKEKSHSNLSSYLKYLSKKISKEHLSVEKALKPKQVAAIKKSLSAGDLKLSAVTDKRNYDLLRKISLIYIKELNHNQEGFTRKQFKKKISDDDETEIFTALHSRYPDESQDDVNFSADQSNLLTRAISDEQIKGFPQIFNDENKLNVEETYQFFLKLAHIFNWNLYERKFVHADSDENIQHQTLEDYAKLTLMWISGYSLKQICDYVIAIRERLDFQFLDRLDQSRKLVGNINWDTIAINITMNQLNKLNFVLGKYFLKVSKELSANSIPLDNNWYQYLEYGTSSDLRIWLQQNGYSRESSQYIENKADELIVNGPFGPLISNRIDDANDPDVINETKEIKVNVPEIFN

SEQ ID NO: 55654 - protein, 461 aa, Lactobacillus reuteri SD2112
MGINPPPSFYMKLRKTPKKLGSKMAKEASFTYLIDLVNPYLPDAEDTSVEETVRLIIKRASNNRFAPIPASSTLNTYASGGISRTAAKKILKLTNKETSSLEEYFRKIGADQLTLIAKKLKKDEISPDVYRGKVPALLAKLFYDTFDRAANRKNKRKQKFPTKSEDEDIFTKTVSDKTFANVFRQVNTSKMDAVKNRNAIHAFVLKPELLPFSYTNLKNLVTSNIANYAVARGVSKTAVVGIQAASLLRRYAKSGIPNNLLGELLAYIFLEHEDNALKLYTRAEISKDKRTIDSEGMYLKRDQGKAQLILGASQLSNNLENAINNVVKKISNFNNNQSNEMVLATDIVDSSILQTQFGEDKSNAIIKLMAPTETDFEDIASYGIFIGYKFRTKLDLDDCTQEEAKERCCQAINSDMKQAIGRLNRAIQQHHWQKSSFYVYLLPFTNAEEDSFAIMKDLIGD

SEQ ID NO: 55655 - protein, 870 aa, Lactobacillus reuteri SD2112
MPNQGKKLGEYLYDYLKNDDYLHKLVGTLSKRYTYWLFHLDWKLTGKQKHDLLRFADLLAKSINKKGDSRQKNIALKIVATLSKMYPDDPEVALITNEVLTSFNNFLPRQGQSYTLVPTIEQLWNEAVVNYQKEKRQIPGEESKSFIGKQDIIFKSLSNELTSFSAPTSMGKTFLIEKYIELQVKEGVVGNFAITVPSKALITEVKVQLIKDLGAKLGEKQYRVISHPEEYRLDYEGSYICVMTPERLLALLIQYSEARLIHLFIDESQKVTEASSRSVFYYEIFDRVSAWKNRPKVTFASPLIPNPGIFKKLVQTAASNDGLRIVESPVTQVKIIFDRSANKAEIYDDLNQNTIPIGTFKETPSVPDIIRKMMRVLGNSNCNLVYYGSKVNAISDAVVVSRSMEESNDPRLIELADYISRKIHPKYILVKLVRKGIAFHTGELPVDVRIRIEEACRQGILKLIFCTSTLLEGVNLPADNIFVTTLQNGKRTLSQLDFLNLIGRVGRLGHSMLGNVFLITGDTANSHSNRAAYLSRMNNRLKKAKLSVDAIKPKQAAAIKKSLEKGDVRLDNIEKDKNYDLIRKLSLLYVKELRNHHHGVVRTHLAKHITYKEERKILQSLQERYADELEDDINFSSDQSESLRNKISQKNIKGYPNIHDGEKLRWPEAKAFLLKLSEIFNWAIYESDFVKSKQDKETQDKVIEDDAKIALLWMSGYSLQRICDFAIQIRDPERGDTRFLNRVSQYHENTPNIDWETITINLVMKRLQNLQFVLGKYFLKVTQELTKSGMPPQNDWYRFMEYGTDSDLRIWLQQNGYSRESSEYIEDNKDEFIIQADNNYFVSKDILKANDLDAVSETKEIEINVPEIFI

SEQ ID NO: 55656 - protein, 432 aa, Lactobacillus reuteri CF48-3A; identical to SEQ ID NO: 55652

SEQ ID NO: 55657 - protein, 869 aa, Lactobacillus reuteri CF48-3A; identical to SEQ ID NO: 55653

SEQ ID NO: 55658 - protein, 461 aa, Lactobacillus reuteri CF48-3A; identical to SEQ ID NO: 55654

SEQ ID NO: 55659 - protein, 870 aa, Lactobacillus reuteri CF48-3A; identical to SEQ ID NO: 55655

SEQ ID NO: 55660 - protein, 302 aa, Lactobacillus salivarius cp400
MGHRHSEHEKIYGNLHVFYISFDLDDNGDYVQIKSEFYNELFNDITSFAFGAKNVMSRIKEPQDITRIQREALRKIYSIPEIKEASDYYLSSNIVEDKYLKRGEFGELMLYHLLHEYFNAEALISKIYFKDSNGLAPHGFDAVHVDSNNRLLWLGESKLYKDGNKAIDALMRDLEEHFNRNFFREEFTIITNRVHDSNMEVDEFIKCLIDPETKVLDKLAKINVALFAGFDSKAISDKNRNQLQFREKLNGEITRLYNKVEQKRKQHKWNEHLNLYLFLFPLDSKNEFVKDLHCKLKGAQKL

SEQ ID NO: 55661 - protein, 710 aa, Lactobacillus salivarius cp400
MMEITIENILSKREFLNFQESWDLAKYVTRVVDSSDGRKILIHLLDIWDKVNEETKPIWIDLIERAGFYPYYIDKIDTVNSEKASLQSLIRASFFKSNYLDGIYFHEQQKEIEIAISEGKNVAVSAPTSFGKSLLIEEIVARNQFDNILIIQPTLALIDETRRKMRKYADRYNLIVNAHQKIKERNIFILTAERVLEVIELPRIDFFVIDEFYKISNRRNDSRIDALNVALLRIMDMEPQAMFLTPTVDSLSKKFRNKYNVTFFKTDYALVNTKVEEIRTRYGNVYTGKEKKEKLFKLLKEQKEPSIVYVKSPNEAYKLANEYLKWAKPETIENNDLDIFEWIDENISSEWQLKKLLKNGIGTHNGALPRHVVTSEIELFNSRKIKVLFATVSLIEGVNTVAKNMFIYSANKGNNLIDFFDFANIRGRAGRMGKYFTGNVFVFNEELEPEKFVIDVPGVDQEEVSDEILVNIPEVDIENKERIKILKDGLDDEILKTIRDNLVSINGQKKLLNFIELHYQDLNYLRWRNIPSYDQLWRTLHLGYKFLYSTDKPKLSQNKAVTALKLVKDPLKKVISEQKEYLIEKGHKDPLDAAIHQILKFQRDDANFKIPKLLAVVESIQKYVLKKHDIVECGEYTSFAALLENDRVSERLQFLVDYGVPSSAIRKIETILPSDIESDVDVIRFIRDNKSSVEEKLINYEKNLVYKAIV

SEQ ID NO: 55662 - protein, 435 aa, Lactobacillus salivarius
MEINRFKVLVQALKPLSVTEGKVPIPTAVLAIFKNYTKNWDEDTYGESNYKKLYYKGLNPSVAQELDDIIDEDKFKQFVNHATDKQKESIAGYLFKKLKLREEIPLDGLAYFCVNLMSELVEEAREGNKKQKIPTQKSEDKIAFVKTVSDKMFTSVFHQVNVGEMNVVKNRNSMHAFVLKPELLPFSYKNLRELAMSNITNYAIARGVEKTDITGLKAGQLLRRYAKSGIPSNLLGELLTYIFLEHEENALKLYTRAEISAIDRTIDSEGMYLKSDRERVQLILGASQLNNDLQEAVNNIVEKLSKFRNNQSDEMMLATDIVDMTILNAQLGEAESQAIIQTIIPNESGLEEVASYGLFIGYQFKTEQDLDNCTRDEAKKICRQTVNNDLQQAISQLGRAIQQHHWQKSSFYVYLLPFTSAEEDSHKIMNDLIGG

SEQ ID NO: 55663 - protein, 871 aa, Lactobacillus salivarius
MEKNGKKLGEYLYEHLANNEYLIKLMDDLSLQYALGIFSGTCKLTSKQKNDLLKFADLLGKSISDQENNEQKNTALRIVAMLSKMYPNDPSVKLISNEVLTGFNNFLPRKRQGYSLVPTIDYLWNGALREYQKKKRQIPGQASLSFIGKQDIIFNSLENELNSFSAPTSMGKTFLIEKYIEFKVKNGSIGNFAITVPSRALITEVKSKFIDDLGTSLSENHYRVISHPEEYWLDYEGNFIFVMTPERLSALIYQNPGIRFSHLFIDESQKITETTSRSIFYYEIFDQIKEWNDPPKVTFAAPLVPNPGVFKQLVETGKGDKGLQITESPVTQVKIIFDRYANKTLVYDDLSKKAIPIFSFEGSWTTPGIVLSMLNKLEDSKCNLVYYGSKKNAISDAVVVGRQLPELDDKELNELADYISRKIHPNYILVDLIRKGIAFHTGELPINVRIRIEEACREGLLKLVFCTSTLLEGVNLPADNIFVTTLHNGKGKLSRLDFLNLIGRVGRLGHSMIGNVFLITGESEKSHSNREAYLSMLAGKLNKAKLSVTVIKPTQAAAIKRSLEQGNVRLEDLKEHRNYNLIRKLSLLYIKELKNNRSGVVRKHLAKSINPDEEKKILQTLQNRYSDMLEDDINFSSDQSEKLREKISQEDVRGYPDIYKDEKLNLSGTKDFLLKLSEIFNWDIYESDFIKPKEDKKIQEKIMEDDAKLTLLWISGYSLRKICDFAIKMRNPKSGDTGFLNRVSKYNDEVPNITWDTITINAVMNRLQKLQFVLGKYFLKVTQELTKSGAAPQNDWYKFLEYGTDSDLRIWLQQSGYSRESSEYIEEHKDELIIEEFDGWKVSKLVQYVDDIDVANETKEVMVNVPEIFLS

SEQ ID NO: 55664 - protein, 303 aa, Listeria monocytogenes; identical to SEQ ID NO: 55568

SEQ ID NO: 55665 - protein, 721 aa, Listeria monocytogenes; identical to SEQ ID NO: 55569

SEQ ID NO: 55666 - protein, 485 aa, Listeria innocua FSL S4-378
MKRLCFGTLMHILYQARNQKVTNDLLCDAIFSSYSQTTNSFDSSLPGHLKSGRNNVPPDVIAAARDTSFEDAERVFENKVVKLIKDSKRESVVRAIKVILREDTTIQDHSVIGYVKGYEKLNITNNSTFSLSALLASVFYYAIIEVKNQDCQAGIKEIDKKFVESFDLSDEQIYFESAKAESQIPLHKTLHDPTFDRVFEKVSSINIFGLSNPSNVHIYGVDANNCKFKFRALKEYLVDNIGNYVFSRAKTNRLITSKKSYAIGSQALIKFMQAYGASAETVLGEMLLYVFMEQELNAPKIMSKIEINDLGRSIESKSDGVHLLAINDNGQLFHQLVFGASDVHGDLAIAIDRAFDKIIEIESNSDTELKMVENTTHGSIYDSDTTNYMVNLLIPNKASVAKPDMAFGVFLGYTLSLGYTETNNNKYRIAVKEQMKRDISALKPYIEQKIFDNGMSGYNFYFYVVPFNDAPLEKSSIISEMLDGR

SEQ ID NO: 55667 - protein, 559 aa, Listeria innocua FSL S4-378
MIPKINIDEVKKLASKYTPVCQFKYFLDLCEGQAYFYNDYSKSLSSIGKIPQEDELSDIVNRVGSTQQNIIYCNSRQKVVDYAVQYASKLPIKDDEKLISLANDIRNEVHNDCYLADLIQRGVAYHVGYLPTNIRLRIEKSFVDGILRTIFCTSTLVEGVNLPADNLFITSYRNGNSNMDEVEFRNLVGRVGRIKYNLYGNVFLIRMEDRLKTQNYIDLLQNDVPKQEISINLIDNKKYLSLVVDDLARGDMELTKVREAATEKDFDALRKFAMIFTKDIAEDNITPIREAFSSLLDEESEYKIKENFPVEKTSDDINFSYDQIINLRELVESGQEYPKLTGENDEVDFEELVDFLMKLRKVFKWDIYEKRTIGKSGTYREDSVVRWYAVILLRWIRGNGLSQIIYHALKYKEKNPNSGVWVGNMKMADVYNKNSKSHKNYIIAETLGVIENVLLFSISNYFRKFSLEYKDVHQVDHFQNDWYEYVEYGTTNPLTIFLQQSGFSRESSKYIEEPTNQNKYLIEVDGEIQIHRSILTCGNVGVETEAHDIQFNMPELFID

SEQ ID NO: 55668 - protein, 309 aa, Bifidobacterium indicum LMG 11587 = DSM 20214
MVEFSEDAQAAVNWFEQLEDISLFENELKPTKMRIFMPKLDGHEFDYSGMKDVLFNPLTYYVLSRKSVDEYLEHKQYQQMTQAARRAFKDYARNKGELGELILYVLLEGHLKAPKILSKMSLKTSSQDYIKGCDGVHLLKLDNGRYHLIFGESKLYKNLTAGFRAAFKSINSFLGSGPLKEKKDWEGQLISQHIDDEKLSEKDAVEAIKQVIYPSRRGAEKLKGIKFTRTFGIFIGFEIKVDKEKENLDEDEFETWIKSFVSEQIRGLVGTIQKQIENQKLKGKHFYVYLMPFTDLAKTRRELTKELTS

SEQ ID NO: 55669 - protein, 840 aa, Bifidobacterium indicum LMG 11587 = DSM 20214
MNAQKTVTDLLNEQAMNDVYLYELLEKAQKNYGSQLFGEEPARLEDKEFADILRFADILSRSKTPINKNVALKIISVLYDEYMNNNAFKLFSKSVLTKLGLFPSISFVEEKGNDAQDLEFVIDGGIKREIQKTADGKHVLTDQQFKILNKMMNSNHFSFSAGTSFGKSFLFDEYVERMIHGANSSQNFAFLVPTRALITQVVNDLNEKVELLNRGSKDRQYKIITSPEVPLLFAKNKFIFVFTPERLVSYFSKENPVIDILIVDEAQKTISDDERSPLFYHAISLAKQKSVKLFFASPCVPNPDIFLSLVGNSAEEVSRVQDLSVTQNVFFLDFVKGKAWQYFDFISENESSYAELPLPWSGVNEVFDHFSNKGQSLVYCNSVGTTLREAECEAKRLPADKSPDRVRLAKFIRETIHEQYDLANYVEKGVAVHFGALPQLVRNRVEDAFKSGVIHSLFTTSTLLEGVNLPAKNLFVLSKKVGRSRMDQLSFRNLIGRAGRLSKELSGNVIVVRSKEDDWSEKTVSDLLTKEVCPLETAIITGDNRFYQNIGNVLLDKPLTRKKVSIKEKRQLSSYATIFAYQQNARVDSVLHTTFAKKNPDMPEVLRKVEAIDVPSSILMSAISIKPKYQQQIYVSGDRYSLPTTYDYESCSKVLHAMFDYYNWSEEEDSKKLGNRQNLPYYTVLMSEWLNSRPLNLIIQSTLNFYSKTKKKICTDYINWVEFDGSNSVHVNSVINDVMRDLENIVRFTIKTYVSNYMQLTDQASSGWGDYLNYGTNDPLIIELEKLGFERYVAIELQKKAEDAFVMSENSEIAGVTKEKLAAISFSHETEQAVSRILLG

SEQ ID NO: 55670 - protein, 306 aa, Mobiluncus curtisii subsp. curtisii ATCC 35241
MAQATITPTLRGDTFASTFTEVAHSNTLGLRNDEQLRLFHLSIQNNRFDHTALIKFLKRNVGRYVFSRAEYEGYKQRDDLEEVALDAVNRMRSQQDGMGLGEILLYVLLEQILEAPKVMSKIELNQARGQIHSRCDAIHLLTPDGQRTTSSIVFGTSSVVGNIGDAITAAFDRVVDIEQNRSDEVQLAEQTVFTKTLDPATANYVKDLLIPKPGGAPVFDTAYSMFLGYDIGLDPKNYSNQQYRAVLDQKMQGDIAAHAQMIANEINTRNLDNYSFYIYVLPLNEVDVDAGAIMDGLVGGPGGSHV

SEQ ID NO: 55671 - protein, 889 aa, Mobiluncus curtisii subsp. curtisii ATCC 35241
MGSWVGQVVAMSDKQVTVGDLVFSDIDSNEFLKQLYANLLYNYGLHRLGLVDRQPYDVDLEAVLRFADLLSKSTHPTNRDRHRVWAQEIALLCHILYPQDARTKAYVPAIFTTLGNYPGLKQLGVTSDAGILDAAFNAYQAEYLTVPGDKSMKFFAPQKKIYDRLNDGKFSFSAPTSLGKSFIMRTFITNQIKSGVTANFAIIVPSKALINETRSKLIADLGEDLERHNYRIVSAAGDIVLEGDHNFIFVLTPERLLYLLIGKPAIEFEYVFFDESHKLSGKNSRAPFYYQTVTILQHRHRPPHFIFASPNIPNPEVFLRLVDPNSDENETNAVATQYSPVAQFKYLVNLHENTISSYNDHTQEFTHLASLQAQDATAQGVTRFVSESSRGSDHRGQTIVFHSARHHAVQAARDYAQGLADLNDKDLDALAKDIERDVHEDYYLSGLIRRGVSYHIGYLPPAIRERIEGLFREGKISTLFCTSTLLEGVNLPADNLVITTNKIGRAGMTAVDFKNLIGRVGRIEFNLYGNVFIIVGNQLASEQKAKELLQANVPVQKLSVQTDSQIISKKMKQGVVKDLQEGRIEFSKGNESYERYDMKRKFGLMLLRDITTGRQSLVREEFSDYLDEQATNSIIATFSRREGQQDDDINVSVDQAEALTHAIQAGLQYPQLSPKGKFSYDETLAFLQRLASIFKWRIYNPETLGRTTKGSDQLAMLSWYTVLLLQWMEGHGLRSIMNRAIEHHRKTGIVWINRQPNRYLDSKEHRNLVFSDTLEAIEQVILFELSNYFLKFSNEYKKVHGKEQFDNDWYEYVEYGTTKQETILLQRLGFTRESATYIRINVSNAIFLHEGKPHLNPILLESSNINVRKEANEIRYNVPEAFSMPDFLF

SEQ ID NO: 55672 - protein, 316 aa, Mobiluncus curtisii ATCC 51333
MEGSEMTATITPTLAGADFDAIFTECSHSSSLQLVNPSQLRLFYLDTINGLFDYAGLEEFILDCLGDYVFSRAEIEDYIQRGKTRNIGLYALRRLRQHQTAGQIGSGSDLGEILLYVFLEKILGAPKIMSKIELSRTGGTQPSRCDAIHLRPPNPAENLPYNTIVFGTSEIVDDIEDAIDDAFERINHIQTNQRNEVLMAENTAFEKTFDDRTTHHIKDLLIPKKGRGTKRDIGYGIFLGYKLGLNPSAYSSDGFDAQLAAKMRLDIAQHADLIMHKINELNLANYSFYIYVLPLNLPSTDRIEIMNHVLDQGVQP

SEQ ID NO: 55673 - protein, 876 aa, Mobiluncus curtisii ATCC 51333
MNTLGDAIFSDINNNEFLNELYDDLLYNYGLLKFPTRREPRPVDLEAALRFADLLSKSNHPYEKEHHRTWAQEIIILCDKLYPDNPLVRIYATSVFMAVGNYQGLKLIGGGNVPLSIFERAFSGFQEDYLRVPGTEDQTFFVPQKRIYDRLKDPEFSYSAPTSLGKSFVMRTFIINQIKQGATASYAILVPTKALINEMRSKIINDLKETLAERNYRVISAAGDIALEGEHNFIYVLTPERLLYLLVAKPHLKLDYLFIDEAHKLSGKNSRAPFYYQVVSMLHDRPKPPRFIFASPNIPNPQTYLQLVDAAIDGDESAIATTYSPVTQFKFIMDASKQEILVYNDHAHHSTTIAPYQGADPLNNLLATLQLASAEDRAAQTVVYFPSKEKAIKAAKNWALKQPILADNELDALAEDISRDVHDQYYLVELVRKGLAYHIGYLPPAIRQRIEDLFRQRKIKTIFCTSTLLEGVNLPADNLIITSKKNGRASMSAVDFNNLIGRVGRIEYNLYGDVIMLVLPKETSREDFTQFLDEEIPQQKLSIETDTGLFRKIDKQRVVETLMQGKIALPEKKQNESEDKREMIRRYELILLRDIMEDRSSLVRREFADHLDKEKEATIRQQFAKREAAQDVDLNISVDQVENLTHAIRNGLTYPERIESSSFDYRQVLKFLEKLAIIFHWDIYESSTLGYRNPKTQEHTKLRWYAAILCRWMEGRGLKFIMNQAIQYQMKHPDRFFVTDYLMERYTDSKEHRNIVMANTLKTIEEQILFSLSNYFLRFSNEYKKIHNVESFPNNWYEYVEYGSTNEEAIALQRSGFSRESATYILKNNPDYLRIDERGSLHLDFGLTSSPNINVKNEASEIFYNLPEVFDSLPPF

SEQ ID NO: 55674 - protein, 306 aa, Mobiluncus mulieris ATCC 35239; identical to SEQ ID NO: 55670

SEQ ID NO: 55675 - protein, 889 aa, Mobiluncus mulieris ATCC 35239; identical to SEQ ID NO: 55671

SEQ ID NO: 55676 - protein, 306 aa, Mobiluncus mulieris ATCC 35243; identical to SEQ ID NO: 55670

SEQ ID NO: 55677 - protein, 889 aa, Mobiluncus mulieris ATCC 35243; identical to SEQ ID NO: 55671

SEQ ID NO: 55678 - protein, 298 aa, Gardnerella vaginalis 6420B
MSHIYSENIKINDELHIYYISFDLLDSGYCQSKDKFYDELFNDIPAFAFGTDVMNMKKDTIGLVPTVREALKKIYSIKEIQEASREYLDSKSTEDKYIKRGEFGELLLYHILHEYFGADSLISKIYFKDSINGVAHGFDAVHVDTDKKIIWLGESKLYRNPTTAIDELVKDVMSHCNVNFLEDEFQIITNRICDSKTACDDYILKLLDYRTKNLEKLANINICLFAAFESNSLVHFNEVNFKETLKEEVNKLYDRMDKSLSKHKWKEHLNVYLLAFPLDNKREFVSSLHQKLKGGQQI

SEQ ID NO: 55679 - protein, 711 aa, Gardnerella vaginalis 6420B
MSNNDVEFNVNFLKDFEYNWECAKYCTSVIDTSKARTFLINILENWEQVNDDIKPIWLDLIERAGFYPYYIDKIKSVKSYNQSLQSSIRSAFFKSDFLNGVYFHEKQKEIEIAVSLKKNIAVSAPTSFGKSLLIEEFVARKQYKNILIIQPTLALIDETRKNMSKYRDYYNIVISTNQKAAENNIFILTAERVLDYTSLPKIDFFVVDEFYKVSSLRNDDRIDALNISIMKIMEHKPQALFLTPCVNSLSDKFIEKYNVEFFKTDYSLVNTNIKEVRKNNRPLKGNQKKRELFKLLEKLKKPSIVYVKSPNEAYKLANEYIAYLKPTNFCNSRLPIFEWIDENISTEWNLKKLMENGIGAHNGALPRHIVSSEIEMFNKGILSIMFATASLIEGVNTIAKNILIYSQNKGNSRIDFFDFSNIKGRAGRMGKYYTGDVYLFNEELQHEEFSIDVPFVDQYNISDEILFSIPDEYVENKNRKKLLTSNMPVDLQKIIRKNIISVEGQKNLYNYIKANVDNLSYLKWTGIPSYNDLWKTLYLAYKYLDNKDNEKFAQSKAIMSLNIVNKSLKEIILKRENFLKTKKSIKDPHEKAIEDVLKFVRNDANYKIPKLLSVVESIQKYTFENNCNNEYGDYSAFNALLENENIGEKFRFLIDFGVPSSAIKKIENHFNQCNEINDDTEVISFLKQNIKVLRRILLDYEYYLLERALGI

SEQ ID NO: 55680 - protein, 308 aa, Streptococcus mitis SK321
MRDNLRKLINSAIVKYTFPIILTDEQEQVTSINKSNLTTAGKDEYCFKGNDNDISKIIYNGIVEFAENEFKIDYDNLDREQTKVIKTKLKYNENDFSQTKLQYGFYGEVLLDLFLRNYFHTDVLIARGYFYSPLEKSEPKGFDAFHIIDNKGNLELWFGEAKFHQSFTSGINSVLFKINYSISDDYLNNHMFAIINEKDNISHLHPILEGIIKKWEDNPDIILTDELQNNNIELVYPVFIAYQKQQTYDYEKSIASSVDKINRELGKYSLNLAIKIKVSIFVMLLPVDDSNKLKEEVIEWIETKEPLI

SEQ ID NO: 55681 - protein, 761 aa, Streptococcus mitis SK321
MDRNERTAHLIKELNLYKRYPERRGIFVKATCDYYDAVKIDELTSSDLNFLRYIANEAGVPQYFELLERKYQEGNEINQEDMNLLSISSFLNEAHLTLNNYMLHKYQKEVLELFEFHFDNRYILSAPTSFGKTFIVYAIIKKMGYSNILLIFPTISLLSENYLKLQNDEFFSTYKIHTLSEISEEELGEKNIFIYTPERYLSFLDNNTRYFNFSFVDEIYKIDNDFIIDNDTPEENERDTAYRLALEYVCRNSKDILLAGPYIQFQKLETEINSFNNFTLFNKFKILEYNDVEIVSKNITHIDRNKFELGNIKYRLDHGASSLQDKVIQTIVKIDDNTLIYCGRKSEVERLANHLLENDEYLSLISEKHYSEDEELYSIFLNHVGNTFGYDWILYRALEKRIGIHHAGIPKYIQNELINLFNKGDLQCLFSTTTITEGVNTTAKNLIVTAIKKGKKRLKQFDAKNIAGRAGRFNVHYSGNVIDLTKQFETLINSQQAEIEHKNYDNRNNKTDIDLEVTLDEFLTDDDRKFKDEINEAKQESGLPNFIFHSYKAIGPLDKISIYNRIKKMSPAEFQKIEQLKRVLNTSKGKEIHWEGFQTVINICSEFVSNSDLKQLMEKKVGKKQFSLIVIQLASYLQNGFLGTVDYYVEEQKLSKDKAISRTSKLIYTTFKYHLVKYLGVFDLLYRFHYSQVYRKDFDNVAGIQILLQRLEYNALTNTARKLSDFGVPFELVRYYDRVVENKNFDLYESYVDEKIQNLLK

SEQ ID NO: 55682 - protein, 309 aa, Streptococcus mitis SK1073
MRKTLQDLINNSIVLKYKLPFNFTNGKGSSISINKSNLTSKGKNEYCFEGNDNDISKIIYNGIIEFAENESEIDYSKLDREQTKAIKLKLRYDKEDESSTKLQYGFYGEVLLDLFLRNYFHTDVLIARGYFYSPLEKAEAKGFDAFHLVDNNGILELWFGEAKFHKKFSSGIKSVISKMNSSLSDSYLNDHLYAIIKEKKNISKSHTTLDTIIESWEDNPEIILIDELTANHIELIYPIFIAYQKQGTFSYEKSIDSCVKKINDELSKSTVMPAVKINLSIFVMLLPVDDSNKLKEEVIEWIETKEPLI

SEQ ID NO: 55683 - protein, 761 aa, Streptococcus mitis SK1073
MDRNERTAYLIKELNLYKRYPERRGTFIKTTCDYYDAVKKDELTSSDLNFLRYIANEAGVPQYFELLERKYQEGNEINPEDMNLLSMSSFLNEANLIVNDYMLHKYQKEVLELFEINLVNRYVLSAPTSFGKTFIVYTIIKKMDYSNILLVFPTISLLSENYLKLQNDEFFSSYKIHTLSEINEDELGEKNIFIYTPERYLSFLDNNTSYFDFTFVDEIYKIDNDFILDNDTPEENERDIAYRLALEFACQNSKDILLAGPYIQFQEPDAERNSFNNFVRVNKFTILEYNDVEIVSKNITHIDRNKFELGNIKYKLNVGTSSLQDKVVQTIVKIEGNTLIYCGSKPDVERFANHMLKNEEYLSLLSEKESKEDNELFSIFLKHIEEKFGSDWILYKALEKRIGLHHAGIPKYLQNEIINLFNSGQLLCLFSTTTITEGVNTTAKNLIVTAVKKGRKPLKQFDAKNIAGRSGRFNVHYSGNVIDLTKEFETIINSQQDEIEHKNYDNYHNKTDIDLEVTLDEFLTDDDKRFKDEINKAKQDSGLPDFIFQSYRIIGPLEKILIYNRIKVMSEVEFRKIDRLKQVLSLSNGTKIHWEGFQTVVDICRQFIFNSELKQIIEAKVGNKNHSLIVVQLSGFLEKGFLGTVDYYVKQQNYSKDKAISQTSKLIYTIFKYHLVKYLGVFDLLYRFHYSKVYRRNFDDVTGIKILLQKLEYNALTDIGRQLSDYGVPFELVKYYDGSVTTKNFDLYESYVDRRIQRLLE

SEQ ID NO: 55684 - protein, 304 aa, Streptococcus mitis SK579
MEGNELITSSVKAQQVVEGFIQLQSINLFSGTGIQTELKIFMPRLNGKDFDYASFASDLRSILDGFVLNKKTIKKYIEEENYMELSLQARNKFRDVYVNNGELGELILYTFLEGNLRAPKILSKMSLKTSNNMFVNGADGVHLLKISESNYHLIFGEAKMYAVFLDGFKAACKSLKEFIGNSRMFELNLIDSQLENEILDQNDVDLISKIIYPSKSQNIYTVVDSYSVFVGFQIDIPDEKLYLSDEEYNLWIKDEIEVEIKKASAKMEDAIKKYSLIGKNFYLYVMPFIKIDETRKNILKEVVE

SEQ ID NO: 55685 - protein, 833 aa, Streptococcus mitis SK579
MSNESIIAWLNSRAIEDSYLYELLAESQIRYGDNLLGISKKVMDKKRFLDLLRFADILSRSEKAQNRNISLKIISLLYDEFKENMTFQLVSKSVLVKLGNFPSLSLIDSNCENNIFNFDIEIDKLIKNIFQSTSNKNKIFTDAQYKIFKELQGTNHYSFSASTSFGKSFLLTEYVKWIIDEGNASQNIAFLVPSRALISQVAEDLSKVIVGTRYKILTVPEIPDLYKHKKFIFVLTPERLIQYFSQRNPPISILIVDEAQKLVANDGRSPIFYHAISLAKQKSIKLFFASPNVPNPELFLNLVGNSTDEATQIIDMNVSRNLFYIDLQSLCIRQYLEYCNEDVKERTFRCKNLFDTVSYLSKSQQSIIYCNSLSDTMAFADKFSEGFSQINNKNLEDLSDFIKDTIHERYELAEMIRKGVSTHFGALPQVVREKIEEEYRLGNIRYLFTTSTLLEGVNLPAKNIFILSEKIGLTKMSDLDFRNLIGRAGRLTKELSGNIFIVKLDNKKWQGSAIDLLNLNKLPILNSELLTGKDAFYKKIGQIINDEPLSKNTSLPKRHFLNEYASILSYQYKQNLDSILYRKLNEKNKDSQKILKVIEKYEVPSEILMTSVTISPVIQNKIYISERPYIFPKDISYYTCREVLEQMFIIYNWGDNEHKNFLGKKNRLGYYATLMIDWITTKPLNVIIKSIIKYYSSNRLNITLDFNQNFILFDETNSQHLNHIVNQVMRDLETVVRFSIRNYITNYLQLTKQDESKWRDYLDYGTNESLVIELQKLGIDRQIAIEISKKAYKYFELNSENKLWKIRKEIKNDENLSTEAQDSILAVLKELEL

SEQ ID NO: 55686 - protein, 327 aa, Streptococcus mitis 18/56
MSRVFWYNEINIYWVGSGILRDNLRKLINSAIVKYTFPIILTDEQEQVTSINKSNLTTAGKDEYCFKGNDNDISKIIYNGIVEFAENEFKIDYDNLDREQTKVIKTKLKYNENDFFQTKLQYGFYGEVLLDLFLRNYFYTDVLIARGYFYSPLEKSEPKGFDAFHIIDNKGNLELWFGEAKFHQSFTSGINSVLSKINYSISDDYLNNHMFAIINEKDNISHLHPILEGIITKWEDNPDIILTDELQNNNIELVYPVFIAYQKQQTYGYEKSIASSVDKINRELGKYSLNLAIKIKVSIFVMLLPVDDSNKLKEEVIEWIETKEPLI

SEQ ID NO: 55687 - protein, 758 aa, Streptococcus mitis 18/56
MDRNERTAHLIKELNLYKRYPERRGIFVKATCDYYDAVKIDELTSNDLNFLRYVANEAGVPQYYQLLENKYQAGKTINKESMNLLSMSSFINEASLIVKDEMLHKYQKEVTDLFEINTENRYILSAPTSFGKTFTVYTIIKKMGYSNILLVFPTISLLSENLLKLQNDEFFSTYKIHSLSEIKKEEFGEKNIFIYTPERYLSFLDNNSLNFDFTFVDEIYKIDNDFIINNETPEENERDTAYRLALEYACRNSRDLLLAGPYIQFQKPETKVNSFNNFTSINRFNKLEYNDIEIVSKNITHIKRNKFEIGNIVHRLKAGTSTMQDKVAQSIINLDENTLIYCGRKYDVERFADFLLRNPEYNSLLLKKDDNELYSIFLEHVEKNFGSDWILFKALEKRIGIHHSGIPKYIQNEMINLFNKGDLLCLFSTTTITEGVNTTAKNLIITSVKKGIKSLKQFDAKNIAGRAGRFNVYYSGNVIDLTEEFEAVIESQQDKIEHKNYDNNRNKTDVDLEVTLDEFLTDDDKNFKAEINKAKVKSGLPDFIFQSYKTIGPLEKISIYNRIKEMSLVEFHKIDQLKQVLNLSNGTEIHWEGFQTVVDICHNFVSNSDLKHIMETRVGKKQFSLIVIQLSEFLQKGFLGIVDYYVKEQNKNKDMAIRITAKLIYTIFKYHLVKYLGVFDLLYRFHYSKVYKRNFDDVTGIKILLQKLEYNALTDIGRKLSDYGVPFELVKYYDGSVTTKNFDLYESYVDRRIQRLLE

SEQ ID NO: 55688 - protein, 327 aa, Streptococcus mitis
MSRVFWYNEINIYWVGSGILRDNLKNLINRAIVKYTFPIIFTDEQGQVTPINKSNLTTVGKDEYCFKGNDNDISKIIYNGIVEFAENEFKIDYDNLDREQTKVIKTKLKYNKNDCPQTKLQYGFYGEVLLDLFLRNYFHTDVLIARGYFYSPLEKSEPKGFDAFHIIDNKDGLELWFGEAKFHQSFTSGINSVLSKINYSISDDYLDNHMFAIINEKDNISHSHPIFEGIIKRWENNPDLILIDELQNNNIELVYPVFIAYQKQQTYDYEKSIASSVDKINRELGKYSLNLAIKIKVSIFVMLLPVDDSNKLKEEVIEWIETKEPLI

SEQ ID NO: 55689 - protein, 758 aa, Streptococcus mitis
MDRNERTAHLIKELNLYKRYPERRGIFVKATCDYYDAVKIDELTSSDLNFLRYIANEAGVPQYYQLLENKYQAGKTINKESMNLLSMSSFINEASLIVKDEMLHKYQKEVTDLFEINTENRYILSAPTSFGKTFTVYTIIKKMGYSNILLVFPTISLLSENLLKLQNDEFFSTYKIHSLSEIKKEEFGEKNIFIYTPERYLSFLDNNSLNFDFTFVDEIYKIDNDFIINNETPEENERDTAYRLALEYACRNSRDLLLAGPYIQFQKPETRVNSFNNFTSINRFNKLEYNDIEIVSKNITHIKRNKFEIGNTVHRLKAGTSTMQDKVAQSIINLDENTLIYCGRKYDVERFAGFLLRNPEYNSLLLKKDDNELYSIFLEHVEKNFGSDWILFKALEKRIGIHHSGIPKYIQNEMINLFNKGELLCLFSTTTITEGVNTTAKNLIITSVKKGIKSLKQFDAKNIAGRAGRFNVHYSGNVIDLTEEFEAVIESQQDKIEHKNYDNNRNKTDVDLEVTLDEFLTDDDKNFKAEINKAKVKSGLPDFIFQSYKTIGPLEKISIYNRIKEMSLVEFHKIDQLKQVLNLSNGTEIHWEGFQTVVDICHNFVSNSDLKHIMETRVGKKHFSLIVIQLSEFLQKGFLGIVDYYVKEQNKNKDMAIRITAKLIYTIFKYHLVKYLGVFDLLYRFHYSKVYKRNFDDVTGIKILLQKLEYNALTDIGRKLSDYGVPFELVKYYDGSVTTKNFDLYESYVDRRIQRLLE

SEQ ID NO: 55690 - protein, 280 aa, Bacteroides ovatus ATCC 8483
MSRPFKSDLVIQEYICEPTLKAYHIGFDQKQFRLQPLVDIVRNVIPEFSLGYHCGTSIPLTEIISRLKEAAQIVYLTDKYQNRGEFGELILHLLLRDFQNTIPLISKIYFKDSHNVPAHGFDGVQVTITGDKKKLWLGESKLYKTGDAGVRDLAEDIKKHVNADYLRREFSLISKKLPESIPEIEYWRNLMDEHQKLDVIFSNIVIPMVCTYNSDLFKNHCEESNKYFEDFISECTALCKTFDKLKGNVSTEVILMLLPVQNKDMLNTELDKRLKLMQQI

SEQ ID NO: 55691 - protein, 734 aa, Bacteroides ovatus ATCC 8483
MTPQKVQDAIIYITETKNIDYEHSFSLSQLCSSLLRSRENNKYGRDIIIRILDAWKKVDKNTYSIWNDLTAAAGLYPYVDPKQLSQSSLLCYEYHKSPHLDNIYLHEEQQHLSIELQSKRSLVVSAPTSFGKSLLIEEVIASKLYEQIVIIQPTLALLDETRKKLLKYKNWYKIIVSTSQEPTKEKGNIFLFTGERVVEYNQFPEIEFFVIDEFYKLSLDRDDDRAIALNQAFAKLLKFTSKFYLLGPMIKDIPLNFKNKYDLIWYPTEFATVAVNETNVNIQGKAKEKKELKKLELFKLLSSTKEQTIIYCSSPNKATNLALDYASYLKNENKLMLVPYVQRNKEIGEWIKDNINSKWSLIDALNCGIGFHHGALPRHLGGSIVDCFNEGSIRWLFCTSTLIEGVNTSAKNVILFDKDKGGQPIDFFDYKNIAGRSGRMRKHYIGNVIRFENQPEQMELFVDIPIFNQEQAPLEVLISMDEKDIEEKAKIRLAKFDNMSPEIKEVIRSNNGISIEGQLAIINKIESNLQYYNSQLNWTSTPKTFDNLSVAIELCWDTLSGAGDKTYIEGIGRLSARWLASFAFSYINMKSINAVISYYVNDNFWSSKIPNKQKRIDVASYAILHISRHWFDYKLPKWLNVISNLQEYVFKKSNMKYGNYSFIASNLENGFLHPNIAALMEYGIPISAIRKLTEYININESPENNILKLNKLATTTLTNLGLIQYEIDKLRNSY

SEQ ID NO: 55692 - protein, 280 aa, Bacteroides ovatus; identical to SEQ ID NO: 55690

SEQ ID NO: 55693 - protein, 734 aa, Bacteroides ovatus; identical to SEQ ID NO: 55691

SEQ ID NO: 55694 - protein, 202 aa, Alistipes putredinis DSM 17216
METVLLHKSAFLYVTSIFRLSSFVFANALLTGITKTFVPFYSSFPEIYSNIANERMYEPVKSVFDTISTDKIKKENSIITSISDLQYVIPDPDTRKFVQTILRRETSVDEIRKRLHVPILLLHECDKTQKATELSETYLEEIKRYHLDRAVNYFNIQNGKQKKQNVHGYDNIQFHLILFPVPNKNEIVNWFVERAKQIKEDA

SEQ ID NO: 55695 - protein, 700 aa, Alistipes putredinis DSM 17216
MLDYEIYSECDQINDLIEKRDLATARCKVINLLDRMQQDGNQYNPMVNHFIRVVGLFPYIDKKTASWDDQVVVEAFKADVGDKTPVTLHSAQSRVLKRLLLGENIAVSAPTSFGKSFIIDAFISIRKPDNVVIIVPTIALADETRRRIEHKFSRFYKIITTTDATITERNIFIFPQERSFAYFDKLEKIDMLIVDEFYKASSMFDDSRSSSLLSAMIELGKISRQRYYLAPNIHKISDNVFTEGMQFMRLTDFKTVITKAAHLYKNLPKSADKEQFKKGHLLKILQKKRAKTLIYAGSYKNIDTISNILANDLAVKKTSLLQDFNDWLRVNYGRKFSLCKLSERGIGVHNGKMHRSLSQIQVKLFEQEEGIDTMVSTSSIIEGVNTQAEQVVVWSNKNGSCKFDYFTYRNIIGRAGRMFKYFVGKVYLLEEPPVQENTTLEIDFPEEVVESLDSANPGVEINEEQNDRIKEYESFMIKALGRENFNNIRRLPAFKSCDSKLIKTLVRKLKADPAWPQNYAALAATNTYNWREPIKDVINLLGDKMGGLIKLAIWKMPKNWSHSVAFIYDELEKDGYKISYEDLFAAERYLSYNLCTTLSVINILKKSFDPAAPDISLFIGRASNAFLPKLVYQLEEYGLPRMISRKIQDSGLINLEDDTKEISEIIIQFKTISPKNLISNLKDIMPFDKFIIQYFYEGIS

SEQ ID NO: 55696 - protein, 279 aa, Porphyromonas endodontalis ATCC 35406
MKPPFFNIIIHKDDTFPDLHGLCAGFESRQWRKDQLVNYLFEYLPEFALTYSELGNLTSENMVAKMRQVAASIYQSEKFKNRGEFGELLLHAIIREMYDTIPAISKIYYKDGPNETVKGFDAVHVIVTDKALELWLGEVKFYNNISNAISDVIEELNQHIKTRYVRNEFIAITNKIDTKWPHANILKTLLHPNTSLDDVFSNTCIPVLLTYDSSVLTRYDNKCDEYIQEISEEFQRFHKKFCDKLGEFPLTIHLFLFPLNTKAELINSLESKLKIWQSL

SEQ ID NO: 55697 - protein, 701 aa, Porphyromonas endodontalis ATCC 35406
MRNILRRKFPANTDRFQIIKEVAILIVTEESVGQEFVLRLLSRIEDFQGMETMIHSLVRQVGLFPYLEEENLSLKDTIAYEVHRPSGFKENIVFHHAQAEVYYTLLRGENVVLSAPTSFGKSLIIDSIIASQQHSNIFIIVPTIALIDETRKRLSKFKDSYKIITHPSQSFSQRNIFILTQERAIEIIPDVNVDFFVIDEFYKLSPQKTDEERCHVLNQVFYMLVKKDAQFYLLGPNIEQVTTSLLDNVKFKFIKTDYKTVVSERHQVNLKNGEDSIERLIELSSSLEDPTLIFCQSPASANKVAKAFFNSNKFERTDENKDLADWLRSNYHSQWILPDCLEYGIGIHHGKIPRAIAQKCIKLFNEGKIRYLICTSTLIEGVNTKAKNVIVYDNKIAKTKIDYFTFNNICGRSGRMFSHFIGHIYLFHEPPVAELPLVDFPIFSQANDVPEKLLINVDIEDLNESSKRKLNKYFEQDVLSQETLRKNSYIDLDKQLELASFIQSKLNRIHNLMKWEQYPTNEQLKSACRLIWNYFVSSRKRIYGVSSGEQLHFRLNQFRGAKNIKNFIATIIEAENAQTPDSINNAIELAFDIQRHWINFQFPRYLMSLGDIANDIFRKNNLPLCDYSYFASLVECYFMSPYVIPMDEYGLPIQISNKVGEITEISSNIDDALEQLRRFIPSQYKFSSIEREFIEDFKMYI

SEQ ID NO: 55698 - protein, 313 aa, Prevotella bivia DNF00188; identical to SEQ ID NO: 55468

SEQ ID NO: 55699 - protein, 707 aa, Prevotella bivia DNF00188; identical to SEQ ID NO: 55471

SEQ ID NO: 55700 - protein, 313 aa, Prevotella bivia DNF00650; identical to SEQ ID NO: 55468

SEQ ID NO: 55701 - protein, 228 aa, Prevotella bivia DNF00650
MMQTNDIYNTCLDISNVLNAGDISNARSKVITLLHEINGTNNNSYMELVNHLIREVGLLPYIDTYTASWEDRFVCEVFKVNIGERKPCVLHTAQSQVLKKLLEGKSVAVSAPTSFGKSFVIDAFIAIKQPINVVILVPTVALADETRRRICRKFSHQYKIITTTDVELAEKNILVFPQERAFAYIDKLPSIDILIVDEFYKASTNFDLERSSTLLSSMVELGKKAKQR

SEQ ID NO: 55702 - protein, 313 aa, Prevotella bivia DNF00320; identical to SEQ ID NO: 55468

SEQ ID NO: 55703 - protein, 707 aa, Prevotella bivia DNF00320; identical to SEQ ID NO: 55471

SEQ ID NO: 55704 - protein, 313 aa, Prevotella corporis; identical to SEQ ID NO: 55468

SEQ ID NO: 55705 - protein, 707 aa, Prevotella corporis; identical to SEQ ID NO: 55471

SEQ ID NO: 55706 - protein, 313 aa, Prevotella disiens FB035-09AN; identical to SEQ ID NO: 55468

SEQ ID NO: 55707 - protein, 707 aa, Prevotella disiens FB035-09AN; identical to SEQ ID NO: 55471

SEQ ID NO: 55708 - protein, 295 aa, Prevotella veroralis F0319
MAMRVSLKKLIQDSIVVQYHLPYDVVDKHIPCSCISTEKDYCLLQNGTDIDVANIIYNGIVDYAYSDNEIDLTQLDKLQIRALLSKLKFDPNASESIQLGYGFQGEVMLHLLLSHFFHAEKALARGYLYSALENAETKGYDSYLMIENNETIFLLFGEAKFYLDGYKRSLDSIFNNIDKALSDSYFNRNFIAMENHYEHIEPKSRIREIIDQWRTDPLINMAEEAKQHNMNLVYPMLVIFDDKMTEYDNLIMDIISYIQTKYNAVQPTLTIPYTIFFCFFMWIIVVLLRHKFCNG

SEQ ID NO: 55709 - protein, 770 aa, Prevotella veroralis F0319
MDKSKAAVDAVKLINQAKENLSLQPLMIKAVCSFFDFMKGKELSQADRLFLHYLANRAGLPQYYYPMLNIGEDVDEEVSLQTFSNYINESSLIVGEGIMLHRYQKELLERFKRGQRNRIFLSASTSFGKTFLIYEIVRKMEYTNVAFIFPTLSLLSENLFKIHLLPEYKWVKDNYVIHTLSDKEEISGRNLFIFTPERFLSFLDKNKEIQLDFVFVDEIYKLDNGFIIDEVAQENERDVAYRIALHELLKNPHIDSLLAGPYIALPTEDKKDTQFSFKTFLDYYDFVVVNYNHYEIVNKVEVFVKTASNIKIDNTFHLTFTNKTKSDRVVQLVTQLLNRGENAIVYCSTKASTEKYAKFLISENKYIKDIDSEKVIRLTNHIDSLFVNGKGAQWIVSKALKKGIGIHHGSVPKYIQQEIISLFNQNILKILICTTTITEGVNTTAKNVIVLSGKKGTKDLKKFDAQNIEGRAGRFMQHYQGRVFILDKKFADRMNEEDELLQHKFFDKNIDKKDVDIVLSDSNYLTTEQENRKKQLEDIKESGIMPKACFEEFRTISYDDKIYLYNTIARFSTTDHEKITELIRRYVGQRKSYLPGLELICQTIRPIIKNDNLCYYVENGNDQPGNCYLVGMISAFISKGFSGSVNYYIKKEEDVDKGVRKAANFVFNMLRYQVVKYFGLFNLLYKQFESIRKGVNVDEVNGIEALLLRLEYSADTRLGRQVSDIGASFNVVKYYDIKEKNPDNSEIVGEYYNQLDDYEKYNITKINQIL

SEQ ID NO: 55710 - protein, 133 aa, Cronobacter sakazakii ES15
MDAALKSIDDFHTNEMYKHEFGMATKHYKYAKDEVREAVRKLFVSGEPGSDVRVNHACLIGFDWNGFDKLDYASSISINEQFITELTNALPQWISLLDEKFSKFNRKYLRFDVFFIPFPSVVDFRNEFNKALD

SEQ ID NO: 55711 - protein, 843 aa, Cronobacter sakazakii ES15
MLKINELYSKLVKVSIDNIFGVVGELKVSVSDIYKLLSYGSILSLSENEVDIKKAYDIVSRVLESDTQYDSNIIAACDLILSRIGNFPGRGLLRDKYNNGESPTLNLSLSLERIGRETENTYNDITLTNFQCKLLKSLRKNNYLSVSAPTSAGKSFVLSLAVIDKIQAYEKECIVYVVPTRALISEVSNKFRYECKQAGINKVIIRTAPEIIESNSIEQGLIYVLTQERLVSLLSNSHGNSNFHIDTLLIDEAHEIQKGKRGIILQNAVELALEKYPHMHVMFSSPLISNPDYFFSIFRWRKDGKSFIETISPVTQNVLLVNQVKNNTQAINVKLNNEDKSIDLGNYNLDFVLRGNRKVQKAKLAEFISRSGGAVIVFEDTPSNAEGVAINIAESIGDTSLQDDYEEFVSSIEEEMHEQYTLITCLRSGVAFHYGNMPSIIRNGIEYFFKRGDIKFIVCTSTLLQGVNLPAKHLILENPHSGDEPMSRADFLNLAGRAGRLKYEFHGNVWCVRSNLWDNRSFEGDNLQTITSAMSKVMEDGGSIISNAIDNVFSPTDDKELADVAFARFYHEVQRDSFQLSYFSELEGEEVNEILEYNYDKVRRMKITIPEELLKLNSGTRPDYIQRLYEFFTQQDDLDDYILHSPYQQGGKARVDRAIEIIIDIFAWPVTLQYAKLISVMAHHWMTSHSLKSMINYKIRSSHELSDMINRGESIGKIRRKTSSLIRDVLNTLENQVRYNLVRYLKIYRETLVYVLLSKGEKGKAEKVENISAYLEFGSCNPTELSLMSLGLSRSTALFLKNRFNFPRDSSPEELIEFLLTKDLNSKNMPEFRLRELKDVLGI

SEQ ID NO: 55712 - protein, 301 aa, Leptospira noguchii str. Cascata
MDLKTSVPKNFLDLFYNEIECVIPDTQSQLNLRILKIENNRFCYNDLVDKLAECVVHFSLSRTSLENLSAEGPLSRPYREAVRRFRDYASNDGEAGELLLYCFLEAHLNAPKIVSKLELKTSSNDYVKGSDGVHVLKLADKEYQLIFGESKLYAGLTASLSEAFQSIYDFINRPKNNINHEIGLINTQLLKEAYDEDLYKLIKEIIIPKVSDSSGIKKDNAFSIFAGFNIELSENEKKMGNREFEIHLRERIRLEVEGKKENIKNKIEHHKLYGYTFYTYIFPFIDIENTRKKIIQDLTTP

SEQ ID NO: 55713 - protein, 862 aa, Leptospira noguchii str. Cascata
MIIDKLTEDIFQDKYFSDLFKKASQMLAHNLFYDDNIERSMSQKELTDILRYADILSNSNNPQARNKSYQIIATLNEYYRNDPKYRTIAHAVFAKLGNFPGINYLSVSDQNTSELPFDRDIEKAIKEKVQEIPNSDGLIFTDVQFDLFTKISDSDYFSFSGPTSMGKSFIIKSMIRRIISSDKKNNIIVMVPTRALIAQFSNDLRKEFSSVLEEYGYKIMTTSFVSDIITDENTAYLFILTPERLLSFLSNKKSPKVAYLFVDEAHKLASIADMRSITSYTAVEKTIKANREVKLFFSAPNVSNPEIFLKLFNKEKSNTFHTVESPVSQNLFFVDLIKSEVTHYAGLEKYIFVPKFLDSIKKGAEFIRRIGYGESNIIYCSAKTKTITKAIELYEIIEQDDNKEDLYKSNEKISKQIKNYIHEEYYLAKLLKKGVAYHFGNLPQLIRNKIEFLFKEGKISYLFCTSTLLEGVNMPSKNIFILNNKKGSDKLEKIDFWNLAGRAGRLKYELSGNIFCLRETESEWKTTNLLDDSEKIQLEPTIERHINKNLKEIEGIIKDQDGQIGIKALTEILKYIANVISIDTLEITSDYKSNIIRKLIEENKDEIIELSKNKYKNIEVPINILNVNQSIKVAIQDKAYKNLKSSSNKEDIKLPARVDYELAKLWLNKLYELFEWETEEKILFKKTKDSAKKRNLLSYYALLMVKWINGEPLSLIISHSLQYYRENAIQVYDESGRKEVFDNSPKHINIVIGNIIDDIEKVLRFSLEKYFNDYYSILVEVLGEEEAGPNWAIFLEYGTQNPIIIELQIAGLSRHSANYLYKNHSNCLTIEKGKVTSVNKEKLKSSLDNESIEYEEISSLFF

SEQ ID NO: 55714 - protein, 260 aa, Capnocytophaga canimorsus
MGNIKNMLNHLTNTDLLLKHIYWFYEDLNIEPRKEHYGLSINYSDIKERRDDFLAELLNTIVNWVYHKSKQEKLFNDRLKDTDFGNAMSFIVNQAYSKFRPGHPQGQFGELLLFNLIQNYYKAIPILRKQRITTSLGHERFGADAIHYKNEENINVFILGESKCYKSDYQFNKAFKESIQSIIKTFNDLDKELDLYLYDDFIEPELEELVKKYKQGKLENIRYELVCLIIYSENKEVLDNRGEEIIKSKIKKLFKIDVTQ

SEQ ID NO: 55715 - protein, 431 aa, Capnocytophaga canimorsus
MSYLVLDFAPSAIMVDKDFDFEQNRFSPMDSFINQLSTIINQLKYEIFVKDKIFLLTDFQKNIWDKCNEAKFIGISAPTSAGKSFIILLKSIENILREGGNIVYIVPTLSLITQVVNDYHKILKEFGLDNYSILTSCNDSETINIIYILTPERMISAYRENEKPFGNISTFIVDEIQNIERIENEDDERAKILFDSLIELSFSYNPKNIIFSGPRVNGLKKMGFEIFEEKDSVEVKTDSSPVANFTYSISKKGKKYFFNQYSQIKKNYQTIEIKNTEYIKIGGSQYDDTYFKYLNNVVQYLGNETKNIIFAPTSNTARKIALKLSEKIVLKNDSAKIHSLIKYISNTIHKNYDLNQVLRKSIIYHHGKMPIHIRNVLEYAVREKMINNIVCTTTLMQGVNIPAQNVIMRNGNIRLKKENGIMPKIDKLRNL

SEQ ID NO: 55716 - protein, 296 aa, Arcobacter butzleri L353
MRDTLKNLISKTLFFEYSLPNEKVKDKIKISMYSDDCFSYSSDSDLSELIYQSILDYSYNEFEITDKDLSILLSKALYNKIKYKEYQDELTKIKYGFYGEVLLYSMLYSFYNAKPIISRGYFYNPLENSETKGYDSYHLIENEDKIELWFGEVKFRDTLESGAKSAIEGLEKAFTDTYLSNNIIAMDNYKNNFNIQGTKIEKILNEWDGTPINIIEQVKKHNMILVYPILLIFPDNSTNYDEKIKSAINKINEKFSLKEYSLSVPYKLFFILLPVSEVKKIKKEVIEWIESSKPRI

SEQ ID NO: 55717 - protein, 778 aa, Arcobacter butzleri L353
MDRVIEASNLVKQLNAYRKKEIEDYEFIKVVCTYFDKVKDLDFLSPSDLKFLKYISNVAGIPHYYDLLFSKFNHSENFLKYDLNTFSSLLYESSLHVDEEIKIHKYQKKVLDSFEKGKLNHYFLSASTSFGKTYLIYEIIKKMEYKNIILVFPTIALLSENFEKLMTNIEYKFFRDNFKIHTLSDVEDFEDRNIFIYTPERYLSFIDKNNDFNIDFVFVDEIYKIDNEYLTNDEKKENERDTAYRVALYNLLSLQRDALLVGPYINFPNPEDNNINQSFNKFLKANEFKILDFNNIEIVNKSFKEVYSSNIHNVDEELTISLDGLKTNKQKIPKIVAEIRKINQNMIIYTKGSGTAETMAKNVIEYSKSNKKQSEELKELIAHLKKTFIYSDWSVIKGLENNIAIHHGLVPKYVQKEIIKLFNTGDIDILISTTTITEGVNTSAKNLIVTSAKKGDKPLKTFDAKNIAGRAGRFLYHYSGRVLIYEKEFSKIINGKDDEIKHKNYDENSSKNEIDYFITENEYLDIKDIDRKNEIEIMRKERGIPLEIIQAYKVISYSDKIKIYDEIIKLLNNKKESYLSMKASIGKIAHNLYLDYDGLTLILSIIYPIVKNDKLKFFIDFESEIKKEGKNKGKKYSILIYMLSAYIESGHIGNIKYNKEKRKLRTDEAIREASQFIYNTLKYQLVKYLGVFNIMYKFIESKRTNIDINKIVGIDKLLRKLEYNATSELGKLTSDYGVPSKIIDYYDNEEKQDEIKKSFDSFELKKFEQVENIINNKQ

SEQ ID NO: 55718 - protein, 324 aa, Burkholderia pseudomallei
MEANNAVNSSIEKYFKPLIGKHIVVNRIRQISTGGTLEPSVSAYFLYPAFERGKPAIDALIEALKLEIPAFCTTKQERARALAKDRAGGLETFETQMLVDKARRLFIKATAGKRDSGEGGELLLFAFIEHFLGAPIILSKMRLKTNTQMPVHGADGVHAKWDSESNQLVVIFGESKVHASIHGALRAAAESVGSFVADVEGRKTHELLLTTDHVDLDGFPDEYKEELIRYLHPFATEEGTRRQERFAILLAYTSKGYATLDKLTAAEAERAFLDDYNSKLSPALRLAKKHLAQAGVELDTVDLFILPMPNVQEFRDKFDEVLGG

SEQ ID NO: 55719 - protein, 596 aa, Burkholderia pseudomallei
MLIVDEAQQIADGARGMLLLDCLEDVASRMPQSRLLFITPGTQSAATIGRLLGVHGVVDVGTNLRPVRQNLIFVNFEEAKRDEHMVLTLQRPEGGRLTIGRLLAGPSSTEIGRFIDAILQLGKEGQSLVYASSKHPAESIANELANASKHEPNARLLELAGFIRKHVHPEFTLANCVERGVGFHFGNMPTNLTKAIEEYFVEGLLHTLVCTSTLLQGVNLPARNIFLYKPEKGNHTPMNPDDFWNLAGRAGRLKKDTHGNVFLVSYDTWKNRPAHEPPSTEVTAAFTTALTTEQKILLKFAQNANHRSGVRQTAFAESVFSRLVTDIKTGALAETIRRVAPNGLHADAVQTIAAVEGQLDKVTLPPEVLKRHGMISPLRQQQMYDVLRFAVRAGQLEEHVPLHPQHKYSEVKTRFMFILSLIHTNLEGISNRAHRYYSWFALSWMRGRSLYEMIDFQLKRAREKAKEEGYDGLVPAGETIKSVMKQIEEQLRFKYVKFVACYIDLLRLAALTEKGLDLQDIPPIPLFLELGACSGTMIGCMDLGMSRIAAREVTDVLDGRDLNSVIVKKRLKSLSPERFRRLSPLVRRELQRLALI

SEQ ID NO: 55720 - protein, 345 aa, Salmonella enterica subsp. enterica serovar Newport str. SL254; identical to SEQ ID NO: 55116

SEQ ID NO: 55721 - protein, 849 aa, Salmonella enterica subsp. enterica serovar Newport str. SL254; identical to SEQ ID NO: 55117

SEQ ID NO: 55722 - protein, 345 aa, Salmonella enterica; identical to SEQ ID NO: 55116
  subsp. enterica serovar Newport str. CVM 33953

SEQ ID NO: 55723 - protein, 849 aa, Salmonella enterica; identical to SEQ ID NO: 55117
  subsp. enterica serovar Newport str. CVM 33953

SEQ ID NO: 55724 - protein, 345 aa, Salmonella enterica; identical to SEQ ID NO: 55116
  subsp. enterica serovar Newport str. CVM 21550

SEQ ID NO: 55725 - protein, 849 aa, Salmonella enterica; identical to SEQ ID NO: 55117
  subsp. enterica serovar Newport str. CVM 21550

SEQ ID NO: 55726 - protein, 345 aa, Salmonella enterica; identical to SEQ ID NO: 55116
  subsp. enterica serovar Newport str. CVM 22513

SEQ ID NO: 55727 - protein, 849 aa, Salmonella enterica; identical to SEQ ID NO: 55117
  subsp. enterica serovar Newport str. CVM 22513

SEQ ID NO: 55728 - protein, 345 aa, Salmonella enterica; identical to SEQ ID NO: 55116
  subsp. enterica serovar Newport str. CVM 21538

SEQ ID NO: 55729 - protein, 849 aa, Salmonella enterica; identical to SEQ ID NO: 55117
  subsp. enterica serovar Newport str. CVM 21538

SEQ ID NO: 55730 - protein, 345 aa, Salmonella enterica; identical to SEQ ID NO: 55116
  subsp. enterica serovar Newport str. CVM 22425

SEQ ID NO: 55731 - protein, 849 aa, Salmonella enterica; identical to SEQ ID NO: 55117
  subsp. enterica serovar Newport str. CVM 22425

SEQ ID NO: 55732 - protein, 345 aa, Salmonella enterica; identical to SEQ ID NO: 55116
  subsp. enterica serovar Newport str. CVM N18486

SEQ ID NO: 55733 - protein, 849 aa, Salmonella enterica; identical to SEQ ID NO: 55117
  subsp. enterica serovar Newport str. CVM N18486

SEQ ID NO: 55734 - protein, 345 aa, Salmonella enterica; identical to SEQ ID NO: 55116
  subsp. enterica serovar Newport str. CVM N1543

SEQ ID NO: 55735 - protein, 849 aa, Salmonella enterica; identical to SEQ ID NO: 55117
  subsp. enterica serovar Newport str. CVM N1543

SEQ ID NO: 55736 - protein, 345 aa, Salmonella enterica; identical to SEQ ID NO: 55116
  subsp. enterica serovar Newport str. CVM 22462

SEQ ID NO: 55737 - protein, 849 aa, Salmonella enterica; identical to SEQ ID NO: 55117
  subsp. enterica serovar Newport str. CVM 22462

SEQ ID NO: 55738 - protein, 314 aa, Salmonella enterica subsp. enterica serovar Newport str. JS09102; identical to SEQ ID NO: 55144

SEQ ID NO: 55739 - protein, 859 aa, Salmonella enterica subsp. enterica serovar Newport str. JS09102; identical to SEQ ID NO: 55145

SEQ ID NO: 55740 - protein, 314 aa, Salmonella enterica subsp. enterica serovar Agona str. 64.H.00; identical to SEQ ID NO: 55144

SEQ ID NO: 55741 - protein, 859 aa, Salmonella enterica subsp. enterica serovar Agona str. 64.H.00; identical to SEQ ID NO: 55145

SEQ ID NO: 55742 - protein, 345 aa, Salmonella enterica; identical to SEQ ID NO: 55116
  subsp. enterica serovar Newport str. USMARC-S3124.1

SEQ ID NO: 55743 - protein, 849 aa, Salmonella enterica; identical to SEQ ID NO: 55117
  subsp. enterica serovar Newport str. USMARC-S3124.1

SEQ ID NO: 55744 - protein, 345 aa, Salmonella enterica; identical to SEQ ID NO: 55116
  subsp. enterica serovar Newport str. WA_14885

SEQ ID NO: 55745 - protein, 736 aa, Salmonella enterica
  subsp. enterica serovar Newport str. WA_14885
MNTLANEVINQIKSRLEFKNDLGFLFAHSFLQKHTQTSFSALQGKIESDSVVIYKRLIESAYLFSQSESDEDKNLAQSIAYHLNIITSDNYLKQLSENLLRALGNFPGASYLQEKNGFIPETFYAYLKRSFIENENKVKIANKEIILTNFQKKVWESLHSNVPQAISAPTSAGKSFLVVEMLANRIISGELNSAIYIAPTRALVNEITQKFINKTLPYQNEVRVTSIPTINDEYYKQIFVLTQERLQVLLDNFKNKIDIVVIDEAQSISDEIRGMILQDCLDKISIQNPDAKYVFLAPGAEGFNDLADIIGIDTIHVEKTNLSPVVQNKIIIKVDPAKENNLQLSLLDNSNILSIGELTSTRGFANENTRLAAVALELGKDEGSLVYGTGAANAEDVAKQIASGLPLLENDSDLKELSKFIKKHVHKDYSLANLVLRGVGYHYGKMPSLLRETLEKNFTNNKLKFLVCTTTLFQGVNLPAKNVFIDTPTRGNRGEALDPASLWNFAGRAGRLGYAFSGNVYLIDYDDWETKPLDSKIDFKITSSFKKVINEDFDTVISRLDKNNHLGVSQYSNVDAAAGLLISRAAKGDLHNFLERSFRTIPDKSKLEIIEDATYSSLESLNIPHNILTLNWTVDPFGQERLYNRFIQKIKDGKIDELIPRHPSGNVYTNYVGVFSRINKYILNHNTSKFSNYLTAMALNWMRGKSLPEIISLSIAKKKKKFYPTSECRPSCTRGF

SEQ ID NO: 55746 - protein, 345 aa, Salmonella enterica; identical to SEQ ID NO: 55116
  subsp. enterica serovar Newport str. WA_14881

SEQ ID NO: 55747 - protein, 849 aa, Salmonella enterica; identical to SEQ ID NO: 55117
  subsp. enterica serovar Newport str. WA_14881

SEQ ID NO: 55748 - protein, 345 aa, Salmonella enterica; identical to SEQ ID NO: 55116
  subsp. enterica serovar Newport str. WA_14882

SEQ ID NO: 55749 - protein, 849 aa, Salmonella enterica; identical to SEQ ID NO: 55117
  subsp. enterica serovar Newport str. WA_14882

SEQ ID NO: 55750 - protein, 345 aa, Salmonella enterica; identical to SEQ ID NO: 55116
  subsp. enterica serovar Newport str. RI_10P078

SEQ ID NO: 55751 - protein, 849 aa, Salmonella enterica; identical to SEQ ID NO: 55117
  subsp. enterica serovar Newport str. RI_10P078

SEQ ID NO: 55752 - protein, 345 aa, Salmonella enterica; identical to SEQ ID NO: 55116
  subsp. enterica serovar Newport str. RI_10P069

SEQ ID NO: 55753 - protein, 849 aa, Salmonella enterica; identical to SEQ ID NO: 55117
  subsp. enterica serovar Newport str. RI_10P069

SEQ ID NO: 55754 - protein, 345 aa, Salmonella enterica; identical to SEQ ID NO: 55116
  subsp. enterica serovar Newport str. RI_10P079

SEQ ID NO: 55755 - protein, 849 aa, Salmonella enterica; identical to SEQ ID NO: 55117
  subsp. enterica serovar Newport str. RI_10P079

SEQ ID NO: 55756 - protein, 345 aa, Salmonella enterica; identical to SEQ ID NO: 55116
  subsp. enterica serovar Newport str. RI_10P068

SEQ ID NO: 55757 - protein, 849 aa, Salmonella enterica; identical to SEQ ID NO: 55117
  subsp. enterica serovar Newport str. RI_10P068

SEQ ID NO: 55758 - protein, 345 aa, Salmonella enterica; identical to SEQ ID NO: 55116
  subsp. enterica serovar Newport str. VA_R100512570

SEQ ID NO: 55759 - protein, 849 aa, Salmonella enterica; identical to SEQ ID NO: 55117
  subsp. enterica serovar Newport str. VA_R100512570

SEQ ID NO: 55760 - protein, 345 aa, Salmonella enterica; identical to SEQ ID NO: 55116
  subsp. enterica serovar Newport str. VA_R100512572

SEQ ID NO: 55761 - protein, 849 aa, Salmonella enterica; identical to SEQ ID NO: 55117
  subsp. enterica serovar Newport str. VA_R100512572

SEQ ID NO: 55762 - protein, 314 aa, Salmonella enterica
  subsp. enterica serovar Senftenberg str. ATCC 8400
MDNLDKLMKIDWKKLVITDHSWIQSQLVERAPSVERKITSRLFTIPFSGVIQEANSFIESLADSIEHYVFDKTAIDIMRQKGQIPFRKAAQFFGDTNPIKDGKYGELLLYILSEAILNTPMVSHKITTLTNLNDQVKGGDGVFFGKYRDNISILIGESKIYKNFSGALDSAFDSLDRFSKNYSSGALSHELFIARKNISNNFDFETMELIYQAFTPGSEIYSECIKTHPVLLIFEDSDIKEIENNALTKSEAENLFEKWLSNKKEEIKIAIKDKLTKYPDVKPCFLDFFLIPMSDVGNFKKSLYRSIHGIDYKP

SEQ ID NO: 55763 - protein, 875 aa, Salmonella enterica
  subsp. enterica serovar Senftenberg str. ATCC 8400
MSSGIAAEALDHIDFKRVFDALIRNLFLKNRDSDTDVTIDIESIRRATWLASLGSLGDESQKSIANAFGSLLYLYDPSNELYLKTCYILQSRSGNLVSSKHLNGLYKENQKLHNFGTTLDFELATHRFELGKDFDGKTIFFTHYQKSLWEKLESGVNIAVSAPTSSGKSFIIKKFIFDRIQKNKSKFFVYVVPSKALINQVSNELSKELKESALVLTTYREVECFDKNIVYVLTPERCMRLLQEQKDCSPLLVFFDEIQNIEDGTRGSVYENVIYRMTTSWKDSQFIMAGPYIENLHLSLREVIDIDLLEHKTLATPVLQLKTVLTVFKKSQSVKYKIITPTGSIVQGDYDIGKALYSKLSNSRGQALKYLTSVFHEDEQNIIFSPKKNMAEGWALSVANDDQDNHKVIDNEKIKNLCSFLESEIHPLYSLVRCIKKGVAFHHGGLLDVARLEIEDLFSSGVIKNLVCTSTLLQGVNLPADRIVVISPKIGNYELSQFEFLNLIGRAGRINTSLYGEIFCIELSDEEWAEERIKNEDKKEIVSSVLNKLNGNIESVIDYIGLSGKEILNSDGDYKLYPLVLYLRSQYLVDKNHYSKIIKNSKLNKKQTEDLENKLDIFSKKISIPKNLLARNPFVDPLLLSEFFELIKSQGVGEWMISKYPGGKREAKSLDDEFKNMNYYNQYKSIISRMNEIFNIEQEVNYKDDGKSRRYRYFVSINKLAYDSHNWMKGHNYKFFIDNMVKDKLTKKGLEITNKNIDKITNFVTAHINTNLNFILVKYLSLWTDVVGHLMSEEEKEKNKFFLNLPSMLEMGSYDPLVLEIMSFGINRSTAIELTKKQRIKEGQSVELYLRNYNIAKLSSLHRKYLEKAGFGSIK

SEQ ID NO: 55764 - protein, 198 aa, Salmonella enterica
  subsp. enterica serovar Paratyphi B str. ATCC 51962
LKTPMVSHKIKTLTNLNDQVKGGDGVFFGKYRDNISILIGESKIYKNFSGALDSAFDSLDRFSKNYSSGALSHELFIARKNISNNFDFETMELIYQAFTPGSEIYSECIKTHPVLLMFEDSDIKEIENNALTKSEAENLFEKWLYNKKEEIKIAIKDKLTKYPDVKPCFLDFFLIPMSDVGNFKKSLYRSIHGIDYKP

SEQ ID NO: 55765 - protein, 875 aa, Salmonella enterica
  subsp. enterica serovar Paratyphi B str. ATCC 51962
MSSGIAAEALDHVDFKRVFDALIRNLFLKNRDSDTDVTIDIESIRRATWLASLGSLGDESQKSIANAFGSLLYLYDPSNELYLKTCYILQSRSGNLVSSKHLNGLYKENQKLHNFGTTLDFELATHRFELGKDFDGKTIFFTHYQKSLWEKLESGVNIAVSAPTSSGKSFIIKKFIFDRIQKNKSKFFVYVVPSKALINQVSNELSKELKESALVLTTYRELECFDKNIVYVLTPERCMRLLQEQKDCSPLLVFFDEIQNIEDGTRGSVYENVIYRMTTSWKDSQFIMAGPYIENLHLSLREVIDIDLLEHKTLATPVLQLKTVLTVFKKSQSVKYKIITPTGSIVQGDYDIGKALYSKLSNSRGQALKYLTSVFHEDEQNIIFSPKKNMAEGWALSVANDDQDNHKVIDNEKIKNLCSFLESEIHPLYSLVRCIKKGVAFHHGGLLDVARLEIEDLFSSGVIKNLVCTSTLLQGVNLPADRIVVISPKIGNYELSQFEFLNLIGRAGRINTSLYGEIFCIELSDEEWAEERIKNEDKKEIVSSVLNKLNGNIESVIDYIGLSGKEILNSDGDYKLYPLVLYLRSQYLVDKNHYSKIIKNSKLNKKQTEDLENKLDIFSKKISIPENLLARNPFVDPLLLSEFFELIKSQGVGEWMISKYPGGKREAKSLDDEFKNMNYYNQYKSIISRMNEIFNIEQEVNYKDDGKSRRYRYFVSINKLAYDSHNWMKGHNYKFFIDNMVKDKLTKKGLEITNKNIDKITNFVTAHINTNLNFILVKYLSLWTDVVGHLMSEEEKEKNKFFLNLPSMLEMGSYDPLVLEIMSFGINRSTAIELTKKQRIKEGQSVELYLRNYNIAKLSSLHRKYLEKAGFGSIK

SEQ ID NO: 55766 - protein, 345 aa, Salmonella enterica; identical to SEQ ID NO: 55116
  subsp. enterica serovar Newport str. VA_R100506907

SEQ ID NO: 55767 - protein, 849 aa, Salmonella enterica; identical to SEQ ID NO: 55117
  subsp. enterica serovar Newport str. VA_R100506907

SEQ ID NO: 55768 - protein, 313 aa, Salmonella enterica
  subsp. enterica serovar Bareilly str. CFSAN000181
MDALHVALENLIRDDGQTLNSYFSEVKVNSLIENTNATCHFHCLNLDGNGRPRVDALIQFLNDKVVDYAIPRKKINEAVQYFNETQSTAKITKLANQAKRLFTRLANSGEGGEFILFLFAEQFLRFPQIICKMSLKTSSQMHYHGADGIHIGVDKDNKKLCLYWGESKLYSNLSKGISECMDSIAPLLQSSMGIEGAETRDMQLLESHLNVDDIELEQALKRFLDPDSPDFNKLEYRGICLVGFDLKDYPQGPSPIDISELVALINTKVGKWSTSVQGGIVNKKLDRFAMHVFILPFPSVKAFRASLIKALES

SEQ ID NO: 55769 - protein, 860 aa, Salmonella enterica
  subsp. enterica serovar Bareilly str. CFSAN000181
MSLRDLSGWLIKNQGFLRKYQALVANSIKDQFPELKSDVIPQISSEDVGYLLTCASSLAFSSDEKCQDAALRIAQYCLLNEKSEARKDSAALILDSLSNNPAIQLAENRGYLNPDFEERLPLKAQLELTKRKILYTIEIDADKHIYANRFQSEFWDAVQENSWVSVSAPTSVGKSFILESWVEQFVKRNKNCLVIYIVPTRALISEVYSELQKRLDPNLTNIVNIQTLPLSNVYQSEKSNVFIFTQERLNLFYNHFSQIPKIDVLVVDEAHKIGDGGRGVILQHVIELTCLNNPDSKVIFASPFTLNPEILLSDAPILKNKRTIKSDYVTVNQNLIWVEQKPRKTKDWLMYYFANGEKRELGNFSLENAPSPESKRLPFVALCLGKGASGNVVYVNGAAEAESTSKLISASIENETEDEEILALVELSETIIHKNFALNRTLKKRVAFHYGNMPLIIKGEIERLFSKGKIDFLICTSTLVEGVNMACKNIFIRGPKKGNSTPMREEDFWNLAGRAGRWGKEFQGNVICIDSDNEKIWNGEPPKTKKNIFITRATDAISHDMDKLVSYIFSEHHFGMSERNPNLQSLFSYLCSSFYFYNGLDNNPYMEKYNIKNIDVLNEAIFDVFDSLTFPHELVVRHPGISPLLMQNLWDRFSRDTNKPVERLLLSEPGSNDALDSYVSAFSRISDTLSKKLGYNSKGAYVQALLVSKWMKGYPLGRLISDRIRYNKKKNIVFKEATLIRGVMKDVEEIARYQAPRLLGCYNDLLKSFYLSIDRTDLAKDVEDIGVYLELGVSLKTQISLIGLGFSRTAAVMISELIPNDSLDEEECINWIKDNKVDMEELPQLVQNEIHNIFRNFWVQ

SEQ ID NO: 55770 - protein, 297 aa, Salmonella enterica subsp. enterica serovar Liverpool
MLLPIRVNKRFLNLFRTLTLDKAPRQSTVNLHVLNIESNSFVYNKLVEELRDLIVCYVHSNRRIAEFEKDYPSFSPKPYLEAIQKFRTYTSNEGELGELLLYAFLESGLNAPKLLSKMELKTDANDYIKGSDGIHLLEIDNNYQLIFGESKMYSDLLEGAREAFDSIADFKANGLGFERGLIDTHVINEMVTEEGYETIKSILLPSGNDGLNLDLSFGIFLGFELPVSDTQLSMKNNEFREWAYSFVKNNASRVIDTIEKRIIKHKLFGHNFHIYIVPFTDIDITRKKLIQEMLTIG

SEQ ID NO: 55771 - protein, 862 aa, Salmonella enterica subsp. enterica serovar Liverpool
MNEKDVARKIPLAQRLSMDAYTSSYFKEIYNYISVLYDNFLFNNNHTQKPVFVDTTKIEKALRFADILSHSPVETHRTKSFEIISKIAAFHSDDPYFKMIGSAVINRLGIFAADNLISQGVHLPLDREIESSIKKSFQRTSIDGLFFTDKQYKLYQSLITSNTLSFAGPTSMGKSFVINEYIKHIVFGNAKKNIVLIVPTRALISQSTLKLKNELRDEIDGNQYKIVTTSYMLRGGIDHSKGYIFVLTPERLVSLISSSPDIIIDYIFVDEAQKLTIKNDTRSLVTYSAIEQTLNLNSNAKLFFSSPNLSNPEVFNDLFNRDHAKVYRSIEGATAQNLYFIDLLNNKFSYVDKNKLIDIDNVNQTYKSANDLIFQINKGKSKIIYTGGIDNTLSRTRDFLRYIKKLQSKKKPQNFDLASQVREFVHNGYELAEAIEYGVAFHFGNLPQAIRDLIEHHFKIGNIDYLFCTSTLLEGVNLPARSVFILTSKKGTRYFEPVDFWNLAGRAGRLAIELAGDIFCVKDESGTWNDKAVKKLILSNKNEIELTPSFYLNDSKRIKELEQIIKTGSTEGIQNSEFLRTLSDMVRIDTLRTDKANNLPLINYFRNNGNNDILHYALKSIDNINIPTHILLANSHIAINSQHSAFNSIRNYSIDELKLSWNPTNDEIKEKLALIFNIYQIDKYSKGLNRLNFNSIPYYAVILTKWMHGNTLSEIISDAIVYYISNRKNIYLSDKTQEPFDQNNPIHITKLVNDTIKDIELKIGYQLQNYISHYCQLLSLVFENNPGANWSQFIEFGSNDPIVWQLQFMGFSRHCAIFLKKNFPKHLKYDQENNQLYILNKAEIKSKVKQNKLYWLEIQALL

SEQ ID NO: 55772 - protein, 297 aa, Salmonella enterica subsp. enterica serovar Liverpool; identical to SEQ ID NO: 55770

SEQ ID NO: 55773 - protein, 862 aa, Salmonella enterica subsp. enterica serovar Liverpool; identical to SEQ ID NO: 55771

SEQ ID NO: 55774 - protein, 345 aa, Salmonella enterica; identical to SEQ ID NO: 55116

SEQ ID NO: 55775 - protein, 849 aa, Salmonella enterica; identical to SEQ ID NO: 55117

SEQ ID NO: 55776 - protein, 345 aa, Salmonella enterica; identical to SEQ ID NO: 55116

SEQ ID NO: 55777 - protein, 849 aa, Salmonella enterica; identical to SEQ ID NO: 55117

SEQ ID NO: 55778 - protein, 345 aa, Salmonella enterica; identical to SEQ ID NO: 55116

SEQ ID NO: 55779 - protein, 849 aa, Salmonella enterica; identical to SEQ ID NO: 55117

SEQ ID NO: 55780 - protein, 345 aa, Salmonella enterica subsp. enterica serovar London; identical to SEQ ID NO: 55116

SEQ ID NO: 55781 - protein, 849 aa, Salmonella enterica subsp. enterica serovar London; identical to SEQ ID NO: 55117

SEQ ID NO: 55782 - protein, 345 aa, Salmonella enterica subsp. enterica serovar Newport; identical to SEQ ID NO: 55116

SEQ ID NO: 55783 - protein, 849 aa, Salmonella enterica subsp. enterica serovar Newport; identical to SEQ ID NO: 55117

SEQ ID NO: 55784 - protein, 306 aa, Tyzzerella nexilis DSM 1787
MGKLQESEITKRLMPNKALFADIHVISKKFDILPDGNVHYGASIAYQDLQELREDFLVDLMDTIVDWIYSADKYAVLKEKETKKGKSEATAHASVQRRARDKFRKGSGNTLLVQGQFGELLLFHFIQKCMKAVPLLRKMKITTSSQHERFGADAIHYKVENGKNIIILGEAKTYSSKYKFNAAFEDALNSILNTYKTHRDELNLYVHEDFLDEEMNEIAEEYLDKRLQNVEIHLVSIIVYDETKKINLTNENDIRRQIEEIIEMRYRDFDNSKIPIKENIILKRMTYIVFPIWKLDELIKEFQEQL

SEQ ID NO: 55785 - protein, 846 aa, Tyzzerella nexilis DSM 1787
MEQKVQEVLQKWLEIDFYYIANKAGFINKSLAVEPQLINDTVRCLDYLTSMKQGKESTNLVITLISLMWTYVNHEKYDLRSFVVKILSRIGYPTSAIIADDYFDKENCLFTSLSSVVDQITVGLNQISNEVEVNGKYFLLTNFQKRIWDSMDEKKVIGISAPTSAGKSFVILLKIIKKLMNGIYDIVYIVPTLSLLNQVTEDFHTLLKSMKISQYRISNTFLPTEKSEANCIYVMTQEKAIAAFANEEKAFEKRMILVADEIQNIERIKEETDERAKILFDTLMEFRYKNNVEQIIISGPRIEDIDKLGKSIFGIETEDISTDISPVLNLTYSICKIDKKYYFKQYCMLNSNPKCEEITNSDIIYGYGKKLYNLQYLDYLSYFLEHIGKNEQNIIFAPTAPTARKIADYLSQNKEDKESNTDLIQYYKDTIHEKYTLCKTLGSGTAYHHGKLPMHVRRTLEKAIVEKKINNIVCTTTLMQGVNMPAQNIVIRNPHLYLKKTDSAAELSNYEMANLRGRAGRLLKDFIGRTYVLDESAFADADGYDQLELFEDVTKELPSGYGERFEEYREDIEDVIETNKTVDHSMKKYGYLISYIRQSVLRYGKGSRRKMQDVGIKLTQKQVAAIIHKLETLTIPKDICIKNRYWDPFVLQKIFEDYKEAVPVSPYERGAKAKLNRMLKYMRDTEETSSMYERYVPSELQKGSNRSYLVNLCMKWATGVSLHDILNEERYSGETGADEIERTIQVLQNVVSFNVPLLLKPIFDIKNPDSIFLTCIQSGATTETIKMMIELGIPRETALYLYDEVFTGKQKESDDEEDLEQKIRNQLQKSFNDLPYWVQVQLDFLI

SEQ ID NO: 55786 - protein, 298 aa, Gemella morbillorum M424
MSHNHTTNIEISDNLHIYYINFDLLDNGYGQVKDKFYNELFDDIPAFAFGTDVMNRKIGEIGLVPTVREAMKKIYSIKEIQEASREYLDSKSTEDKYIKRGEFGELLLYHLLHEYFGADALISKIYFKDSVGGVAHGFDAVHVDTSRQILWLGESKLYKNSSTAIDELVNDVINHFNINFFDSEFQIITNRVHDTKINCDDYIIKLLNPETKILDKLAGINVCLFAAFESNSLLNFNKNNFEETLMEEARKLNDKMKNVLSEHPWIKHLNIYLLTFPLDNKREFVSSLHQKLKGAQQI

SEQ ID NO: 55787 - protein, 582 aa, Gemella morbillorum M424
MIKGIEFDVKSLKDFEYNWNCTKYYTSIIDTVEARRFLINILENWEKVNNDTKTIWLDLIERAGFYPYYIDKIDSVENYNQSLQSSVRSAYYKSENLDGVYFHDQQKKIERALSFKKSVAVSAPTSFGKSLLIEEFVARKQYDNILIIQPTLALIDETRKNMSRYSDYYNIIINTKQRATDRNIFILTAERVLEYESIPKIDFFIVDEFYKVSNLRNDDRVDALNISIMKIMDYKPQSLFLTPCVNSLSDRFIERYDVEFFKTDYSLVNTNIIEVRRNNKPLTGNKKKNELFKLLEGVKEPTIVYVKSPNEAYKLANEYIDYLGDSGCVNSDLPIFEWMDENISEKWKLKKLMKYGVGAHNGALPRHIVSSEIEMFNKGILSIMFATVSLIEGVNTVAKNIIIYSNNKGKKSLDFFDFANIKGRAGRMGKYYSGNVYLFDEEMEPKDFSIDVPFIDQNHISDEILFSIPDEYVKDKDRKKHLVSDIPENLKIIIKNNLISVEGQKKLYNYIKRNIAYLSYLKWDGIPTFEELYQTLHLAYKYLENNDKNKFAKSQAITSLDIINKPLKEVIVKREGFLRKKT

SEQ ID NO: 55788 - protein, 538 aa, Yersinia frederiksenii; identical to SEQ ID NO: 55412

SEQ ID NO: 55789 - protein, 729 aa, Yersinia frederiksenii
MTEVYEQAKHSLQGEDFSSFNYLFAVNKLLSNPVSYDLGRDLIVRALDSRERFSEHTTILKNMVRKSGLFPYLKKEFTSLTPDDLRVLELYRTPFSDGFVFHSMQFHIFDLLKSGQNVVLSAPTSMGKSAIVDSLLGMGTLKRLVLVVPTVALADETRRRLQERFGDRYQIIHHSSQVCHSDQAVYVLTQERVNERDDIVDIDLFVIDEFYKLAFRQLKSGDIDHQDERVIELNIALSKLLKVSRQFYLTGPFVNSIRGLERLGYPHTFVSTDFNTVALDVKTFGIKANDDKAKLNALGEIAHACVDATIIYCKSPTVAGQVARELIRLGHGTPTESPHVDWVSEEFDADWDYTVALRNGIGLHFGALPRALQQYTADQFNAGKLRFLLCTSTIIEGVNTIAKNVVIYDNRDGTRSIDKFTHGNIKGRAGRMGVHFVGKIFCLEDIPEDNLNQEVDIPLGIQDIDTPINLLASVQPDHLSEFSQDRFDEIFINDHVSIDLVKKHSYFRVEQFEMLQSMFEMMDDSEFSSLVFHWTPATNFLKTFAKIIARLVPHTFSRNGVPVKPTDVMIAKLAGYLSAESYSEYLKNQIVYARQRVYEGEKRTLSDALNNDLKLITNTFGYTLPKVLSLMEDVVKYHALKRGIRSKVDYTHVKMTFENFHLPPGVNALEEIGIPIQTLHRLVDLLEFSDQTDVDGLCQYLRDTQDVWSRTIGFVDQTFIRRALGIEQH

SEQ ID NO: 55790 - protein, 538 aa, Yersinia frederiksenii; identical to SEQ ID NO: 55412

SEQ ID NO: 55791 - protein, 729 aa, Yersinia frederiksenii; identical to SEQ ID NO: 55789

SEQ ID NO: 55792 - protein, 274 aa, Yersinia rohdei ATCC 43380
MDPLIMKILSALHEFAYGFHEGEQTDNTQTLSKIIDAARSIYKIDEYQKVKDIYLNSGELTDDVANKYLKRGEFGELILHLILRDFHNTLPLLSKIYFKDSIGHTVHGFDAVHIDPVNKTLWLGESKLYIDPKKGIGDLINDVEEHFKADYLNSEFNLIAKKIRHVQNSPELEYWLDILSTGGKLSDKLTKINIPLLCTYSCDSFLKYDNEKSPDFSAYYENKILMLKKYFDENYKHPLKNHLNIILMLFPVSNKIELVKKLHQKLSLIQQIGG

SEQ ID NO: 55793 - protein, 726 aa, Yersinia rohdei ATCC 43380
MNEHIGNGSDALFEYTFSEYQKCARLLISDENQGRDELIKILEKKNDYSRILDGVLADLIESAGFYPYIIKNDLTLSSSSQKIRFENNRSINIKDKVFHDEQKYLLGLINSEKNVIASAPTSFGKSLLIEEIVASKKYKNIIIIQPTLALLDETRKKISKYSNDYKLIVRTSQAFCSEGKGNIFLLTSERVNEYKDLPKVDYLIIDEFYKLSSKRDDERHQSLNNAFIKIFKNSTPKFYFLGPNIDGITPGFADKYNAVFYQSQYSLVRCNDFNIYKDYADLFGSRGNKARFKESILFKLISGRCDEQTIVYCASPSKARRLSREFANFIQKNKSGELTHNPPLIEWIEKNISKRWSLIDSIKHGVAFHDGALPRHISSSIIDYFNEGLIKVLFCTSTIIEGVNTSAKNIVYFDEKKGKDLSIDYFDYSNIKGRAGRLMEHYSGNIFNFNPPPEKEVIYIDIPFFEQNPINEEILINLDDADIKNKNSIEYNFISSLPFDESVLFKNNSINIRGQKKLLDYLKSNIRDNYALVAWSSTPKYEQLKFCVHLCWEYLLKDNEKSNQMSAERLTKVTFDYGFSQNILELVKNTYNYNLSKSGKMNDEKTIKIIDESIKDSFYILRHWFQYKLPKLLSVLNELQTYVCKLLGLVPGNYLYYSSIIENDFIPEHLNILIEYGIPKSAIQKIAKFIPDHLVDDEVVRLISNKKLYDYNELIDYEKNIIKKMF

SEQ ID NO: 55794 - protein, 311 aa, Yersinia rohdei
MGPFKAHEVIEERMREQVLCSYLVGFDINDTGVSYYRMDPLIMKILSALHEFAYGFHEGEQTDNTQTLSKIIDAARSIYKIDEYQKVKDIYLNSGELTDDVANKYLKRGEFGELILHLILRDFHNTLPLLSKIYFKDSIGHTVHGFDAVHIDPVNKTLWLGESKLYIDPKKGIGDLINDVEEHFKADYLNSEFNLIAKKIRHVQNSPELEYWLDILSTGGKLSDKLTKINIPLLCTYSCDSFLKYDNEKSPDFSAYYENKILMLKKYFDENYKHPLKNHLNIILMLFPVSNKIELVKKLHQKLSLIQQIGG

SEQ ID NO: 55795 - protein, 726 aa, Yersinia rohdei; identical to SEQ ID NO: 55793

SEQ ID NO: 55796 - protein, 539 aa, Yersinia ruckeri
MTELLLVKDQNDHGAIAARHGYKFQDYVATNLVLDMLIDHSLKGVRCEKIDDIDLIFIGYTEYIQVKSTSGEKYWNLGELHKKQGKKTIVQKSLDSDCELGIVAKFRIITERGIQNSLKHLEINRSNRLKSTQRSDLIKSIKGKIKDHKSPNNNDTEYWVDNCLWQVIPSMQDALLLAQKKINIFSNSFGIPAFDDEVDVIYYKILRLVSEIADQSNKQYTTEQKTFSQNEVRLMIKEWLDQICSKRTSHKKVYNKNREIVLSSLSHLQTDDSKRSSHGYFLEYARNKFRHEKIVKNILEWMPEFLLSPRELAETDSSDCYSVWQKTLERIKKRPVNIDISTLISEVLLHMLIRYDKRSQPISGMLYINSGKEIKEFNNIHIIRNLDTDELWMGSAFVSQEYSVDSITKDFASFLYSNLDPDIFDTSKSRVFEAKQDNHLLPHSINELLTPKATISGYADRYKFASLFIYNSAMLENGYTENYKQNLIDECEEIFKKFCQKIKELNDNEINRVSISVYLLPLESFDNLMKTFNEDISNA

SEQ ID NO: 55797 - protein, 710 aa, Yersinia ruckeri
MHEIEKIRHAIGKEINIEARFYTLNYILKLLSNPLTEKYGRELVIRILDSKETYSDSTKLLKYIVRKCGLYPYLISEFDNLSTEETLVVNLYKPNMDDTEFTFHSLQKLVYSYLIKKNNVVLSASTSVGKSAIIDSIIASKQFNRTVIIVPTIALIDETRRRLSDKFQDDFQIITHPSQVASTNKTIYILTQERVMERQDLNEIDIFILDEFYKLNINSENDSRSILLNIAFLKLLKSSKQFYLIGPNIDYVIGLKQLGLSYIFIPSEFSTVALNIYEFDLPTHDDQRIIKTAELLKNDSDSTMIYCQSPVTAVKVAEELIERNCGNKTNVDDNFTKWLIENYHKDWIIVKALLNGIGIHHGSLPRAIQQKMIRLFNEGKIKILVCTSTIIEGVNTSAKNVIIYDRRSNRSVVSNFTHRNIQGRAGRMGRHFVGNVYCLESIPDNEGHLNEVNIITGTQPSDIPLNLLYGVDGSYLTESSVTRMAEFESGSILDANIISMNTKYPPQRLEELAVEIRKNILSNWQGIFWGGMPNKNQMRTLSDYILILEQASLSRVHLSDGDTLSTFLIQYLSSSSYSSFLKNKISHYQGNGDISNTIDWLLKTLRNAIGHNIPSAISTISSIIEYLCKRMKLVAQFDYRLIAYKFENSHLPSIYNALDEFGIPIQVAEKLTLKNLEIEELDLLVMYLKKNYIHMPNLTIGDIAFIKESL

SEQ ID NO: 55798 - protein, 538 aa, Yersinia ruckeri
MESNDSGGVAAKHGFLFQDCVAAYHVTRMLRDKTIRSVRCEVTDDIDIVSDGYIDFVQVKSTDKTRWNISHIVQNSKGAGKKTIPCSSILHKSMQCESDATLGRRYSIVTEEKVNKTLEYLTISPNARLDKPGRQELIDDLNKRTDNYLTTSGISVSDWIDTATWEVFSSLRELELLGIKNIRLASQDLHGVILSSETVAEDIWCRILDTVTRKGEHSRRIYSTDDKSYLRPDLLEWFKQHVEDDQSRSGRKIYVKRDLPHILTPFRAPMASVCAKRKGQVLHQQYSLKKYRYKHIADNVCQWLDEVFLRPKEMSDIHKLTFIEKRERLKKSVFKSLHDVSEFLGRVLLHATIRQHHESQPIPCMLYVEKAGAEKILENVHIVRRDPEGDQLWIGFSELVTDIDIAVRLPEIRDRLYEDISDCIDTARRKILDIKDDNYLLRHDIDEILDGSRPFDAHLDRFTFVLFVGYDSNLLTDPETPGFEDDLEKETTVLFEKFAADLIEDSPFANLCIHVFIYPAPSLEQLTELVDEKVREVV

SEQ ID NO: 55799 - protein, 729 aa, Yersinia ruckeri
MTEVYEQAKHSLQGEDFSSFDYLFAVNKLLSNPVSYDLGRDLIVRALDSRERFSEHTIILKNMVRKSGLFPYLKKEFTGLTPDDLRVLELYRTPFSDDYVFHSMQFHIFDLLKSGQNVVLSAPTSMGKSAIVDSLLGMGTLKRLVLVVPTVALADETRRRLQERFGDRYQIIHHSSQACHSDQAVYVLTQERVNERDDIVDIDLFVIDEFYKLAFRQLKSGGIDHKDERVIELNIALSKLLKVSKQFYLTGPFVNSIRGLERLGYPHTFVSTDFNTVALDVQTFGIKANDDEAKLNALGEIVHACVGATIIYCKSPTVAGRVARELIRLGHGTLTESPHVDWVSEEFDADWDYTVALRNGIGLHFGALPRALQQYTADQFNAGKLRFLLCTSTIIEGVNTIAKNVVIYDNRDGPRSIDKFTHGNIKGRAGRMGVHFVGKIFCLEKIPEDNLNQEVEIPLGIQDIDTPINLLASVQPDHLSEFSQDRFDEVFINERVSIDLVKKHSYFRVEQLEVLQSMFEMMDDTEFASLVFHWTPATNFLKTFAKIIARLVPSTFSRNGVPVNPTDVMVAKLASYSNAASYSEYLKNQIDRARQWLSEEEKRSLSIAINNDLKLITNTFGYTLPKVLSLMEDVVKYHALKRGILSKVDYTHVKMTFENFHLPPGVSALEEIGIPIQTLHRLVDLLEFSDQADVDELCQYLRDTQDVWSRSIGYVDQSFIRRALGIEQY

SEQ ID NO: 55800 - protein, 539 aa, Yersinia ruckeri
MAITSAPSNKGGPAARQGFKYQDHVAVSFILKMLRDSTYLQIECETADDIVVVSRPDTELIYEYIQVKTTEGDSKWNLTEITTLDKGKPDSSLLQKSLKCDKRAGIAHFRIVSKRDISKPLQCFLIDINKRVLPDGCTERGAKLAKKFSKTVSDQQRDFKYWADNFVWQVCGEVAWLEAMNIRVLSELAEQHGVTPSHRQQKEIYEHFLNWADDAATADVKTQSKMKIIEREEALGRLSKLLYAAEASSSLTAKPYRSKPEPFLVEFHSVAETNLLRSFAGFDVEYDFDQWRCRELAEHLVEWLPEFCLRASEIANFQVHHAKTVLVKSIGTFTQAKMPRDKLIAELILHTILRSRKESEPIACKVFYESNGKLSEFGNAHIVHQAGEADQLWLGLSKMIPAGTMDDTLKEICAVLDATISKAVLSSEREIIITLREPHHHLPTAEQFSKALNRNSPAQEMLRVMCFPILLAYDSDVLGKGYVSDYIDHLKNEIIDHYTALISKLPPKVIQVKIAIFLLPIESIQSLITEFNSLCKAEN

SEQ ID NO: 55801 - protein, 714 aa, Yersinia ruckeri
MNYEMVKKQLQLIGGKNFSTTEILVAMSKIVNRGLPEWEGRDLVIRALDKIELFDDVEQSLLLSMVRSVGLYPYIKPYLDEVSGDDRLAYEIHRIDSVEPGMVFHRLQAHVYNLLMQRRNVVLSASTSVGKSLVIDAILASEQYRKIVVVVPTIALIDETRRRMVKRFRSHCNIITHPSQEANSCLANVYLLTQERVLQRDDLDDVDFFVIDEFYKLDLENDSDEKNRSVDLSLAFHRLAKQGAQFYLLGPNIQDIRGLEAYEYNFIPSNFSTVSVDVFHYNLSSKGDARKEKLLELCSQLSSPTLIYCQSPASANKVAQFLINEAKLTNVENTQDVADWISKHYHPDWNISKAISLGVGIHHGGVPRALQQYFVKLFNEGTIRYIVCTSTMIEGVNTSAENVIIYDRRVNNTPFDFFTFKNISGRAGRMNRYFIGKVFMLEAPPLETDLSVEYPIGAQDEASPMGLLLKLEPEFLSDLSRQRLEQAYSTPQISAATLIENRHIPIDAQVKVAEQIIEDQYSHNDLLCWKGNPEQNQLEHLCTLVYEHLPHRLQEYGIFSGLQLAWHINALRSQRDFTEYLQQAIDDDRHDRTPSEAIGLRLKLIRNVISYRLPRDFMAISRIQADVLGRQNLEFGDYTFISEQLENLFYDPLLTALDEYGIPIQISTKIKGIILPSDNLNEVLTKLRKLATYIDELQLSSFEKNILRWAIADM

SEQ ID NO: 55802 - protein, 313 aa, Helicobacter hepaticus ATCC 51449
MSDYTFTKYRDKDKVDFEVLIDEWLMSNDSVNHAMLSLVNDFESNQWRSKKFRNFIINNLKEVALNKKERDALSGNEGDILERAISKMHIDNSGGEIGEVFLYGIMKSYYNALPVVPKIFYKQNPNDNAKGADSVHITLEENTYHIWLGESKIYNDITGSINEAVKSVYELLATDKLKKEKSLIMNLNDIEDYLSDADDSKKLLMIELKKTLNDRTSLDEMKKILHIPISIIYECEMTKKHLQNPSVCLDDNYKNLIIEFHKNQCGNLSQKIISKLNNIPLIEYIKFHIIIFPIPNKKELVAQINKIFEAHRQ

SEQ ID NO: 55803 - protein, 689 aa, Helicobacter hepaticus ATCC 51449
MTNEQIFDECKRIYTLDDKEKANELFRLLDKIGNKRNYSPVLNHLIREVGIYPYINQDTAIFSDRLVCECFKTDVGENEPKILHREQSRILKRLLEGENLILSAPTSFGKSFIIDALIAIKKPSNILIIVPTISLMDETRRRLTLKFGSDYHIITTSGSQLKDKNIFIFPQERALEYFENLREKSLDLFIVDEFYKMSNKDRRTHILHNIVNKFKNIAKQKYYICPNADDIEDKSKNKIFLAGLKKEILTITTVALNKFDLSKETGSKELKIQNLLKNEIGKSLIYVSTKPNSKKLCKILLKFIKAGNEELNSFSQWLQKHYAREWDFATNIKNGIGQHNSAIHRYIQQLQVKLFSENPSMNIMVSTTSLIEGVNTAARNIIIWNNQVANDSLNSFTYKNIIGRGGRMFKYFVGNIYLLDNENKIEEKEVEKIDINPDEEFLYRNDLENPDLESKKLIEQKLFSLIKDKQKFQKLISYIKNYKIIMNIENVLQIIESVNEIMKSIKHLNNDNPDSWGLLEVKSVRNIFSNNDKKLDRAYKNIKVFAKYNWNGTSALLNNSTININDYFNIEKIIVFDIASFFNDINEIQQILYPDKHINISPFVSKLSNAFLPSVVYTLEEFGLPRMLSKKLHKYNFINFENNDLKIDEALETFKESSVEEIINLFKSHNDFDDFDEYILKYFYDGLGK

SEQ ID NO: 55804 - protein, 306 aa, Actinomyces neuii
MAQATITPTLRGDTFASTFTEVAHSNTLGLRNDEQLRLFHLSIQNNRFDHTALIKFLKRNVGRYVFSRAEYEGYKQRDDLEEVALDAVNRMRSQQNGMGLGEILLYVLLEQILEAPKVMSKIELNQARGQIHSRCDAIHLLTPDGQRTTSSIVFGTSSVIGNIGDAITAALDRVVDIEQNRSDEVQLAEQTVFTKTLEPATANYVKDLLIPKPGGAPVFDTAYSMFLGYDIGLDPKNYSNQQYRAALDQKMQGDIAAHAQIIADEINTRNLDNYSFYIYVLPLNEVDVDACAIMDGLVDGPGGSHV

SEQ ID NO: 55805 - protein, 893 aa, Actinomyces neuii
MGSWTGQVVAMSDKQVTVGDLVFSDIDSNEFLKQLYANLLYNYGLHRLGLVDRHPYDVDFEAALRFADLLSKSTHPTNRDRHRVWAQEIALLCHILYPQDARTKAYVSAIFTTLGNYPGLKQLGVTSDAGILDAAFNAYQAEYLTVPGDKSMKFFAPQKKIYDRLNDGKFSFSAPTSLGKSFIMRTFITNQIKSGVKANFAIIVPSKALINETRSKLIADLGEDLERRNYRIVSAAGDIVLEGDHNFIFVLTPERLLYLLIGKPAIEFEYVFFDESHKLSGKNSRAPFYYQTVTILQHRHRPPHFVFASPNIPNPEVFLRLVDPNSDENETNAVATQYSPVTQFKYLVNLHENTISSYNDHTQEFTHLASLQAQDTTTQGVTRFVSESSRGSDHRGQTIVFHSARHHAVQAARDYAQSLADLNDKDLDDLAKDIERDVHEDYYLSGLIRRGVSYHIGYLPPAIRERIEGLFREGKISTLFCTSTLLEGVNLPADNLVITTNKIGRAGMTAVDFKNLIGRVGRIEFNLYGNVFIIVGDQLASEQKAKELLQANVPAQKLSVQTDSQIISKKMKQGVVKDLQEGRIEFSKGNESYERYDMKRKFGLMLLRDITTGRQSLVREEFSDYLDEQATNSIIATFSRREGQQDDDINVSIDQAEALTHAIQAGLQYPQLSPNGKFSYDETLAFLQRLASIFKWRIYNPETLGRTPKGSDQLAMLSWYTVLLLQWMEGHGLRSIMNRAIEHHRKTGIVWINRQPNRYLDSKEHRNLVFSDTLEAIEQVILFELSNYFLKFSNEYKKVHGKEQFDNDWYEYVEYGTTKQETILLQRLGFTRESATYIRINVSNAIFLHEGKPHLNPILLESSNINVRKEANEIRYNVPEAFSMPLTPSSDTR

SEQ ID NO: 55806 - protein, 304 aa, Peptoniphilus lacrimalis 315-B
MIVSQNSKDLIKIFQNIKDIPISTNLDDGNLNIFMCPINARKFDYNQISLVLVDSVIDYAISKKNITKYQNKPGRLSQIARKKFKEYLDNTGELGELLLYCFLEGHLNAPKILTKMEMKTSNSLYVNGSDGVHLLNNGDGTYKLIFGESKLYKKLSDALNAAFNSINDFINENNPNGKNKTGINYEKDLISSNIENCELSDEDKDVLELLIYPTKNEKKIRIDDAFSIFIGYETDISNETRSCTSNNFSDEVKKKILLDLDKYENKIYEKIKDNNLLGHTFFVYIIPFTDIDITRRKILKDILT

SEQ ID NO: 55807 - protein, 606 aa, Peptoniphilus lacrimalis 315-B
MNNFIDYISSKAYTDDYLINLIYNLEKNFCNKLLDQDYKIDLSNKEKCDLMRFADILCRSSKDEHKNLSLRIVSLVYEFKELLEDKFIKLSIINVLTKLGNFPSINLIGIKDENTGIDEIDLDLIIKRVYNESPIKEIFTDEQLKIFNELQTNNHFSFSGSTSFGKSFIFEAFTKYLIEEHNQSDNIAFIVPTKALINQVSYKIRKLVKSYSYKVINSPEIPKVIKRQDGKYIFVFTPERLIAYFLDTTNPKIDYLFVDEAHKLLSVKDTRTPLMYHALVMAKRKSINIFFASPNIPNPSVFLELVNNTPDESYAVKVESVSQNRFFVNCHTDYSYMISDYGEDILFPKLNFSGNVITDLGIILNTFSNGRQSIVYCNTIEKTILTAFEFARTLGEVRDENIDKLIDIINEKVHEQYYLRYCLKKGIAYHFGGIPEEIKIRVEELYKLGVIKIIFCTSTLLEGVNLPAKNIFILSEKIGLSNMNEVDFWNLAGRAGRLSKDLAGNIFCVNLYNQQGYWNDDSKIKILRDKNIDETKPIILRKNNKNLYKNIANYYTRNDYTNKKLSEDDKKIIEMYGNILLYHDTVNSDSVLKDRFIDSGNNFLDV

SEQ ID NO: 55808 - protein, 558 aa, Sphingomonas sanguinis
MRLGGEPPTGRKLAFMPFDSLIDPATASDAGGVAGRRGQKHQDHVAASYVIAMLSDPGIAQIECETADDITIRRSAADGGTDNEYVQVKTTDNEDKWTATALLAREDGREGSSIAERSLACDAHPGEPSFRIVTNREPRGNLASFKRPPGSRSPTDAALQAASASIAKRYPSFRSINGRSLGDWCDRLLWEVEPDLARLADRNTLELHKLANKQGERPSTVDVEAAYGQLLNIVIDAGDASRVLTPERKRISREAARAWWRGRIAAFAAETRRTVKVYRVRTDEFFSSFMLLDESVISRTLAAYDVEYDGERWRSEELVRHLIDWIPEVVLPPEILATFDHLSARAVLSRAIRACDARGALPTQELLTELMLHAILRHHHGSEPIACKIFHMSAGLMTFGSAHIVFDDAGDQLWLGQTRVTVAADRAALPSAVAASLKASLDRNVLREEREIILQLRHPAHLSDHELGRSMAAHGRVDDLLAVLHVPLLIAYDSATLGRGFSADYLEGLRAEAEGIYEKLKAELHVDFGDVRIHIFLIPVECAATLARAFETALRAGR

SEQ ID NO: 55809 - protein, 706 aa, Sphingomonas sanguinis
MSPEDTFRVLRTISALANDSGRQSTARDLVIRALAIRDRIRPDFIPLLDSLVRVVGLIPYADPEQNRSIDDFYVLEAHRAPVPDGDLLFHTLQLQIFHDLLRRRNVVLSATTSVGKSLVVDAVIATGRFRHIAIIVPTIALIDETRRRLGGRFAASHDIITHPSQTPDPHRPAVFVLTQERALARDDLGSVEFFVIDEFYKLIVGDKDPDRAVDLNLIFARLAGQGAQFYLIGPTVGAVVGIAARYNPVFVPSEFSTVALDIVEFNYPDNSDERKDKLIELCSDLESPTLIYCQSPPRASLLAEHLLAHGSFELSEATADAVDWLRREYPGEWILTRALERGLGIHHGNVPRAIQQYMVRAFDAGDIRHIICTSTLIEGINTVAENVIVYDRRVKTTGFDNFTFRNIAGRAGRMRRYFIGKVFVLEAAPADEALSVDVAVGRQDENTPASLILELPEEELTPVSKARVGEIIASSPLSIQTLRLNRHIELGRQYALHDVISRDIVLLEDALVWSGMPQPFQLRMVCELIHDHLDGAALSQYGIKSGKALKAELDRLRVAKTFRSYIDHRLENKSEYQTTSESVEKTLQFMRRYVGYTFPRSLMAISHIQAEVLTRAGRTTVGDYNLLASRAGSLFMNANAFALDEYGVPPETARKLAAAGGDPDTLNDALILAVAALRLPGIDLHPFEREIITDLQKTLSPRQVAK

SEQ ID NO: 55810 - protein, 554 aa, Pseudomonas viridiflava
MEITDSGGVAAKYGFLYQDCVAAWLATEMLMDREMRAVRVETVDDIDIVWAGFTEFIQVKAAAEKKWTPTTITDNATSTAVASTKSKSVGKPRKKRIPGSSMVHKSMKQATTPIDKCKFRIVSAVRPTGLLEYLRVLPTSRTGRPGRQELVDDLNQRTSSFVAASKNDIGHWVDSTWWQVYASAREIELLGIKNIRNAALEVVGVTLSSDAAAEAIWRDIVYTLTKKSALSRKVYCEDDKTYHRNNLIDWFRSEILTHEKSSHTRTKIYANKKLQPILNHLHTHTPSCGSIARCGKVMHQRYNINNYRYSYISDSVIKWIDEILLLPEEIADVTGLSTADRYRTLLSRLKASMTELGDFLGKVLLHSCIRSLHTSQPIPASLYIEKPFEVKVLENVHIVPRASEGDELWIGFSHLYTGIDIIECLQNLRTILYTDITDNIDSARSKILEIKQDSYLLQHDIDELLETSQAFDTHLNRYRFIVFLGYNSALMTDPKTPGYEPDLLTETKKLFDDFASDLKTSGFGEVLIELHLYPVPDIEKLLSEVKKALEKACA

SEQ ID NO: 55811 - protein, 724 aa, Pseudomonas viridiflava
MLENYESALQSLQQQSFSAFSYLKIADKLLSNPKYRSSGRELVIRALDSRSRFLAVHALLRHLVRKSGLYPYLKTQFQDLSLAEECVLEAYQTPISTDIVFHSMQYKIYELLLENRNVILSAPTSMGKSAIVDSLIASGKFKKLVIVLPTVALVDETRRRLEERFGQTFQIIHHGTQRSEQEKILYVLTQERVNDRDDLESIDLFVLDEFYKLAFKRKKDGDIDDEDERVPALNSALSKLLRCSEQFFMTGPFINGVSGLPTTNLNYTFIPTDYNTVAVDVEFFNIKPDSADEKNKALATTLKQIHGPTIIYCKSPGRAVQVAKFLLKSGYIKSVEDDYLTWLDQHYHPKWEYTRAFRNGIGLHYGGLPRAMQQYTIDKFNRGELPFLICTSTIIEGVNTVAKNVFIYDNRAGNFSIDRFTHGNIKGRAGRMGVHFVGKVFCMEELPKQSDCFEVEIPLGKQTEELPLNFLAGIQPEHLTDFSQLRFEAGTSASKAGKDFLRKHASFKFETIEAAFSFIEICNESEFQSCLFSGVPKTGFANFLSRFVDRVCAGSLKKLGLINNISVINARISAYLMAPSHESYLAQQISRIPSSTDSEELSEQINHALNFASRIFGYAIPKALALLEDIVNLELEERGTEFRASYGHLRSIFENYHLHPAWAGLEEMGIPVQLLHKLGTLFPFVEEASVDDASRILRENLDRLQGLTLLERHFIDRALGRVKR

SEQ ID NO: 55812 - protein, 305 aa, Eubacterium brachy ATCC 33089
MKLNPNSKNAIKPFKHLKHLFISKNTDDGFLDLFLLPINARNFDYNSVSENLMESVADYALSWKIRDKYKDKAMTLSRKAREKFKEAAKNDGELGELLLFCFLEGHLDAPKILTKLELKTSNQLYVNGSDGVHLKKLSDKKYQLIFGESKTYDDLNRAFDNAFKSIGEFVNEVNAKGNDKSGINFEKGLISSNIESDIFEKDEEEILNVLLYPEEKANYKFSLDDAFSIFIGYEIDIKDEQQKCSNDEFPIEIEGKIVNQIETYKGNVYKLIQKYGLMGYTFYVFIMPFTNIDENRKKILKKVLE

SEQ ID NO: 55813 - protein, 865 aa, Eubacterium brachy ATCC 33089
MNIMQKMSNRAYEDPYLRNLIHKLETDYCRKFYTNSSQLMLNEKEILHLLRFSDILCRSEESMHRNLSLKIISLLLELEDVSTSEYFRIIAANTLVKLGNFPSLPIIDRDGKYLKVDEIRNDYILKGLMQASPLGKPFTDAQYNVFEEMKKRNHYSFSGSTSFGKSFIFEAFTKYIIKEHNKTDNIAFIVPTKALINQVGNRLKEIVDEFGYKVTTTPVIPKVFLNQDNKYIFVFTAERLILYFTDKNNPQIDYLFVDEAHKLLSKKDTRTPLLYHALVLAKRKSVNIYFASPNIPNADVFLEMINNSTDESMSIIESPVTQNRFFIDTIENKSFMISDYGDDIVFPKFDFKENDIIGNLQLVLESFSEDRQSIIYCNTVDKTIQTAINFANRCSKIDSEEIDEVIKLIDERIHHQYYLKKCLNKGIAYHFGGIPEEIKLRIENLYKQGLIKFLFCTSTLLEGVNLPAKNIFILSEKIGDGKMSDIDFWNLAGRAGRLRKDISGNIFCVNLYNQSGYWKDSKNASILRTKEICEIKPQILSRQNDNLYKNISNYFEQKGYSNKNLSSEKKKTIEMYGNILLFHDSINNDSILKDRFVDSDKNSVSLLKKTRNSLKVAPEILATSIDINIANQNKIAISDVPNLPTSTKREDCLKVLTILYEQYKWTETESGGRNPMIRHKNQLKYYATLMESWINTKPLKVLIQRTIDYFYNDGDERNLYIRQEGKLKPVKFDKENEFHINKLINDVVSDIENILRFKIKNYVSNYQALLKNKENLNVNVADWESYIEYGTTDNKAIEIQNLGFPRNIAIFLRDKYLDAFEKNNMGIICDVDEINLKNNIDRDKYKFEYEELALFMNWETEKEAK

SEQ ID NO: 55814 - protein, 306 aa, Dermabacter hominis 1368
MTQATITPTLRGDTFASTFTEVAHSNTLGLRNDEQLRLFHLSIQNNRFDHTALVKFLKRNVGRYVFSRAEYEGYKQRDDLEEVALDAVNRMRSQQDGMGLGEILLYVLLEQILEAPKVLSKIELNQARGQIHSRCDAIHLLTPDGQRTTSSIVFGTSSVVGNIGDAITAAFDRVVDIEQNRSDEVQLAEQTVFTKTLEPATANYVKDLLIPKPGGAPEFDTAYSMFLGYDIGLDPKNYGNQQYRSALDQKMQGDIAAHAQMIANEINTRNLDNYSFYIYVLPLNEVDVDADAIMDGLVGGPGGSHV

SEQ ID NO: 55815 - protein, 880 aa, Dermabacter hominis 1368
MSDKKLTVGELVFSDIDSNEFLKQLYANLLYNYGLHRLGLADRHPYDVDLEAALRFADLLSKSIHPTNRDRHRVWAQEIALLCHILYPNDPRTKVYVPAIFTTLGNYPGLKQLGVTSDMGILDAAFNAYQAEYLTVPGDKTMKFFAPQKKIYDRLTDGKFSFSAPTSLGKSFIMRTFITNQIKSGVTANFAIIVPSKALINETRSKLIADLGEDLERHNYRIVSAAGDIVLEGDHNFIFVLTPERLLYLLIGKPAIEFEYVFFDESHKLSCKNSRAPFYYQTVTILQHRHRPPHFVFASPNIPNPEVFLRLVDPNSDENETNAVATQYSPVAQFKYLVNLHENTISSYNDHTQEFTHLASLQAQDATAQGITRFVSESSRGSDHRGQTIVFHAARHHAVQAARAYAQGMADLNDKDLDALAKDIERDVHEDYYLSGLIRRGVSYHIGYLPPAIRERIEGLFREGKISTLFCTSTLLEGVNLPADNLVITTNKIGRAGMTAVDFKNLIGRVGRIEFNLYGNVFIIVGDQLASERQAKELLQANVPAQKLSVQTDSQIISKKMKQGVVADLQEGQIEFAKGDESYERYNMKRKFGLMLLRDITTGRQSLVREEFSDYLDDQTVSQIRESFAHREGQQDDDINVSVDQAESLTQAVRAGLKYPHISPDGKFNYDETLAFLQRLASIFKWRVYDPETLGKTDKYSNQLTMLRWYTVLLTQWMEGHGLRSIMNRALQYRLQQGTLYIKGQGEIRYENTLQHRNIVISEILKVLEDVILFSLSNYFLKFSNEYKKVHGVEQFDNDWYEYIEYGTTKQETILLQRLGFTRESATYIRTNVSNAIFLHEEKPYLNPILLESSNINVRKEANEIRYNVPEAFSMPDFMF

SEQ ID NO: 55816 - protein, 300 aa, Porphyromonas cangingivalis
MLLRRDVQCNFLNLFSKIIENEPCENGNKLNLFALKITNNCFSYETLTEELGNILTTYALSRSTYDELCAQKKYTSLVTKAKEKLRKAESNDGELGELLLYCMLESHLNAPKLLTKLELKTAVNNYVNGADGVHLLKIDDSTYQFVFGESKLNSDLQTGIYEAFKSINTLLKDDLNKLRYEISLVNSNILKETATEESSTILKKLLIPTENDEDLNIDHSFGIFLGFDIPISDTERKMKNSDFRTLMNNKIEKAVREVLTTLNNQIKKSEFTGYSFYIYIMPFSELDSTRKKIIENLKTM

SEQ ID NO: 55817 - protein, 849 aa, Porphyromonas cangingivalis
MALADEIALEILSSPYFLKLFKVCIERSIYHTLSIDNQNSYSEKEFRDLLRFADLLSVSSIAEARNYAYRIITYLNPYFQKDEYYCTVSKAVYYNLGNFPAVAYLEKENNNQSELPFDRLVELEAKKLIQEVPESEGEFFTDTQYKLFSELSSAREFSFSGPTSMGKSFIIKAFIRKVIQNKPPENLVVLVPTRALINQFALELKRNLGTLLEQYKYRIVTNSNISEFSAAETINYILVLTPERLISYISQYNPPIGFLFVDEAHKIAQNDDSRSITTYTSIEKTLKKHPNIKLYFSSPNVSNPEVFLKIFRDTQGKNHFKTEETPVAQNLYFADLDNGEFSYFHKNEFVKIESPLPKNAKTINDILEHLGKRSNLVYCNTRLRTIKYAKSYADTINLGKENKTLNKASRIIREYIHPDYYLAEIIKKGVAYHFGNMPQLIRNLVEDLYQKGDIRFMFCTSTLLEGVNMPTQNLFILNNKKSTKTLKPIDFWNLAGRAGRLSKELQGNVFCVRHSDCPWKDTSFFNKREIELVPSVFSRINHNLRKIETLINGGEVKSGSEEEINILRYIANIICVDTLEIKTGYQSPIIDELIRKKKSNIIELAKSKASKLETPYSILNSNESIGLDSQDAAYKRLKYLHAQRTPITLPRQVNYKSCKNVLLSLHELYNWEQTNKYLSNKNSLKYYATLMNKWINNESLNQIISDLVDYYSKNRNTLKVSYNEYEAFDKSNKTHVNILIGNIINDIEHILRFQFERYFNHYYLMLQNLLGEENAGENWATLLEYGTQSRIMIALQNMGLSRLTASKINKECKDALTIEEGKLKSVNKAFLLAEFTPGTLEHEEVKNLL

SEQ ID NO: 55818 - protein, 275 aa, Stenotrophomonas maltophilia AU12-09
MLELVLHEIGSDRSISGLCAGYEGKQWRHSALVDYLMESLPDFCLTYSEYSQIGHESAVRMIRKAAKSVYSTGKFKNRGEFGELLLHVILKTTMGTLPAVSKIYYKDSANDTVKGFDAVHVVPSETGLELWLGEVKFYEEIGSAIRDVVKELEQHLTADYLRSEFVAILNKVDKDWPHGRQLLALLDERTSLDQVFEAFCIPVLLTYDGQTTAEHDASSEAYKRALVSEMRFIKERFDRRVASLPHRIHLFLVPLKTKKILVEALHQKLEAMKAL

SEQ ID NO: 55819 - protein, 714 aa, Stenotrophomonas maltophilia AU12-09
MTSDVFQFSDPASILADPFRATQHLASLVSRAELNKFDDTAVQEAVLYALENKASFGPCSVIVESLARARGLFPYIANDELSVREELALEAHRPTGMEDVVLHRKQAEVYQRLVAGQSIVLSAPTSFGKSLLIDALIASGRYGNVAVVVPTIALIDETRRRLAERFGDTFKLITHPTQEVSSKNIFVMTQERVLDVDTLPSIDLFVIDEFYKLDPKQDADRALLLNQALHRLLKTGAQFYMLGPSIKEISAQLSSLTGSIFVDTDYATVVTEQINVSPKDGDNMKALVELCRGLHESTLIYCASPASARRVATALAAAGLGTREPKLKGAYDWLAKNYHPDWTVARGFLTGIGVHHGKVPRAIAQYAVRQFNHGRLPYLVCTSTLIEGVNTKAKNVVIFDNKVALKKFDFFTFNNIRGRSGRMLRHFVGRVYLFNAAPQADLPLVDIPLVNQDDRTPDSLLIQLDQEFLTPESQARMTALQKSSLLPIEVLRGNSGVDPGAQNALAKHLWAAGSEGLGMLLWQGFPDYEQLKYACELIWKFLIGKKRIGGTVLSGSQLAWKISRLASAKSVKQLIDLELADQDSSEADRIVEEVLDFVRTWAGFHFPRYLMVLDRIQRAVYMSRNGEAGDYSVYAAKIETLFTTSGLIALDEYGIPIQIAEKLRPYFAQHDTVDEAVGQLRQLDIARVASLTEFERELVQEAQTGLGTRAVPVA

SEQ ID NO: 55820 - protein, 319 aa, Stenotrophomonas maltophilia
MSNITAADLEAALTGNPEALDVHLALVSRDVSIDGHLVKIHCHCLTLDGNGRVQPRRLAEFMRNAVVDYAIPRSQLLEAKARDQKFNSSEAVTELVERAKRSFTDLATSGEGGEMLLFLLAERFLKLPQILCKMDLKTDTRMHYHGADGVYAGVTDDGLLKLYWGESKVYGDASAAVRECLRSLSPFLTEPDHEDAERERDLLLLSDKADLSDRRLTEAIKKYFDKSSVMSKRVQYCGVALVGFDAPFYPGENAKGIAEDILEASRAALVGWADRIGERLIVEKLDQVEIELLCVPLPSADGFRAAFLKAMGIANNESC

SEQ ID NO: 55821 - protein, 863 aa, Stenotrophomonas maltophilia
MSLAELQSWLLENGIRDDLNKLTRLTVRNELDNLAPEESSDSAESIDWARLLLAGSILARSNEKGDQDAALRIATGAVLLAKGQALKDAGGVLMSKLSNFRAISLACVRKLVSADLDSRLGTALRLESHRREMDRSILVQASGTWLQVNDFQKMFWANARREGWLSASAPTASGKTFLVLQWLIDQVKTGGNQVAVYLAPTRALVSEIEKNLRDSLDHSELIEVSSLPLPEKYRVARAGGARVILVFTQERLHLLANVLGDELLIDLLIVDEAHKIGDNQRGVILQDAVERVTRANPQLKVVFISPATQNPEALLADAPSGVQTIAVDSDSSTVLQNLVVASQVSRRPKLWELKLRQQGGELPIGTLQLASTPVGIKKRLAFIAAAVGERGGTLVYSNGAGEAEEVADLISQLLPKLDVVDPELSQLAELARKGVHSDFLLAPLVELGVAFHYGNMPSLLRLEIERLFRLGKIRFLVCTSTLIEGVNLSCRTIVVRGPRKGKGHPMEPHDFWNLAGRAGRWGDEFQGNIICIDPADETAWPGGVPGRARYPIKRESDAVVEQGDCVTEYLSSRGAVDQASIEGSDKFEQVGAYLLTTFMRLGSISKAGLAKRHDPALIAKLDYALGTLADGIEITVDLASRHPGVSAIGLQRLLEMFRSYAGDVENLLPAEVASDDSYDRFITIMERVNSHVFRAFSPDARIRLFALIVVKWLKGYSLSRIIRDSVEWHQKAKRPYKLPILIRDTMELVEQIARFRAPKYLSAYMDVLHLHLREIDREDLIEDGLDIGTQLEFGVSSATLLSLMELGLSRMSAVALYERIARDDLSREECVAWIIDRNSQLQSMEIPGLIIREVRECLALSSS

SEQ ID NO: 55822 - protein, 297 aa, Pseudoalteromonas luteoviolacea B = ATCC 29581
MDKRLEPQLKNCDEVKAILKRVDVPFTLDDGRQVDTLLMYVSPDGTPDPLTQFFATIKNGILTNFVLRCSEIEKKLGLKKEGAAEKLFEKSIRKLSQHTAKGELGELIMFTLLDVYLEAPKLLSKMSFKTSRRMPVFSADGVHGQFYDGKFKLFLGESKLYKDFKSGATEAATSIKKAADKYQEEFDLIESFIDFPNLDEEQEDILLDILNPLSNPDFEDVLYNSCFIGFTKPELVGCVPNEFEAAYLKIAGEYIGDFYRKLEGKMLPVNKTVLMILPFKCVDDLVTQFIKYMDIKE

SEQ ID NO: 55823 - protein, 835 aa, Pseudoalteromonas luteoviolacea B = ATCC 29581
MSQFITKLSTRALASEDYKQATNELFRSYVFKMVGQEAKLSRNHVKQLVSIAQYFYRVNDNKFRKEGAALLSMLIDVCGDLYPEIIAIAKKVFSNAGDFPNIKLIDKNYPSLNFKYNFYSEAEMDFRQELNTVEDLNFPLTDFQRSLWENLIADEDVITVAPTSAGKTHIILSYLVRRIMDSDGAFAAIIVPTRALISEVANKLYEIAKEHNFDQQIEICTVPKDNTYADKTFFVMTQERLFDALQAGDLTFNYLFIDEAHNITDESRGVLLHLTIDKLLETSGYPQVIISMPSASYQDSFSTVFEGVKFTKEITSVSPVAKILMEVKPAGRNLTIQRLNTEDKIEIPKGFKGKHLSDIAIKLGQGHSNIIYRNQTDHCEDIARNIADKIEFFDTTEELEEAADYVEEFIHDRFTLASNLRKGVAFHYGPLPSSLRVMIENLVKEEQIKFVACTSTLAEGVNLPAKNLFLYKPMQSAGMGAPERLDDVKINNITGRAGRMLEHFAGNVFIVEPEEWQVQDYFEEVDIDEQKIPTFFKALNEELAHVYLALEGQYAHDAENQYKFYTIANKLIKELAEGNIDRTLKAQELELDPDDLNSLYTAVENAYKSLLVAPFTLEASPTIGYIQQNKLFKFLNDTPDLNDWVLPHPKSKDLYKVLVKVCEKLTEFGVFTPTGDYLMTYMGVIAAKWVQGESLKDIITEQLEWMENHKKKETDLVNPNKAVRDVIKVINNDIRFRMANALRCYQVLLSNVIKLKKLDLASIKLHTYIEIGASDERMIDLINIGLSREAAKEVNDKLSANVEVESLHGLLELLEKNMLDSLHPITRKEILSMSK

SEQ ID NO: 55824 - protein, 297 aa, Pseudoalteromonas tetraodonis
MGCTLQTQLENAHQIKDVLKKVHTTFKLHDGRKVETLLVYLPCIEDSKTLHDTLFECVRDGILQNFVFSYHEIQKKLGKTSDTAMEDLFDKAVKKLSRHTAKGELGELILFTLLDVYIQAPKLLSKISMKTNPRMPVFGADAVHGQFLDGEFRVYLGESKLHKNFKSAATDATSSIVSAKSKFEDEFLLLDSYLDFPNLTDELEERILEYLDPYNSSLSNRIHSPCFIGFTQPEILFVDEASLLEHYTKLSCQYVGDFFNKAESKSLDIEEVTLLMLPFGCVDELVSEFISYMGIKK

SEQ ID NO: 55825 - protein, 831 aa, Pseudoalteromonas tetraodonis
MSTIAAKLGKKIFSNSDFTKDRNDIFEQYVEQLIGNKPLLERSLVKRVSTTIQVFHKSEDEKLRKEASALLAILLDIVGDDYLDLIPIAKNIFINSGDFPNVSLLDKRHPNVSINYGFNNSTKFELKKEMNSVDELSFPLTDFQRMLWSNLKLDKDVVTIAPTSAGKTHIILSYLVNKVIKSDGSFAAIIVPTRALISEVSSKVFEIAKEVDSENELEICSVPRDEKFNSKTIFVMTQERLYELIQRGDLRFDYLFIDEAHNISDDSRGVLLHLTLDKICDESDPQIIISMPSESYQNAFSAVFNGVEFKKEITRHSPVAKILLSVVMKGRNIEIERYNTSDKAVIPKGFTGTTTADLVYRLGKGQSNIIYRNQTDHCENTARAIAALIDDFDITPELEEAADYIEQFIHKGFTLASSLRKGVAFHYGPLPSSVRVMVENLVKTGDINFIACTSTLAEGVNLPAKNLFLTNPFRPVMAQKPERLEDVKISNITGRAGRMVEHFSGNVFLINHDKWNYQDYFDEKEEKEEKIPTYYKSLNEDLASVVQALQGLYPYSEPDQYRFYTIANKLIKEFENGSLDDRLLAEELTLGEEGKELLLWHIEDARNSLMIAPFILEANPTIGYIQQNRLSQFFDSLESYEEWVLPHPKSKDLYNSLVKITSKLFEVGVYVSSDSYSIEHVAVIASKWVSGKSLKEIIAEQIVWDKSRPTSSSVNQSVRNVIKVINNDITFRLKNALGCYYILLTNTMKLKGVDKTSVKLHTYLELGACDDRMINLINLGLSRESAKEIQESIPISIEIKSIYDLLVLLERGLLSNTHPVTLKEVRFLLSK

SEQ ID NO: 55826 - protein, 314 aa, Pseudoalteromonas piscicida
MEKLKDINWKGLVDGKHSWMEEHLRAHPVKREGKTVTRFYSVDFSGTQQELLALVESMADSISHYVYDEKQLEEMKKRNIEPFRKASGFFGNTNPDMDGKYGELLLYILTEAVLRTPLVSHKLSLLTNTNDQIKGGDGIFFGEYDDELSILIGESKIHKSYSGAAKDALSSLDRFHDNYSSSTLGHELFIARSNISNNFSFDEMEALYNTFTPGSKEYKSCIKTHPVLLVFESDKIKTIEKTAKNKKEAEELFDIWIQKRTGKLHENLKEYLEEYPKLKAVYIDVFLLPLNDVSTFKNSLYKAIHGVDYSPKNK

SEQ ID NO: 55827 - protein, 866 aa, Pseudoalteromonas piscicida
MENSKKAASHIDFVSVLDKLLESQFLLDKSYDGEKIVITDSEIKRATWLASIAALGDGDQEKNLANAFGALLYLSDPDNEVYSRACYILQSRSGNLITSAHIPKIFSKETNAHLGDYGTLLNFELAANRAILQHTFSDETEIFFTKFQKSLWESLTDRKNIAISAPTSAGKSHIIKKYIYELVSKGSRTIFFIVPTKALINQVSNNLKFDLKDKAHVLTTYISTNFIDKKSIIYVLTPERCLKFLQDTKAVKKPDLVFVDEVHNVEDSSRGAKFENVIYRLINKFPLTQFVMAGPFIDNLSESLKKICNIDLVDHKTLSTPVFQIKAALTFYPKDKSAKYKIASPSGNVLSGTIKLKRTLYSKVKSNKGDALEVIADLFPHDDNNIYYAPKKSSAEKWASKIAPMIASKNPNIVDGADERIKDLISFLEEEVHPNYSLIRNLRLGVAYHHAGLPDIARQEVEELYINSSIRNIVCTSTLLQGVNLPADRLIVISPKVNNNDMTDFSFLNLIGRAGRANTKLFGEIYCIDVKEDEWAEDKLTKEKSKTVESSTSLFLRKNESELAKMASLSRAEIKDLTDDVNVYESISYMRSIYHTDIEHFKRMLGSSGISSSSVQAFSDELERIYDDMVIPVELLSKNPFIDPFLQNKLFLDIKKSGVFDWMITRFPVSKDGIDDSSVHISEQSYYQQFKTIFSKLDQIFEIESEVNGVNFNGNYVSINKLVMDSHHWMKGKKHRFFIDREIGGEVNDEKVIDKAARHITGHISKNITFIGVKYLMLWSDMVSYFLNEEELEKYSYILNLPSMLEMGSYDPTTLELMSYGINRSVALEISKKIKRMDIPVEQALSKINKSELSGLFNRHLVKAGY

SEQ ID NO: 55828 - protein, 296 aa, Paenibacillus durus ATCC 35681
MDENFLDLFYHEIQSFELDRYNTKINLHTLKIENNIFVYSELVEKLFDCIVTYCLSRKELEIYKNNKGIYVKAIQRLRKWENNDGELGEVLLYCFLESHLRAPKIFTKMELKTSPNDYVKASDGVHVLQVDKNNFQLIFGESKLEKTFQRSLYDAFNSINDFINRSTNNIHDEIRLLNTHLEKESISPALYNVLKKIIMPSAREDEIFKDNAFGIFAGFEITVDDDSRKLSNSEFRKMIRTKIKLEVESQYSYIQKKIDEHKLYGTTFYVYAFPFVEISNTRKRIIKNLMEATNDF

SEQ ID NO: 55829 - protein, 855 aa, Paenibacillus durus ATCC 35681
MIFDKLSRDVMIDDYFNQLYERLLKNIASKELVVDSPVTISEKELVHLLRFSDILSNSTLNDCRNMAYRIVAFLSPVYKGNPIFKTYSTAILSRLGNFPAINNLNHNVELPFVREIESVVKKAIQKIPGAENKYFTDSQFDLFEKIKESNFYSFSGPTSMGKSFIIKTFIRDKISKKDAGNFVIIVPTRALINQFSYEIKEDLKELIINNNYKVTTNSIVTIEEENAEKKYIFVLTPERLLSYISSKENPKIHYLFVDEAHKLAAEKDYRSITMYLAIEKSMKKFSDLKIYFASPNVSNPETFLELFQKSATKTFTTIESPVTQNVFFIDLISRIVSYYNEGRKYDFEDVSISKYSSSFELIHNIGQSSSNVIYCNSVENTINKAKEFLKFLPNKLVETPNPSQYELDELILETKKMIHRDYYLADCLAHGVAFHFGSLPQVIRNKVEKLFKEGKIKYLFCTSTLLEGVNLPAKNIFILSNKKHKSNMSKIDFWNLAGRAGRLNYELFGNVFCIREETKDWKNTTVLTGKSTTQLQINATHQIDKNEKNIEQLLQAKQITSSEAEKEVLKYIANIISIDAIDSGNDYKSPIIKKLINDGKLDLLLKAQDNIKDLKIPVDVLNNNQSIMVRQQNNVFEFILENQAFEEIIKLPHEINYNNCVTALELLHEKYNWNVNESKNDIANKNSLRYYGLLVNQWVNGQSLSEMINEALRFYEKNNKKLMFYENNIQVFEVFNKSKRHINKVINNLISDIENVVRYKLEKYFNNYHAILVSILGEKKAGPNWNVFLEYGTRDTVAVYLQNMGFSRHVSALLTKEHRDLLNIKDGKLISINKKKLVNRLVQGTPEYDEISMLI

SEQ ID NO: 55830 - protein, 307 aa, Sulfurospirillum barnesii SES-3
MSTIFNSDKVLCNHISEVDLCTYFIGTDFDDSGNEFVRCNDLIKILQEVLLEFAFGINEASKISHTQIISKLSDAAKSIYKIKDFETVRQLYEEGKDIDSIKSTKKYLSRGEFGELILHMLLRDFHNTIPLLSKIYFKDSYSFTVHGFDAVHIEPETQSLWLGESKLYTDGKAGIKELINDILEHLKKDYLNDEFNIISKKIKPYDDIPEKKYWLNLMNENTSLKDILTSVTIPLLCVYTSDTYNQKDFLKEYEKEMRTLKQYFDDNNSHPLKTKLNIILILFPVKNKNELVKNLHRRLHTLQGLSS

SEQ ID NO: 55831 - protein, 732 aa, Sulfurospirillum barnesii SES-3
MNESKYIEKIINEKQLSFDECFELSKVCMRYLASETEQYIGRKIIIYVLEYWGKIHISTYEVWADILETAGFYPYLEKFKDKIFLTQTAGQIRKEFHLSNHLNYYFHEEQKIVNDMLNSEKNLIVSAPTSFGKSLLIEEIVASKKYKNIVIIQPTLALLDETRKKLRKYSNQYKIVIKTSQKPDLDKGNIFLLTAERVIEYNYFTDIDFFIIDEFYKLSQKRDDERFDKLNIAFYELYNKYNAKFYMLGPNIDGISEGFEEHYNEKFYPTNFSLVEQQTNDDYIGIVKQEKEIALFNLLFSLKSEQNLIYCSSPKMVRELSNRFLQFLIEQKFQKNIDLPIIQWLELYMHNQWSLIECLKYKIGIHDGALQKHITSSIIEYFNESKINFLFCTSTIIEGVNTNTKNIIVFSNKKGPHKIDYFDYKNIKGRAGRMMEHLIGKIYNFYLPPLEETFIVDMPFFEQNEPKKIPEILINLDSNDILNHESETYLKIQSINEKEREIIRKNRVSVFGQKRILEQLKKDIHTKYELIFWTKPTYPKLEYVFSLCWDTLKKPKESMSIKTYGHLSYKILNYLNHKNMKDFIEDTIEDYKKNRTEQKQTWQKEYKLLTDAQIHEKAILDCLQIYKHWITYKAPKWLQVVNELQKYVCEINGVKPGNYLGLATILENDFLNENLTILLEYGIPSSAINKIKQKISKDIDENNILNEISTKKLYNEPSLLAYERNLILNNVN

SEQ ID NO: 55832 - protein, 304 aa, Parabacteroides merdae ATCC 43184
MAMRVSLKELIQSSIVLQYHLPHDIADKHISCSCISTEKDYCLHQNGTNIDIANIIYNGIVEYAYSDNEIDLTQLDKLQIRALLSKLKFDPSASESIQLGYGFQGEVMLHLLLSHFFHAEKALARGYLYSALENAETKGYDSYLMVEDNQTIFLLFGEAKFYLDGYKKSLDSIFDNINKTLSDSYFNRNFIAMENHYEHIEPKSRIRQIIDQWRADPLINMAKEASRHNMHLVYPMLVIFDDKMTVYDDLIMGIISYIQTKYSAVQPTLTIPYTIFFLFFHVDNSRIIKTQVLQWINQKQQLMP

SEQ ID NO: 55833 - protein, 744 aa, Parabacteroides merdae ATCC 43184
MIKAVCSFFDIMKGKELSQADRLFLHYLANQAGLPQYYYPMLNVGEYVDEEVTLQTFSNYINESSLIVGEGVMLHRYQKELLERFKRGQRNRIFLSASTSFGKTFLIYEIVRKMEYTNVAFIFPTLSLLSENLFKIHLSPEYKWVKDNYVIHTLSDKEEISGRNLFIFTPERFLSFLDKNKEIQLDFVFVDEIYKLDNGFIIDEVSQENERDVAYRIALHELLKTPHVDSLLTGPYIALPTKDKKDAQFSFKTFLDYYDFAIVNYNHYEIVNKVEVFAETASTIEIDNTFHLTFTNKTKSARIVQLVTQLLNRGENAIVYCSTKASTEKYAKILISKNNYIKDVDSEKVIRLTNHIDSLFANGRGAQWIVSKALKKGIGIHHGSVPKYIQQEIISLFNQNILKILICTTTITEGVNTTAKNVIVLSGKKGTKDLKKFDAQNIEGRAGRFMQHYQGRVFILDKNFADRMNEEDELLQHKFFDKNIDKKDVDIVLSDSNYLTIEQENRKKQLEAIKESGIMPKACFEEFRTISYDDKIYLYNTIARFSTTDHEKITELIRRYVGQRKSYLPGLELICQTIRPIIKNDNLRFYVENGNDQSGNCYLVGMISAFISKGFSGSVNYHIRKEGDVDKGVRKAANFVFNMLRYQVVKYFGLFNLLYKQFESTRKGVNVDEVNGIEALLLRLEYSADTRLGRQVSDIGASFNVVKYYDVKENNPDDRELIGKYYNQLDDYEKYNVARIDQIL

SEQ ID NO: 55834 - protein, 304 aa, Parabacteroides merdae CL09T00C40; identical to SEQ ID NO: 55832

SEQ ID NO: 55835 - protein, 770 aa, Parabacteroides merdae CL09T00C40
MDKSKAAADAVKLINQAKEDSNLQPLMIKAVCSFFDIMKGKELSQADRLFLHYLANQAGLPQYYYPMLNVGEYVDEEVTLQTFSNYINESSLIVGEGVMLHRYQKELLERFKRGQRNRIFLSASTSFGKTFLIYEIVRKMEYTNVAFIFPTLSLLSENLFKIHLSPEYKWVKDNYVIHTLSDKEEISGRNLFIFTPERFLSFLDKNKEIQLDFVFVDEIYKLDNGFIIDEVSQENERDVAYRIALHELLKTPHVDSLLTGPYIALPTKDKKDAQFSFKTFLDYYDFAIVNYNHYEIVNKVEVFAETASTIEIDNTFHLTFTNKTKSARIVQLVTQLLNRGENAIVYCSTKASTEKYAKILISKNNYIKDVDSEKVIRLTNHIDSLFANGRGAQWIVSKALKKGIGIHHGSVPKYIQQEIISLFNQNILKILICTTTITEGVNTTAKNVIVLSGKKGTKDLKKFDAQNIEGRAGRFMQHYQGRVFILDKNFADRMNEEDELLQHKFFDKNIDKKDVDIVLSDSNYLTIEQENRKKQLEAIKESGIMPKACFEEFRTISYDDKIYLYNTIARFSTTDHEKITELIRRYVGQRKSYLPGLELICQTIRPIIKNDNLRFYVENGNDQSGNCYLVGMISAFISKGFSGSVNYHIRKEGDVDKGVRKAANFVFNMLRYQVVKYFGLFNLLYKQFESTRKGVNVDEVNGIEALLLRLEYSADTRLGRQVSDIGASFNVVKYYDVKENNPDDRELIGKYYNQLDDYEKYNVARIDQIL

SEQ ID NO: 55836 - protein, 539 aa, Pseudomonas amygdali pv. mori str. 301020
MDSSNAGGVAAKLGFLYQDCAAALFVTQMLLNKKIQAVRCEVTDDIDILYDTHTEFVQVKTSDKPRWSVSTVTSRTRGADKKLIANSSIVHKSMQCAFTPIEKCKFRILSPRDCKAPLDYLEIELSKRDGKPGRQSLIDELDVKLRKYVAPAGNSISDWVDSCSWEVIPSLRQVELTGLSNIRNAALNLYGVILSSDSMVESIWVNILVAMTKRSALDRRVYVEDDKTYHRDNFLAWFKAEVLFYDRGNSHCKVYVHRKLPDILIQLQAPFLSPIPTRNGLALHQRYQMGQYRYEHIAKNICCWFDELLLRPGEIADFISSTATEKYKLLRSRLADNARDLERFLGNALLHSVMRLRHNSQPIPATLYLDSKDEMRVFENVHIVPRAKGGDELWLGISKLTKAKTLSQVLNDLRDTLYNDIVSGLDGVREKVLDVKEDSYLLNHDIHDILDTSNSFEDHLKRLRFVIFFVYESSFLTIPETKGHEANLYQEAYDLFVDFISDITKSPEYSQFNFELYLYPAPSFDDLCGLVEKKMRDDM

SEQ ID NO: 55837 - protein, 691 aa, Pseudomonas amygdali pv. mori str. 301020
MNRIYDTARLLLETEGTSAFSYLHAADKLLSNPVSLHMGRDLVIRALDARLKFTSYTPLLRNLVRKSGLYPYLKKEFQEVTVSEKAALGIYQTPFSDEIVFHSMQFQIFELLRSGRNVVLSAPTSMGKSAIVDSIIGLGIVSRVVLVVLTIALADETRRRLQERFGEFYQIIHHSSQEANGDKVIYVLTQERVNERQDIVGIDFFVIDEFYKLAFQQRASGKIDYENERVIELNIALSKLLKASKQFYMTGPFINSVTGLASLGLEYTFISSDFNTVALDVESFDLSPNDEEGKEEAVLSIADLCRGEATIIYCKSSAVAGGVARSLAKHGFGAEFHSPHLDWVAQEYDSDWDYCVALRSGIGLHFGGGPRALQQYTIDLFNRGKINYLICTSTIIEGVNTIAKNVVIHDNRDGNFSIDKFTHGNIKGRAGRMGVHFVGKVYCLESIPQDSFNQEVDIPLGIQDDTTPMNLLVGVQPEHLSDYSQSRFERDENIDEFGVDLLKRHSSFTLEAFRELYSYVEMLFEESFQSTIFHWMPSGEFLNVLAEALTRFQSGALRRVRIPTKNSSVIHEKLTSYLYTPQYAEYFKSQIVQSKARLEKGEVDNLSTCINDDLKVVVNILGHTVPKLLGILEEVVKLHAKRRNINAKIDYSKLRGVFEHYHLPSGLAGLEEMGVPVQTLQRLNTLMDVPH

SEQ ID NO: 55838 - protein, 538 aa, Pseudomonas amygdali pv. lachrymans str. M302278
MVSIPSPSNKGGPAARQGFKYQDHVAVAFILKMLRDSTYLQVECETADDIVAVSENAGETVNEYIQVKTTENDKKWNLTECITLEKQKADSSLFQKSLKCDVRPGIACFRIVSKRDIAKALEYFAKELSRRVTPDLATQRGLTLAKQLKTVSARGRDFSYWADNFVWQVCGDVSSLEATNLRVLAEVIDLYGETPSHRQQKDIYDAFLAWADYAATADVKTVPEKKIISRMAALSRLKALLGAAAQHSAAFAKPYKTKPDPFLVEFHTTTEDGLLRTLSGFDVDYDFEEWRSQQLAEHLLQWLPEFCLRASEIANFQIHHTPTALARSINTLTQAAVPRDRLIAELILHAILRSREHSEPIACKVFYAVNGKLSEFGNAHIVQKPGEADQLWLGLSRMISTGTMDQTLKEICDVLDATISRAALTEEREIIITLREPHHHLPTAEAFNKALHRNAPAQEMLSVLCFPILLAYDSDALSGGYLSDYLANLKTEVTQHYNALACTLPSKIKQVRVVVFLVPIESIHQLVQKFNALCKAAS

SEQ ID NO: 55839 - protein, 723 aa, Pseudomonas amygdali pv. lachrymans str. M302278
MRSARLLADMKYDLIKQQLENLYDLNSDKTGLLMGMSLIVNKGHPEWEGRDLVIRSLDKFELFDEVEQSLLLSLVRTVGLFPYITPHVESVSFPDRLAYEVHRVEGIEKGMVFHRLQAHVFHLLMQGRNVVLSASTSVGKSLVIDAVLAQGKFRKVVVIVPTIALIDETRRRLVRRFRQQCNIITHPSQVATDAPINVYLLTQERVLQRDDLGDVDFFVIDEFYKLDLASDSDEKNRSIDLSLAFHKLAKLNAQFYLLGPHIQNIQGLDGYEYNFIPSNFSTVAVDVTHYNLRTRGDTRKDKLLELCSQINSPTLIYCQSPASANRVAQYLIDEGDFSALDGTREISEWIADNYHPAWNVAKAISLGIGIHHGGVPRAIQQYFVKLFNERTIRYIICTSTMIEGVNTSAENVIIYDRRINNSPFDFFTFKNISGRAGRMNQYFIGKVHMLEEPPEEKSLIVEYPIGLQDGASPMGLLMKLDPEYLTDQSRQRLEAAYATPQLSVATLIENRHIPVERQVELADRILRELALGRVWLTWKGNPEQKQLEYLCTLIYEHLPHRLPEYGIHSGLQLAWHINALRAQKDFKAYLQQAINEDGSDRTPSESIGQRLKLIRNVISYRLPRDIMALSKIQADVLTRTGIEPGDFGFFAEQLENLFHDPLLTALDEYGVPTQISSKFKGAILPSENLTQLLDKLRAWAPRIESAPLTHFEKSIVRWAVDEI

SEQ ID NO: 55840 - protein, 543 aa, Pseudomonas amygdali pv. tabaci str. 6605
MMRINSPSNKGGPAARQGFKYQDHVAVSFIFKMLRDSNYIQVECETADDIVVVFQCGGQLVNEYIQVKTTEGDHKWNMDEVTELDGTKANSSLLHKSLKCDVRPGLARFRIVTKRDVAKILDGFKTELDKRVLPDTTTARGKVLLRKFKTFISPQNRNFAYWAENSVWQVYGDVEALEAVNIKALSKLAEDFGNRPNNTQMQAIYDDFLEMADKAATANVKTAASTKIILREPALAHLKQLLESADDKSTATAKPYKKRPDPFLVEFHASTEEGLLHSFSGFDVRYALKAWRHDSFAKHLVEWLPEFSLKASEIVNILAHNAEAILARSINAFTDSELPRDRLIAELILHAILRSRQNSEPVACKVFYKSSGKLSEFGNAHIVQIPGQDDQLWLGLARLIQAGAMDATLAQICGVLDATISETVLSSEREIIINLREPLHHQPKADAFNQALHKNSPVDDMMNVLCFPILLTYDSHALSSGWLADYVNHLRKEIEAHFSTFTKQLPQNITQVKVMVFLVPMESIEKLINEFNTRCKTLGDLQA

SEQ ID NO: 55841 - protein, 713 aa, Pseudomonas amygdali pv. tabaci str. 6605
MNYETIKNSLANLSDEGASTVDVLLAINAIVNRSNAEWEGRDLVIRALDKFALFDVVEQSLLLNMVRAVGLFPYITPHLSNMALSDRLAYEAHRVEGVEPGMVFHHLQAHVFSLIMQGRNVVLSASTSVGKSLVIDAVLAQRRFKKVVVIVPTIALIDETRRRLVKRFRDFNLITHPSQESVPDVTNVYLLTQERVIQRPDLDDVEFFVLDEFYKIDLGGDKDKNTRAVDLSLAFHKLAKTGAQFYMLGPHIQKISGLDGYEYHFIPSDYSTVAVDIQNFNLGMRSEERTQKLLELVRTLESPTLIYCQAPASANRVAEYLIQDAGLTPVPETQEIAAWISKHYHPEWNVAKAIALGIGIHHGGVPRALQQYIVKLFNEGVIKRIICTSTMIEGVNTSAENVIIYDRRLKTSTFDYFTYKNISGRAGRMNKYFIGKVFMLEAPPIEQGLTVEYPIGHQDETSPIGLLMQLENEYLTDMSRGRLQEAYANPVLSPATLIENRHIPIERQVEVAKTIITDLPGSQELLGWKGIPEPNQLNYLCELVYSLEGKNLMDYLISSSSQLAWHINELRNQKNLPAYLSEAIENRWENVSASEAINLRLKFIRNMVCFRLPRDIMAIHKIQVDVLEREGYEPGDFSFFAEQLENMFLDPLLTALDEYGIPTQISTKIKHLILPSEHLNDLLAKLRLLVPRMERLQLTSFEKGLMQWAVAEM

SEQ ID NO: 55842 - protein, 538 aa, Pseudomonas amygdali pv. lachrymans
MEPNDSGGVAAKHGFIFQDCVAAYHVTRMLRDKTMRSVRCEVTDDIDIVSDDVIEFIQVKSTAKTRWDRSHIVVNSKGEGKKAIPESSILHKSMQCKPEPGFRQRFQIVTEEKVNKTLEYLTIRREDRAGKPGRDLLITYLTSKVGTYEAPSGLDLSGWIDAVQWEVFHSLREIELMGIKNIRKASQELRGQVLSSEAEAEDIWCRILDTVTRKGAQSRRVHTADNKSYLRADLISWFNVRVDEDQKRSGRKIYVKRSLPHILVPFRAPLASSCQKRHWRVLHQQYTLKKYRYQHIVENVCNWLDEVFLRPKELADIDKLGHVEMQQRLRAAVSKSLEDVNAFLGRVLLHATVRKMYDSQPIPCALYIDGLSFVKILENVHIVRRETDGDELWVGFSELVTASDIALRLPEIRDRLYQEIEDCFDSARGKILDIKDDDYLLRHDINDILDGSLSFDTHLQRFRFMLFIGYDSSLLTDPETPGHEDDLHQETSQLFEQFIADLQDESPFAELQIDVFVFPAPSLDRLTRMVEEKVREAV

SEQ ID NO: 55843 - protein, 728 aa, Pseudomonas amygdali pv. lachrymans
MTVDYEMAKSSLGHEGFSAFQYLAAINKLLSNPVSMDLGRELIVRALDAREKFSDHSVILKGMVRKSGLYPYLKSDFSDLTASDLVALSLYRTPFSDDFVFHSMQFQIFDLLKAGRSVVLSAPTSMGKSALVDSLLGLGAVKRVVLVVPTVALADETRRRLQRRFGDTYQIIHHSSQECRSERAVYVLTQERVNERQDIEAIDFFVIDEFYKLAFRELKSGGIDYTDERVVELNIALSKLLKVSKQFYLSGPFVNSVRGLTELGYPHTFISTDFNTVALDVQTLGVAADDKKGKLKALPSILEQCEGATIIYCKSSAVAGVVARELIRLGYGQVAQSPHLEWVAREFDSEWDYTVALKHGIGLHFGGLPRALQQYTADQFNAGKIRFLICTSTIIEGVNTVAKNVVIYDNRDGTRGIDKFTHGNIKGRAGRMGVHFVGKVFCLEAIPEDNLNLEVDIPLGVQGDDTPINLLASAQPDHLSEHSQDRFDEAFKQDRVSIDLVKKHSYFRMEQFETLYSFVEMLTSEDFATLTFHWTPAPDFLKTFAQVIVRLVPQTFSRNGVPTKPTDVMIAKLVSYFNAESYSHYLKGQIEYSKQRIRNGEKNTLSFMINNDLKLITNVFGYTLPKVLGLLEDVVRIHAAKRMVRSKIDYSHLRMIFENLHLPTGVNALEEMGIPIQTLHRMALIMDFPEEADVDGLADYLRANTGAWSNLGVVDRSFIVRALGLDSR

SEQ ID NO: 55844 - protein, 538 aa, Pseudomonas amygdali pv. lachrymans; identical to SEQ ID NO: 55838

SEQ ID NO: 55845 - protein, 331 aa, Pseudomonas amygdali pv. lachrymans
MKYDLIKQQLENLYDLNSDKTGLLMGMSLIVNKGHPEWEGRDLVIRSLDKFELFDEVEQSLLLSLVRTVGLFPYITPHVESVSFPDRLAYEVHRVEGIEKGMVFHRLQAHVFHLLMQGRNVVLSASTSVGKSLVIDAVLAQGKFRKVVVIVPTIALIDETRRRLVRRFRQQCNIITHPSQVATDAPINVYLLTQERVLQRDDLGDVDFFVIDEFYKLDLASDSDEKNRSIDLSLAFHKLAKLNAQFYLLGPHIQNIQGLDGYEYNFIPSNFSTVAVDVTHYNLRTRGDTRKDKLLELCSQINSPTLIYCQSPASANRVAQYLIDEGGLLCA

SEQ ID NO: 55846 - protein, 542 aa, Pseudomonas amygdali pv. lachrymans
MDVDVEPNDSGGVAAKHGFIFQDCVAAYHVTRMLRDKTMRSVRCEVTDDIDIVSDDVIEFIQVKSTAKTRWDRSHIVVNSKGEGKKAIPESSILHKSMQCKPEPGFRQRFQIVTEEKVNKTLEYLTIRREDRAGKPGRDLLITYLTSKVGTYEAPSGLDLSGWIDAVQWEVFHSLREIELMGIKNIRKASQELRGQVLSSEAEAEDIWCRILDTVTRKGAQSRRVHTADNKSYLRADLISWFNVRVDEDQKRSGRKIYVKRSLPHILVPFRAPLASSCQKRHWRVLHQQYTLKKYRYQHIVENVCNWLDEVFLRPKELADIDKLGHVEMQQRLRAAVSKSLEDVNAFLGRVLLHATVRKMYDSQPIPCALYIDGLSFVKILENVHIVRRETDGDELWVGFSELVTASDIALRLPEIRDRLYQEIEDCFDSARGKILDIKDDDYLLRHDINDILDGSLSFDTHLQRFRFMLFIGYDSSLLTDPETPGHEDDLHQETSQLFEQFIADLQDESPFAELQIDVFVFPAPSLDRLTRMVEEKVREAV

SEQ ID NO: 55847 - protein, 666 aa, Pseudomonas amygdali pv. lachrymans
MVRKSGLYPYLKSDFSDLTASDLVALSLYRTPFSDDFVFHSMQFQIFDLLKAGRSVVLSAPTSMGKSALVDSLLGLGAVKRVVLVVPTVALADETRRRLQRRFGDTYQIIHHSSQECRSERAVYVLTQERVNERQDIEAIDFFVIDEFYKLAFRELKSGGIDYTDERVVELNIALSKLLKVSKQFYLSGPFVNSVRGLTELGYPHTFISTDFNTVALDVQTLGVAADDKKGKLKALPSILEQCEGATIIYCKSSAVAGVVARELIRLGYGQVAQSPHLEWVAREFDSEWDYTVALKHGIGLHFGGLPRALQQYTADQFNAGKIRFLICTSTIIEGVNTVAKNVVIYDNRDGTRGIDKFTHGNIKGRAGRMGVHFVGKVFCLEAIPEDNLNLEVDIPLGVQGDDTPINLLASAQPDHLSEHSQDRFDEAFKQDRVSIDLVKKHSYFRMEQFETLYSFVEMLTSEDFATLTFHWTPAPDFLKTFAQVIVRLVPQTFSRNGVPTKPTDVMIAKLVSYFNAESYSHYLKGQIEYSKQRIRNGEKNTLSFMINNDLKLITNVFGYTLPKVLGLLEDVVRIHAAKRMVRSKIDYSHLRMIFENLHLPTGVNALEEMGIPIQTLHRMALIMDFPEEADVDGLADYLRANTGAWSNLGVVDRSFIVRALGLDSR

SEQ ID NO: 55848 - protein, 572 aa, Pseudomonas amygdali pv. lachrymans
MHELAVHGTTCLSWCACFGYQHVKRYRDVMMRINSPSNKGGPAARQGFKYQDHVAVSFIFKMLRDSNYIQVECETADDIVVVFQCGGQLVNEYIQVKTTEGDHKWNMDEVTELDGTKANSSLLHKSLKCDVRPGLARFRIVTKRDVAKILDGFKTELDKRVLPDTTTARGKVLLRKFKTFISPQNRNFAYWAENSVWQVYGDVEALEAVNIKALSKLAEDFGNRPNNTQMQAIYDDFLEMADKAATANVKTAASTKIILREPALAHLKQLLESADDKSTATAKPYKKRPDPFLVEFHASTEEGLLHSFSGFDVRYALKAWRHDSFAKHLVEWLPEFSLKASEIVNILAHNAEAILARSINAFTDSELPRDRLIAELILHAILRSRQNSEPVACKVFYKSSGKLSEFGNAHIVQIPGQDDQLWLGLARLIQAGAMDATLAQICGVLDATISETVLSSEREIIINLREPLHHQPKADAFNQALHKNSPVDDMMNVLCFPILLTYDSHALSSGWLADYVNHLRKEIEAHFSTFTKQLPQNITQVKVMVFLVPMESIEKLINEFNTRCKTLGDLQA

SEQ ID NO: 55849 - protein, 721 aa, Pseudomonas amygdali pv. lachrymans
MNSRNDAVMNYETIKNSLANLSDEGASTVDVLLAINAIVNRSNAEWEGRDLVIRALDKFALFDVVEQSLLLNMVRAVGLFPYITPHLSNMALSDRLAYEAHRVEGVEPGMVFHHLQAHVFSLIMQGRNVVLSASTSVGKSLVIDAVLAQRRFKKVVVIVPTIALIDETRRRLVKRFRDFNLITHPSQESVPDVTNVYLLTQERVIQRPDLDDVEFFVLDEFYKIDLGGDKDKNTRAVDLSLAFHKLAKTGAQFYMLGPHIQKISGLDGYEYHFIPSDYSTVAVDIQNFNLGMRSEERTQKLLELVRTLESPTLIYCQAPASANRVAEYLIQDAGLTPVPETQEIAAWISKHYHPEWNVAKAIALGIGIHHGGVPRALQQYIVKLFNEGVIKRIICTSTMIEGVNTSAENVIIYDRRLKTSTFDYFTYKNISGRAGRMNKYFIGKVFMLEAPPIEQGLTVEYPIGHQDETSPIGLLMQLENEYLTDMSRGRLQEAYANPVLSPATLIENRHIPIERQVEVAKTIITDLPGSQELLGWKGIPEPNQLNYLCELVYSLEGKNLMDYLISSSSQLAWHINELRNQKNLPAYLSEAIENRWENVSASEAINLRLKFIRNMVCFRLPRDIMAIHKIQVDVLEREGYEPGDFSFFAEQLENMFLDPLLTALDEYGIPTQISTKIKHLILPSEHLNDLLAKLRLLVPRMERLQLTSFEKGLMQWAVAEM

SEQ ID NO: 55850 - protein, 312 aa, Pseudomonas amygdali pv. aesculi
MPPHKAPRIALLHVRFKEDLPSVQAFANFLGNQAANYALSRRRRDEYQARIASAENGDVSAAQELSRAVRNAFIEFRKAHPSRASEVGEVLAYCVAVHHLQAAQLIAKMALKTSTNMPVYGLDGIHASVTDGELNVFFLESKLAGNAASGTADYADSVSGFLKNEGQYEQEYGLVTSLGNLDALDPADKALMMDYLDVFGNPNAPKRERSVGVVCYSEVKHFANKLEVDDGPLSKHEDHFGQLYRGDLNRHHTNLTNQLDVKKVDANKCMVYLVAVPNVDELRELFYDSIGLAGLESDVPLTPPSVIEEGAP

SEQ ID NO: 55851 - protein, 255 aa, Pseudomonas amygdali pv. aesculi
MLYCASVFAQSGVESHVSLAQTIAFNAMLISQESTVLERCATILTEIGNFPSLSYAEKRNSTKPSTLLGMIQRNIVEQLNTVEVAGSAITLTDYQRKVWDSLQEGRSLAISAPTSAGKSFLVIEHLCRDALALPQFVFVYIAPTRALLSEVHLKIKERLASDVNIRVTDIPTFENVPRQIFVLTQERFKVLLSITSSPVNFLVVDEAQNLSDGARGMILQDCIEQCYVRDRKTHVVLLAPGAQGFTDALESLGKV

SEQ ID NO: 55852 - protein, 543 aa, Pseudomonas amygdali pv. tabaci; identical to SEQ ID NO: 55840

SEQ ID NO: 55853 - protein, 721 aa, Pseudomonas amygdali pv. tabaci; identical to SEQ ID NO: 55849

SEQ ID NO: 55854 - protein, 539 aa, Serratia fonticola
MDSSNAGGVAAKFGFLYQDCAAALFVTEMLLDKMIQAVRCEVTDDIDILYKTHTEFVQVKTSDKSRWSISSVVERARGAQRKLIPESSIVHKSMKCATVPINSCKFRILSSRDTKAPLDYLEIELSKRYGKPGRDDLVKELNNKMSNYSAPAGNSITHWVDSCWWQIIPSMREMELTGLKNIRNAAFNLYGVILSVDSVAENIWINILNTMTKKSALDRRVYVEDDKTYHRNNFLAWFKSEVLHLDRGNAHRKVYVHRRLPAILVQLQEPFNSPVVSRQGLALHQRYQLGQYRYEHIAENVCQWFDELLLRPSEIADVISSTATEKYKLLRSRLICNNRDLEQFLGNALLHSVMRIKYDSQPIPATLYLDVDDGVKIYENVHIVQRTNGGDELWLGVSKITKGSTVSQVLVDLRDALYNEILIDLDGVREKILDIKEDSYLLQHDIDEILDSSNSFEEHMDRFRFVIFFGYESEFLTIPETKGHEPSLYAEAYELFLAFISDLKTHVHFSTLNVDLYLYPAPSFTDLCSLLDEKMRDDK

SEQ ID NO: 55855 - protein, 729 aa, Serratia fonticola
MNKIYDNARLQFESQNSSAFSYLRAADQLLSNPVSLHMGRDLVIRALDAREKFSNYTPLLRNLVRKAGLFPYLKKEFQDVTVSENAALSIYQTPFSEKIVFHSTQFQVFELLRSGRNVVLSAPTSMGKSAIVDSIIGLGEVRRIVLVVPTIALADETRRRLQERFGENYQVIHHSSQEATSDRVIFVLTQERVNERQDIIDIDFFVIDEFYKLAFQQRASGKIDYENERVIELNIALSKLLKASKQFYMTGPFINHVNGLASLGLEYTFISSDFNTVALDIESFDIAPKDIESKKKAVISISERCRGQATIIYCKSSGVAGDIARILAGNGFGADFNSSHLDWVASEYDPEWDYCVALRHGIGLHFGGLPRALQQYTIDLFNNGEIDILICTSTIIEGVNTIAKNVVIHDNRDGNFSIDKFTHGNIKGRAGRMGVHYVGTVYCLESIPEDSFNQEVEVPLGIQDETTPMNLLVGVQPEHLSEYSQSRFDKDENVYEFGVELLKRHSSFSLETFRELYAFVEMLSENSMRSAIFHWLPTGEFLNVLATALIRFTPGALHRARIKTGSPAVIHAKLTSYIYTPIYAEYFKTQINQSKGRLSRGEVNNLSTCINDDLKIVINIFGHTVPKLLNVLEDVVKLYAKRHYIEGKVDYSKLRSIFEHYHLSTGLAGMEEMGIPVQTLQRLSRVLSVPEDLDVDKVAQFLRDNHNRWQEMGSVDRAFMERTLYPDAI

SEQ ID NO: 55856 - protein, 314 aa, Acinetobacter pittii ANC 4052
MSTTPFGSNEIIEIKVLESDLRGFLVGFDLDDNGTSQYRWSALIQKILSVIHEFSFGFHEGTSTSNTKTFEKLVEAANSIYKIDGFQRAKDIYANNGEVDDDIDDKYLRRGEFGELILHLILRDHFNTIPLLSKIYFKDSRGHAVHGFDCVHIEPSSKTLWLGESKVYTDPKRGLIELIKDIKEHFKTDYLDSEFNLISKKIKLFDNIPENDHWIRILSGTTKLKEKLTNICIPLICTYSCELFTKYNDDTLEEFIKDYNEKIKELKEYFDKNNNHALKENLNIVVILLPIQCKKTLVKKLHHKLSMIQALGDE

SEQ ID NO: 55857 - protein, 727 aa, Acinetobacter pittii ANC 4052
MENLIKKIKEFDNFNFDETFSIYSECSKSLIQDEKIGIEFLIYILNYKEKFHPDLNEILSDLTESIGFYPYLQKEKLKINNTSANIRVGINQSKNIKNKYFHDEQKYVLDILNTGRNLILSAPTSFGKSLLIEEIVASKKYKNIVIIQPTLALLDETRKKLNKYNSFYKLILRTSQEPDVKKGNIFLLTAERVNEYQKLPKIEFLVIDEFYKLSSKRDDERSDSLNNAFQYLINRFSPQFYLLGPNIEGISSGFEEKYDAIFYKTQYNLVNYNEINIYKDNENLFGDRGDKKAYKEHILFDLLFTLRNEQTIIYCSSPGRARYLSNEYCKFLINKEIRIKNTDLPIIEWIKNYIDPRWSLIHCLRFGIGIHDGALQKHITSTIIEHFNTGILNTLFCTATIIEGVNTTAKNVIFYDKNKGYQTAVDFFDYSNIKGRAGRLMEHYIGNIYNFNPPPPQTQFYVDIPFFEQNPISDEVLININPENIINKESEQYSFISKMTQKEKDLYAHNSVYIRGQVDLLQRLRIDLKDKYKLIAWDGMPTYEQLQYCLGLAWDYLIKPTENLGSMTKNRIVKVTFDYGLNKNINKLIQGIYSYNKSNNKKLRNDNEILDDAIRDSFHILRHWFQYKIPKWLLVLNEMQSFVCHENGIRAGNYKFYASSIEFDFIRDNMVILMEYGIPKSAINKLEKYIPKDLDQESVLKEIINKKLYLRSDFIEYEKLKIIENFQ

SEQ ID NO: 55858 - protein, 279 aa, Pseudomonas fuscovaginae
MKKLYTRFTKLVFRFDEDIEDSGVGKHPYHLNYESGVYRESDLVKIIRGAVPHFALTPEEYSRLKDQDDIDEMYRLAFSRISKAKKDKKGDYGELLLFLLLQSFYNTERLVTKVKLRSSVKDQIKGFDCAHFTVGDDGQPLLWLGEVKFYKSFSGALDDVVEEIVAHTKGEYLKNEFSILCPNVEFNGGVDIPDSVVDILDGTVTLDDVKIVIPALVTYETAVLKAHTSIDQSFKDSIKKQFEKKYELINSRDITIPPNVEVFFLLLPLSDVDSIKSKL

SEQ ID NO: 55859 - protein, 730 aa, Pseudomonas fuscovaginae
MNFLQRIADRAHERLQNDEQAISLACDSKVFARHVQDIYKVLQSPKYYTFGVQKLCFACEAAVNEPMVIALLEQCINSSRIFLYEEMLRKRLQYAPSAEGFLEVAQKAFYSLESDVILTKEQKDLYDLFLKKRRLVISAPTSFGKSRIVREIISHSSYQCVVMIVPTNALLNETYQAFREDRGLSEYSLVFSTHTEPPEGKAIYIFTPEKFDLYTDEHGIQFDFFVFDEVYKVGNYDGRSSVFSNCLYKAYKRKCDYYLIGPYFKSFSAKYLERTSGHFERYQTDIVQKEIISYFDGGAPTYRKITLPVRAGKDARLKQVLQKIDGPTIVYVGRKDTAETRAKIIHEIKSKALRQKSDSVVELVEYIKKTISTEWRLIDFLQSGVAFHHAGIPKYIQSEIVDLFNAGELDVIVCTPTLTEGVNTTAKNVVFFDTTKADQSLTGFEVKNVVGRSGRFGQHFVGRAVFLEPHAEQDDIEEISFPIFDSENLREEDNIQISLDDLNDAGRNQRERINNLAGSLMIPLEVLKKNKYVSLDNQIRLIMHLRENPSIRRELLGAHNPPRKEQVDLIIHLVHDFLYSDSDKRDSWSTGNISRFVKYHVYHSPSIKQLIKEHHAVKEDTRIRNVLDLIYTYFEYSLPKYISALENIVNFVYSEKISFALFVTKLQYGSTEPQDILLADAGIPRSIIIQVSGGLSGATTIESIKDRLSRNPGILSRLSGIETRMLKKRI

SEQ ID NO: 55860 - protein, 320 aa, unidentified eubacterium SCB49
MTKLDKFNIHFDSSLKDFCPDVDFNIIDGREVLSIANDFSDEDWQYQKFQKFIFNNIAQTALSKKERDNIIDDSYGTLIESAKKLRLLDKKNITTDTEGSELAEILLYGIMHHHYKALPVVPKIFNKQNSNDNAKGSDSVHIVLEQENEFSIWYGESKFYNSIEDARLYEIVNSVLNIFSDSAFNTENRILSNSNDLKEYLNDNKKLFDKIIDILDTDSPIDYVKARLNIPILLLHECKITNQQKENADEYIEEILNYQKGRVKSFYQKLYNKATKNNDKVKPIINFDKIKFHFIFFPVPDKEKVISNFLTRAESLRNEL

SEQ ID NO: 55861 - protein, 705 aa, unidentified eubacterium SCB49
MIEHFDRCKKLFGFIKTNNYLKARDGVIHLLNDLKEKNIQYDELVNHLIREVGLYQYIDESSSNWSDRFAKESFKVNTGNEFQTIHFEQSSILKHLLNGDNIALSAPTSFGKSFIIDAFIANKKPNNVVIIVPTISLTDETRKRINKKFGNEYKIITTPNIKLSDKNIFIFPQERAINYSNIIEEIDLLIIDEFYKISKANDKERAVKLQEALIKLDRKSKQKYFLAPNIKSIKDNPFTDGMIPVVKLDFNTVVLEHHKLYKKINKDEELKKEFLLKICSNDKNLIYAALYKEIHKLRQLFISKFDDAKNEKLIEFSNWLKVNYYPDWDLADLILKGVGIHNGRLHRSITQYQVLLFDDESSGLNSLISTSSLIEGVNTSAKNVIIWSIKSGQGNNNLTSLSYKNIKGRAGRMFKHFVGNVYELVEPNLKNMDDIQLSIEIDNSLIGGITNENFLSQISSEKQTIANDQIDKIESILGIGVYRKLREENLLNSNNEDLIYKICLELKKKYSDWSSLKMLNIEDPEKWRGILGKLCFLNPNSMRWDNGNNNQFKQAQKFIQVISKNWTTSLPNLMLELKSENLSIDDFFTLEKKICHNFSGYLNDFNVLNEIINENKFIDISNFIGKCSNAFMPPVVLVLEEYGLPRMITKKINYCKLIDFENNEMNIEKAINLLKSVGKKQILEKCSIYLDDFDTYIINNFFENI

SEQ ID NO: 55862 - protein, 555 aa, Pseudomonas coronafaciens pv. atropurpurea
MREIVINSMAKIAMDVEMEPNDAGGVAAKHGFIFQDCVAAYYVTQMLRDKTIQRVRCEVTDDIDVVCDDFVEFVQVKTTTKTLWARSDLVVLSSGAGNKKIKYSSIMHKSMQCEPTLTVPRKFRIVTEHPTNVTLEYLLINREERNGKAGRDELVDYLNSKTSDYVAPSGVDVATWVDAACWEVFRTMREIELLGIRNIRLASYDLHGVLLSTEASAENIWQGILDTITRKGALSRKIHSVDSKSYLRADLNAWFQGLVEEDQKRAGRKVYVKRQLPHILVPFRNSLATPCAKRNGHVLHQQYSFKRYRYKHIVDNVCKWLDEVFLRPNELADIHKLSLVEQSQRLKNTVFASLADVRSLLGRVLLHATIRQMHASQPIPCLLYLEGKGEEKILENVHIVRRDPEGDQLWVGFSELVTAANITTRLPEIRQQLYEEIVESFSNARGKILDIKDDEYLLRHDIDMILDESNPFDAHLDRFKFVLFVGYDSSLLTDPETPGHEDHLERETTALFEMFADDLKRDPTFAELAIDVFIYPAPSLETLTQLVDKKVREAI

SEQ ID NO: 55863 - protein, 740 aa, Pseudomonas coronafaciens pv. atropurpurea
MTEVYDAAKLSLSGDGFSAFRYLSAVNTLLSNPVSTPLGRDLTIRALDAREKFTDHVGILRNMVRKAGLFPYLKKEFSELSQGDLIALDVYRTPFSEDFVFHSMQFRIFDLLKDGRNVVLSAPTSMGKSAIVDSLLGLGRFNRVVLVVPTVALADETRRRLQERFGEVYQIIHHSSQECRSERVVYVLTQERVNERDDIKAIDLFVIDEFYKLAFQQLKSGTTDFNDERVIELNIALSKLLKVSKQFYLTGPFVNSIRGLTELGYDHTFISADFNTVAVDVQTFGVDANDDEGKLAMLATIAPQCEGATIIYCKSSGVAGKVARELVRLGYGRPFQSEHIDWVAEEFDPEWDYTYALRNGIGLHFGGLPRALQQYTADRFNAGDLRFLLCTATIIEGVNTVAKNVVIYDNRNGTRGIDKFTHGNIKGRAGRMGIHFVGKVFCLEDVPEDNLNQEVDVPLGIQDADTPLNLLASAQPDHLSEYSQERFEAAFAQDRFSIDLLKKHSYFRMEQFEQLYSMVEMLSENEFESLLFHWSPAPGFLTTLAMISSRLVPKAFSTNGLQTKTPDAILAKLTSFQRAESYSAYLKGQIEYTKQRIKDDEKRIRAGQQRIKADEKLTLSTGLNNDLKLVSNTFGYTIPKVLALLEDVVRLHAIKKGIRSTIDYSYVRIKFENLHLPPGVNALEEIGIPIQTLHRMCELLEFPEGAGVDELADYLRHNEPAWGFMGYVDQSFVRRALGSV

SEQ ID NO: 55864 - protein, 311 aa, Raoultella ornithinolytica 10-5246
MGPFKAHEVIEERMRDQALCSYLVGFDINDTGVSYYRMDPLIMKILSALHEFAYGFHEGEQTDNTQTLSKIIDAARSIYKIDEYQKVKDIYLNSGELTDDVANKYLKRGEFGELILHLILRDFHNTIPLLSKIYFKDSIGHTVHGFDAVHIDPVNKTLWLGESKLYIDPKKGIGDLINDVEEHFKADYLNSEFNLIAKKIRHVQNSPELEYWLDILSTGGKLSDKLTKINIPLLCTYSCDSFLKYDNEKSPDFSAYYKNKILMLKKYFDENYKHPLKNHLNIILMLFPVSNKIELVKKLHQKLSLIQQIGG

SEQ ID NO: 55865 - protein, 726 aa, Raoultella ornithinolytica 10-5246
MNEHIGSGNDALFEYTFSEYQKCARLLISDENQGRDELIKILEKKNDYSRILDGVLADLIESAGFYPYIIKNDLTLSSSSQKIRFENNRSINIKDKVFHDEQKYLLDLINSEKNVIASAPTSFGKSLLIEEIVASKKYKNIIIIQPTLALLDETRKKISKYSNDYKLIVRTSQAFCSEGKGNIFLLTSERVNEYKDLPKVDYLIIDEFYKLSSKRDDERHQSLNNAFIKIFKNSTPKFYFLGPNIDGITPGFADKYNAVFYQSQYSLVRCNDFNIYKDYADLFGSRGNKARFKESILFKLISGRCDEQTIVYCASPSKARRLSREFANLIQKNKSGELTHNPPLIEWIEKNISKRWSLIDSIKHGVAFHDGALPRHITSSIIDYFNEGLIKVLFCTSTIIEGVNTSAKNIVYFDEKKGKDLSIDYFDYSNIKGRAGRLMEHYSGNIFNFNPPPEKEVIYIDIPFFEQNPINEEILINLDDADIKNKNSIEYNFISSLPFDESVLFKNNSINIRGQKKLLDYLKSNIRDNYVLVAWSSTPKYEQLKFCVHLCWEYLLKDNEKSNQMSAERLTKVTFDYGFSQNILELVKNTYNYNLSKSGKMNDEKTIKIIDESIKDSFYILRHWFQYKLPKLLSVLNELQTYVCKLFGLVPGNYLYYSSIIENDFIPEHLNILIEYGVPKSAIQKIAKFIPDHLVDDEVVRLISNKKLYDYNELIDYEKNIIKKMF

SEQ ID NO: 55866 - protein, 306 aa, Vibrio anguillarum 775
MTININRYLSVDKSAYDACIGCLEHEYAIEGYKTNIRLHYLKFDGNGQPMVKALANLLYEFIIDYCISSANRPEQLTARESTRLTKEARKLFRHPEIDKDNPDRTGEAGELLLFFLIEAILGAPQMVSKMELKTNHKDEVKGSDGIHAKYNQEDDLVDFFFGEAKLYVDSNSAIQAALNSIDDFHSVDMLEHEFTMVTKHFKYSNEETKKALSSLIICGEPGPNARLNHACLIGYNYKDFSTIDGGNPRVLTENFVSKFQEEGLRLTKSLQKKIANMNCNHLSFEFFFLPFPSVDDFRNAFNKALD

SEQ ID NO: 55867 - protein, 841 aa, Vibrio anguillarum 775
MSELLDIHMLVRKLEKASIQNQLPSSFSSENLVSFEDNEIRALVSHASVLSLGTSDDVNESYEIITRLLEETSGNSKLVKGAAEVILSRIGNFPGRDLLRSRYAIESGIPAPLRLEIIARESENTITDETDNEIQLTDFQLQLFRSLESEQNLSISAPTSAGKSFVLNLSLSNQIKEKSCNSIVYVVPTRALISEVSTRVRSAIKRIGQDKAIIRTTPFPVDRTKVRTNVVYIFTQERLLSFLSATDVEPQIDTLIVDEAHEIQNGKRGIILQTAIDIALRKFCNAKLLFASPLIQNPEYFLSLFQRTSNGKFFTEVISPVSQNILLVNQVARKPTKMHISLLNSIGTTEIGEFVLPFQLRNSKHQQIANLALSLSDDDSVIAFSNTPSSAEERAVQAAQLAQNIDVSEDIEMFISFIKQEIHPNYALINCLKKGIAFHYGNMPSLLRTGVEDLFRNGDVKVVFCTSTLLQGVNLPAKHIIIENPKSGDNGMTRADFLNLAGRAGRLLNEFHGNVWCIRPEEWESPCYTGDKLQTITSSISNILIDGGTELQKAINPDTTEDSWDEKRQDEADVAIGKLYNDYLDTKDFSFMEQYRTDINSRELDQTIEVVRSLEVTLPEEIIKRNQSLRPDQLDKLYTYLLEQNNIEDFYPIYPYLSGAKARVEKILGVIEVCFEWKLHEKFKSWLSFLAYQWVWGVPIGKILHERVSFLESTKERENINPTKVVRSCLKVLETDIRFKMVKYFSAYLDVLKYIALEEELKSAETIEPYHIYLEFGSCKKSVLNLMSVGLSRFTAIHLDKCFNFSESDEPEEYLAELQRINIHKLKMPRLCINEVATLIT

SEQ ID NO: 55868 - protein, 306 aa, Listonella anguillarum M3; identical to SEQ ID NO: 55866

SEQ ID NO: 55869 - protein, 841 aa, Listonella anguillarum M3; identical to SEQ ID NO: 55867

SEQ ID NO: 55870 - protein, 306 aa, Vibrio anguillarum; identical to SEQ ID NO: 55866

SEQ ID NO: 55871 - protein, 841 aa, Vibrio anguillarum; identical to SEQ ID NO: 55867

SEQ ID NO: 55872 - protein, 283 aa, Desulfovibrio alaskensis G20
MTLPMPEKFWDIRIHKVDIHPGVTGLCVGYERGVWRKDQFVRHAMDWLPEFALKESELKGVDSANMVQMVRDAATAIYKSEKFHKRGEFGELFLHMAKRQVFNSIPAVSKIYYKTARNDTVKGFDSVHVVEAEDGLELWLGEVKFYKDLNSAVADVVKELQGHTQTDYLRDEFNLIMNKVDRDWEHYETMKRLMSKNTSLDEVFKRACIPVLLTYESEAICQCSVCDEEYKKLFINEIREAYKLFSSKKLPTDIRIHLFLFPLASKPELIKALDKKLKLWQQL

SEQ ID NO: 55873 - protein, 699 aa, Desulfovibrio alaskensis G20
MTKKELRVILGDPERIAADPFLVLKEIACFVNDPALEDEGRDLVLRALEHKGAFGDCFGILNDLTRQVGLFPYLDEERLSLPDSIAYEYHKPLNGDDFVFHREQAYIYRRLLSGESVVLSAPTSFGKSRIIDEIVRLNKFRNIAVVVPTIALIDETRRRLIKFSDQYKVVTQVSQVPAERNLFILTAERVNAFEELPQIDFFVIDEFYKLDITSSDETRPVNLNQAFYRLYKNGGQFFLLGPSIEQVSDQMEEQFSCYFYRTPFSTVASDQYYVGGGDREAQLVEICRELNEPTLIFCSSPNKVNEIAELLEGQLSARDVPRELASCNDWISEHYHPDWIYGKALLKGIGIHHGRLPRSLGQYVVRKFNELKLNFLICTSTLIEGVNTKAKNVIVYDNQIAQKKIDFFTFNNIKGRSGRMFEHFVGRVFLFDPPPEEQLPLVEIPLVTQGDNVPDSLLIQMDSNDLTPRSKERLSEFVRSAILPMDILKQNAGIEPQDQIGLASAILSEKKYHLLSWNSLPSWEELEYACDLIWRFFVKRGGSGAYSGRQLAFKVNSLSEKLSIKDRVANELNAGKYSAKTPNEAVEKVLSFDRNWASYEFPRFLMALSHIQEYILQHEGYQPGDYSYYATQVESFFDNSLLVSLDEFGIPPILGKKVIRGMEDVDIDTAITRLKGATIRASALHEFEREVLVDSIEAM

SEQ ID NO: 55874 - protein, 306 aa, Trueperella bernardiae
MAQATITSTLRGDTFASTFTEVAHSNTLGLRNDEQLRLFHLSVQNNRFDHTALVKFLKRNVGRYVFSRAEYEGYKQRDDLEEVALDAVSRMRSQQDGMGLGEILLYVLLEQILEAPKVLSKIELNQARGQIHSRCDAIHLLTPDGQRTTSSIVFGTSSVVGNIGDAITAAFDRVVDIEQNRSDEVQLAENTVFTKTLDAATAGYVKDLLIPKPGGAPGFDTAYSMFLGYDIGLDPKNYGNQQYRSALDQKMQGDIAAHAQMIANEINTRNLDNYSFYIYVLPLNEVDVDAVAIMDGLVGGQGGSHV

SEQ ID NO: 55875 - protein, 880 aa, Trueperella bernardiae
MSDKQVTVGDLVFADIDSNEFLKQLYANLLHNYGLHRLGLANRQPYDVDLEAALRFADLLSKSTHPTNRDQHRVWAQEIALLCHILYPNDPRTKAYVPAIFTTLGNYPGLKQLGVTSDAGILDAAFNAYQAEYLTVPGDRSMKFFAPQKKIYDRLTDGKFSFSAPTSLGKSFIMRTFITNQIKSGVKANFAIIVPSKALINETRSKLIADLGEDLERHNYRIVSAAGDIVLEGDHNFIFVLTPERLLYLLIGKPAIEFEYIFFDESHKLSGKNSRAPFYYQTVTILQHRHKPPHFVFASPNIPNPEVFLRLVDPNSDENETNAVATQYSPVAQFKYLVNLHENTISSYNDHTQEFTHLASLQAQDATVQGITRFVSESSRGSDHRGQTIVFHSARHHAVQAARDYAQGLADLNDKDLDALAKDIERDVHEDYYLSDLIRRGVSYHIGYLPPAIRERIEGLFREGKISTLFCTSTLLEGVNLPADNLVITTNKIGRAGMTTVDFKNLIGRVGRIEFNLYGNVFIIVGNQLASEQKAKELLQANVPAQTLSVQTDSQIISKKMKQGVVADLQEGQIEFAKGDESYERYNMKRKFGLMLLRDITTGRQSLVREEFSDYLDDQTISRIRESFAQREGQQDDDINVSVDQAESLTQAVRAGLKYPRISPDGKFNYDETLAFLERLASIFKWRVYDPETLGKTDKYGNQLTMLRWYTVLLTQWMEGHGLRSIMNRALQYRLQQGTLYIKGQGEIRYENTLQHRNIVISEILKVLEDVILFSLSNYFLKFSNEYKKVHGVEQFDNDWYEYVEYGTTKQKTILLQRLGFTRESATYIRTNVSNAIFLHEGKPHLNPILLESSNINVRKEANEIRYNVPEAFSMPDFMF

SEQ ID NO: 55876 - protein, 570 aa, Shewanella sp. MR-4
MNKMNTMTQSDGGGVAALKGFTYQNLAAAYYVLNMLQDKSLLSVRCEVIDDIDLIYADKIEYIQVKTTDSDTKWCIKEFAEASIKTVPPTGRQRVNQNISLEDSILHKSIKCDKEKLPSFFRILTSRDVTDALRYLKISIIDRNEKTQEREPLLKRLDTAINRNRKKLPPYTSPNGNDTEYWLDHAEWTVIPNREHLELLCTKLILQSAQQKGIYLSANGDPERILASLLKNVTDKGAASRILKTIANKSYHRTDFIPWFNAEVEYYAGLSRNHVKVYTTSRKELTAILSSFFHDRDIYNLTGEKLCTGLQGQYHQRKYSYNLLAKNLHLWLPEVLLHPTEIADNAPENLVNKFSTFTQRYNTNITFIKNLISKALLHSIIRTQYKSQPIAAELHIDDSKRTCFDNIHIVLEDHAPDKLLMGFSELIFNDINKSLSEIVKKFHNLIDSDAFSTQKDKILTAKDDSYLLEHDIDEILSKNKSLDDFLDRIRFIFFIGYESVHLKCNMKEMEKTYLEELTTEVIDRFKSLIDELILENEFCEELHIEVFLYPIPSMSSLISAVQKQGDQNGH

SEQ ID NO: 55877 - protein, 717 aa, Shewanella sp. MR-4
MDTNLSPEICLTEVKNKQLSAFSYLKKANDCLSSPQLNTIGREYLIRALDQFQLFEEQKILLQNLLRKAGLFPYIKKYFQNLTPEKELVLDIYRSNFDENFIFHSMQAKVFRLLMSGKNVVLSAPTSMGKSAIIDALITERKFKKIVIVVPTIALIDETRRRIQKKFGLDIQIIHHGSQIKRKDRVIYILTQERVNERDDLRNIDLFIIDEFYKLAYNNDESSRVISLNIALSKLLTISKQFYMIGPYIDGFRGMEKLGRDYTFIPSDFNTVALNIHKYDIAANNITSKNEQLAKIIEEHKEQTIIYCKSASSIAQIINFITNSEKIKDIKNKNTKEYLKWLTENYGYHWNCTKAVSYGIGIHHGALPRAIQQKSIDLFNSGRIKFLLCTSTMIEGVNTSAKNIVIYDNRKGTPSIDNFTHKNISGRAGRMNQYLIGNVFCLEEIPPKETQVVELPLGQINENSPINLLAGIQSEHLSDRGSQILNTFSKTYNIPIEIIKKHQSYKAEVIADGYKFLTELSYHNKNELIKIKTPKKHQLELLTEFIKKVEYGALSKINIHYLDNDELKNRLGWYVYADSHSSYLKERIEHIYESRIDEQLRSDATDKELKIVRNIFKHAVTRALLLLEDLLNYEMNNLVDNKADFGYLIHLFENNHLPPSFSALEEMGIPIETLEKLVTDRLSETSIDILIRYLRMHYNYLPQLSYMDKSFIKQAVL

SEQ ID NO: 55878 - protein, 323 aa, Burkholderia vietnamiensis
MATTAEDENPRIHFDRILGRHYVDARIRKLTVHDAGLPPVVAHFLYPAFKSGQPTVAELVMMLMGEITGFCATKAQRRLAKMRDAADPYDSRETEELARWAKARFIKARESDSRSGEGGELLLYVLVEHFLKAPLVLSKMRLKTSPDMPVHGADGVHAMWDIDGNRLAMVFGESKLHQTFASGMAEAAESIGLLARNVDGRMENELQLTTGNIDLDGFPSEIQEHLLRFLHPYATEESNSRVDKFALLVGFDFHAYGKITGKPAAEAEEEFVKLYRKNLKTSLTTAQSHLNAHDVSLDTVDLFFFPLPDVQAFRDAFDKALYG

SEQ ID NO: 55879 - protein, 214 aa, Burkholderia vietnamiensis
MFDVLLEGVKQRRLKDYVPLHPLQPHADAKERLEFVMSLIHEHLEGKPSQAGRYFSWFSLSWMRGNSLKDMIDFQLRDAREKASASGGEPPVAGKIIIKVLSEVEEKLRFHYVRYFGCYIDLLKYAVKTISPDREFDVPPIPLFLELGACSGTMIGCMELGLSRIAAREVMDFLGAQDLDAVAVKKRLRNSKLATSGLSHIVLAELNRIGLSAV

SEQ ID NO: 55880 - protein, 303 aa, Sanguibacter keddieii DSM 10542
MMDSLVRGDTSDFLHLVGAFGEPKKLDGTRSTVRTHFVTTDSTGTPAVDLLSSAMAYAVVDFCVPRERIEAANAHYQRTRSTMHVASLQQEAQELFVDADESGEGGELLLFLLSEQLLGLPQIIAKMPLKTSSQMHVHGADGVHARIDDEGILNVFWGESKLYKSSTDAFRDCFNSIKPFLAPDGHDARRRDLQLVRDNINVDHPELATHLVRYFTTSDPQALQVKWGGVCLIGFDLEAYPNTSCLVEAERAELSAKINRWENAVKRRVSEHSLVDIEIDVFCIPFPSVAELRKAVRRKLGGR

SEQ ID NO: 55881 - protein, 852 aa, Sanguibacter keddieii DSM 10542
MNEDDVLENSTFRDSFHEMRRQELRREFPMVVNDGEADPAVLDWNFLIFCASAISSFRTERSEASVLRVATSCLTNENTDESQKQAAVLLLNRIGNSRTVQMAAAKGLVQPQVPASLPPLLRLESIRGSMARVIPIASGERLEVNRFQREVWQIAQSNQWISVSAPTSAGKSRIVREWFLELLRETPRLTAVYLCPTRALVEEVSADYRSSVPINTGVFTMPWDPKISEGDKRVLVLTQERLHLVQEKFSDFKVDLLFVDEAQGLGAVERGILLQQVIDRAVAANARMQVIFASPLSSNPDIHLTHRPKEVSSEHFVSEAVTVNQNLLRVEAVKGKPLLRAVRYAHEGTIRNLGHIELPERPNSLPERIANVAFALGGKSGGNIVYVNGASEAEKVSAVLAQLNRKSIQNDEVRNLQKLLETVVHPDYALIDALNAGIAFHYGNMPLVVRSEIERLFSSGHIGYLVCTSTLLEGVNLPCRNIFMRNPKKGVGNPLTESDFWNLAGRAGRWGKEFQGNVVCIDTDVSGTWENLPLVRKRSKLILATTQGLARTPDLLEYIDRSERSAISGPEEYLFSYLCSRYAAGRDLTDMLSKVPEESLRDELRNRIGAVVDNAPFPKEIISRHSGVSPFAMERLLASFSAESDLENLWLPGPTEGDSKLKYQRALCRIGEHVTTAFGSVAMSPDSDKRKWQLANLIVNWMLGVPLPMLIDQRIYQRKNIPAAIRGVLSDVENIVRFHAPKHLALYEDLVRVEALRRGQPVPSSRPDVVMLLELGVSKPNEVALTTLGLSRTSTVALAAYVPVEPWMGDEALNWLSNFDIKRLPLPKIVEKEVLALRSGLARLEPPSLSEQ

SEQ ID NO: 55882 - protein, 311 aa, Enterobacter asburiae; identical to SEQ ID NO: 55864

SEQ ID NO: 55883 - protein, 726 aa, Enterobacter asburiae
MNEHIGSGSDALFEYTFNEYQTCARLLISDENQGRDELIKILEKKNDYSRILDGVLADLIESAGFYPYIIKNDLTLSSSSQKIRFENNRSINIKDKVFHDEQKYLLDLINSEKNVIASAPTSFGKSLLIEEIVASKKYKNIIIIQPTLALLDETRKKISKYSNDYKLIVRTSQAFCSEGKGNIFLLTSERVNEYKDLPKVDYLIIDEFYKLSSKRDDERHQSLNNAFIKIFKNSTPKFYFLGPNIDGITPGFADKYNAVFYQSQYSLVRCNDFNIYKDYADLFGSRGNKARFKESILFKLISGRCDEQTIVYCASPSKARRLSREFANFIQKNKSGELTHNPPLIEWIEKNISKRWSLIDSIKHGVAFHDGALPRHITSSIIDYFNEGLIKVLFCTSTIIEGVNTSAKNIVYFDEKKGKDLSIDYFDYSNIKGRAGRLMEHYSGNIFNFNPPPEKEVIYIDIPFFEQNPINEEILINLDDADIKNKNSIEYNFISSLPFDERVLFKNNSINIRGQKKLLDYLKSNIRDNYVLVAWSSTPKYEQLKFCVHLCWEYLLKDNEKSNQMSAERLTKVTFDYGFSQNILELVKNTYNYNLSKSGKMNDEKTIKIIDESIKDSFYILRHWFQYKLPKLLSVLNELQTYVCKLFGLVPGNYLYYSSIIENDFIPEHLNILIEYGVPKSAIQKIAKFIPDHLVDDEVVRLILNKKLYDYNELIDYEKNIIKKMF

SEQ ID NO: 55884 - protein, 311 aa, Enterobacter asburiae; identical to SEQ ID NO: 55864

SEQ ID NO: 55885 - protein, 726 aa, Enterobacter asburiae; identical to SEQ ID NO: 55883

SEQ ID NO: 55886 - protein, 305 aa, Enterobacter asburiae
LISESAWEEMTCLFAPSLDKVDYILQEYNPCFEDDNYKNLIGKLFYQDYELFRYRFGYIVEGVYNWLPEVLLSPEELSNINGTNFQEKIDLLKTRMALKEKEVPSLLPRVTLHSIIRKNNLSQPIYSANLYVDSNKDRVTIYDNVHIVINNDDPDELWVGFSEILDGDNFSTTISKLKCDFIDNFLNNFQNHKKVILDVKRDNFLFKHDVDPYLKGTSSIDNLFNMIHFVIFIGYKTNSQPLEYDESEDEAYLPYLLAEVRKHFEMLVSEIVTEKIYKKINLHFYLYPIPCVETLVKEFEKRINQ

SEQ ID NO: 55887 - protein, 709 aa, Enterobacter asburiae
MNDQSERLFFESDFNPFEFLKIANEKMDNKLTEVDGREMVIRALNDMDMFGKYRDILKRLVRKSGLLPYLRSEFHDLNYEERMAIDLFTPVKDSDFTLHSMQLKIYNILIEGTNVVLSAPTSMGKSAVVDTLIESGKYDVIVIIVPTIALIDETRKRLTTKFRSDYDIIHHSIQTVKKNKNIFVLTQERFNERNDIEVVDLFVMDEFYKLSFKKDLEDERVISLNIALSKLLSISKQFYLIGPFIEDIRGLSDVAPDFYYVNTNFNTVAVNIYEFNLAANDVNAKGDKTIEILKKYDGQTIIYCRSPNSASEIVKRLISEEVTGTFSSEYVSWVKDSFTPEWDYAQAIEHGIGIHHGNLPRALQQTTVDLFNNALIKILICTSTIIEGVNTSAENIIIFDNRNGVGSIDRFTHSNIKGRAGRMGKHFVGNVFCLEAPPLSDYSSSIVEIPLGMQENSTPINLLAGVQEVHLKDESYKRLDDYYNSCKAPIDLLKAHPEYSFDKIQYLYESLDECQYDVLKELSFKHLPTSKAMWLLSSLFLYMEQGAVRNAGFKIDEEVISAKFFSYVNANTFQEYLKSEIKWIKENRDDISKALNSELKFIKNIYGYSLPKFLNLAQDIINTINYDNKYDFSADYGFLASQIENYHLNPSFAVLEEMGIPVPLLERLSFDIKESLELEDLIEKVKVFYSEGTYFSELESYFVRRALID

SEQ ID NO: 55888 - protein, 305 aa, Enterobacter asburiae; identical to SEQ ID NO: 55886

SEQ ID NO: 55889 - protein, 709 aa, Enterobacter asburiae; identical to SEQ ID NO: 55887

SEQ ID NO: 55890 - protein, 546 aa, Enterobacter asburiae
MSSLDTMDQSDSGGVGAKKGFFYQDLAAAFYLTQMLIDKTLKYVRCEVTDDIDLVYEEHIEYIQVKTTDSNSKWTVTELCKTKNDAKNDSIIHKSLSCDNNPSYMAKFKILSPREVNSYLQYLRIPLNKRDNKDGRVGLLKSLSPKVKSKSLLGNDIAYWIDNTWWEVIPSKNELELMILRNIRVAAQEKDIFLKDRHERAILQSIVYVLTDKSALSRKINVSEDKSYLRKDFILWFWDEVEYASKDDTYSLKVYPQKLDKVDYILQEYNPCFEDDNYKNLIGKLFYQDYELFRYRFGYIVEGVYNWLPEVLLSPEELSNINGTNFQEKIDLLKTRMALKEKEVPSLLPRVTLHSIIRKNNLSQPIYSANLYVDSNKDRVTIYDNVHIVINNDDPDELWVGFSEILDGDNFSTTISKLKCDFIDNFLNNFQNHKKVILDVKRDNFLFKHDVDPYLKGTSSIDNLFNMIHFVIFIGYKTNSQPLEYDESEDEAYLPYLLAEVRKHFEMLVSEIVTEKIYKKINLHFYLYPIPCVETLVKEFEKRINQ

SEQ ID NO: 55891 - protein, 709 aa, Enterobacter asburiae; identical to SEQ ID NO: 55887

SEQ ID NO: 55892 - protein, 546 aa, Enterobacter asburiae
MSSLDTMDQSDSGGVGAKKGFFYQDLSAAFYLTQMLIDKTLKYVRCEVTDDIDLVYEEHIEYIQVKTTDSNSKWTVTELCKTKNDAKNDSIIHKSLSCDNNPSYMAKFKILSPREVNSYLQYLRIPLNKRDNKDGRVGLLKSLSPKVKSKSLLGNDIAYWIDNTWWEVIPSKNELELMILRNIRVAAQEKDIFLKDRHERAILQSIVYVLTDKSALSRKINVSEDKSYLRKDFILWFWDEVEYASKDDTYSLKVYPQKLDKVDYILQEYNPCFEDDNYKNLIGKLFYQDYELFRYRFGYIVEGVYNWLPEVLLSPEELSNINGTNFQEKIDLLKTRMALKEKEVPSLLPRVTLHSIIRKNNLSQPIYSANLYVDSNKDRVTIYDNVHIVINNDDPDELWVGFSEILDGDNFSTTISKLKCDFIDNFLNNFQNHKKVILDVKRDNFLFKHDVDPYLKGTSSIDNLFNMIHFVIFIGYKTNSQPLEYDESEDEAYLPYLLAEVRKHFEMLVSEIVTEKIYKKINLHFYLYPIPCVETLVKEFEKRINQ

SEQ ID NO: 55893 - protein, 709 aa, Enterobacter asburiae
MNDQSERLFFESDFNPFEFLKIANEKMDNKLTEVDGREMVIRALNDMDMFGKYRDILKRLVRKSGLLPYLRSEFHDLNYEERMAIDLFTPVKDSDFTLHSMQLKIYNILIEGTNVVLSAPTSMGKSAVVDTLIESGKYDVIVIIVPTIALIDETRKRLTTKFRSDYDIIHHSIQTVKKNKNIFVLTQERFNERNDIEVVDLFVMDEFYKLSFKKDLEDERVISLNIALSKLLSISKQFYLIGPFIEDIRWLSDVAPDFYYVNTNFNTVAVNIYEFNLAANDVNAKGDKTIEILKKYDGQTIIYCRSPNSASEIVKRLISEEVTGTFSSEYVSWVKDSFTPEWDYAQAIEHGIGIHHGNLPRALQQTTVDLFNNALIKILICTSTIIEGVNTSAENIIIFDNRNGVGSIDRFTHSNIKGRAGRMGKHFVGNVFCLEAPPLSDYSSSIVEIPLGMQENSTPINLLAGVQEVHLKDESYKRLDDYYNSCKAPIDLLKAHPEYSFDKIQYLYESLDECQYDVLKELSFKHLPTSKAMWLLSSLFLYMEQGAVRNAGFKIDEEVISAKFFSYVNANTFQEYLKSEIKWIKENRDDISKALNSELKFIKNIYGYSLPKFLNLAQDIINTINYDNKYDFSADYGFLASQIENYHLNPSFAVLEEMGIPVPLLERLSFDIKESLELEDLIEKVKVFYSEGTYFSELESYFVRRALID

SEQ ID NO: 55894 - protein, 538 aa, Pluralibacter gergoviae
MESNDSGGVAAKHGFLFQDCVAAYHVTRMLRDKTIRSVRCEVTDDIDIVSDGYIDCVQVKSTGKTRWNISDIVQNSKGADKKTIPCSSILHKSMQCESDPALGRRYSIVTEEKVNKTLEYLTISPNARLDKPGRQELIDDLNKRTNNYLTDSGISVSDWIDAAIWEVFPSLREIELLGIKNIRLASQDLHGVILSSEIIAEDIWCRILDTVTRKGEHSRRIHSVDDKSYLRPDLLEWFKQRVEDDQSRSGRKIYVKRDLPHILTPFRAPMASVCAKRKGLVLHQQYSLKKYRYKHIAENVCQWLDEVFLRPKEMSDIHKLTFIEKRERLKDSVFKSLHDVSEFLGRVLLHATIRQYHESQPIPCMLYVEKAGAEKILENVHIVRRDPEGDQLWIGFSELVTDIDIAVRLPEIRDRLYEDISDCIDTARKKILDIKDDNYLLRHDIDEILDGSQPFDAHLDRFTFVLFVGYDSNLLTEPETPGFEDDLEKETTMLFEKFAADLIEDSPFANLCIHVFIYPAPSLERLTELVDEKVREVV

SEQ ID NO: 55895 - protein, 729 aa, Pluralibacter gergoviae
MTELYEQAKNSLQGEDFSSFNYLFAVNKLLSNPVSYDLGRDLIVRALDSRERFSEHTTILKNMVRKSGLFPYLKKEFTGLTPDDLRVLELYRTPFSDGYVFHSMQFHIFDLLKSGQNVVLSAPTSMGKSAIVDSLLGMGTLKRLVLVVPTVALADETRRRLQERFGDRYQIIHHSSQVCHSDQAVYVLTQERVNEREDIIDIDLFVIDEFYKLAFRQLKSGKVDHQDERVIELNIALSKLLKVSRQFYLTGPFVNSIRGLERLGYPHTFVSTDFNTVALDVQTFGIKASDDEAKLKALAKIAHACVGATIIYCKSPTVAGRVARELIRLGHGTLTESPHIDWVSQEFDADWDYTVALRNGIGLHFGALPRALQQYTADQFNAGKLRFLLCTSTIIEGVNTIAKNVVIYDNRDGPRSIDKFTHGNIKGRAGRMGVHFVGKIFCLEEIPEDSLNQEVEIPLGIQDIDTPINLLASVQPDHLSEFSQDRFDEVFINERVSIELVKKHSYFRVEQLEVLQSMFEMMDDTEFASLVFHWTPATNFLKTFAKIIARLVPSTFSRNGVPVNPTDVMVAKLACYSNAASYSEYLKNQIDRARQWVSEEEKRSLSIAINNDLKLITNTFGYTLPKVLSLMEDVVKYHALKRGIRSKVDYTHVKMTFENFHLPPGVSALEEIGIPIQTLHRLVDLLEFSDQADVDGLCQYLRDTQDVWSRTIGFVDQTFIRRALGIEQH

SEQ ID NO: 55896 - protein, 278 aa, Shewanella baltica OS155
MEDNLDTIGKALTEMARGELTELSSLLASACTHDINENKINCYYLKVDANGRPRLNELIKYMSMKITDYTIPRNRINKAKQKLIESGCTDEITKIALEARKLFTKLELTGEGGELLLFALTESILKFPQVLCKMSLKTDEQMHFHGADGVFLGVDDNDMLCVYWGESKLHATHSSAISECITSIANILKMEPDVDSDIRLIDYIDLDNSSLEEAIKNYFDYTSPSYDQLRPCAVFLVSFDHSAYEKSNTKLTNENIREKIENDFLKPRIQLRSATLDN

SEQ ID NO: 55897 - protein, 267 aa, Shewanella baltica OS155
MVILFYFGEIKRTTFQQLASSTPRLECRSYYLNSGTLVEGVNLSCKNIFVRGPKKGRRADKPMTSEDFWNLAGRAGRWGQEFQGNIFCLDVNNEKLWPNGKPEKRTPYIITPSVDKQMENTDKIIKYIKDGTPRSESVGNIDYEYLITYIIEGIATNNKAILGSLGSSDASSEIELILENCELPHEIFRKNAGISPIAIEELYSYFQNKAENDDLESLIPPHPSSENAVVELTKVLSRINKYLSPSSFGFMFWSNPIGHLILRQYGQ

SEQ ID NO: 55898 - protein, 554 aa, Pseudomonas sp. VLB120
MEITDSGGVAAKYGFLYQDCVAAWLATEMLMDRDMRAVRVETVDDVDVVWDGFTEFIQVKAAAEKKWTPTTITENSTSTAVASTKSKPTGKPRKKRIPDSSMVHKSMKQATTPVDKCKFRIVSAERPTGLLEYLRVLPASRAGRPGRQELVDDLNQRTSNFVAASKNDVGHWVDSTWWQVYASEREIELLGIKNIRNAALEVVGVTLSSDAAAEAIWRDIVYTLTKKSALSRKVYCEDDKTYHRNNLIDWFKSEILIHEKSSYTRTKIYANKKLQPILNHFHTHTPSCGSITRCGKVMHQNYSIRNYRYGYISESVIKWIDEILLMPEEIADVNGISTSDRYRTLLSRLKASMAELGDFLGKVLLHSCIRSLHTSQPIPASLYIEKPFEVKVLENVHIVPRAAEGDELWIGFSHLYTGADVVECLQSLRTMLYTDITDNIDSARSKILEIKQDSYLLQHDIDELLETSQAFDTHLNRYRFIVFLGYNSALLTDPKTPGYEPNLLTETKKLFDDFSSDLNTSGFGEVLIELHLYPVPDIDKLLSEVKKALEKACA

SEQ ID NO: 55899 - protein, 724 aa, Pseudomonas sp. VLB120
MLEHYESALQSLQQQSFSAFAYLKTADQLLSNPKYRSSGRELVIRALDSRSRFSAVHALLRHLVRKSGLYPYLKTQFQDLSLAEECVLEAYQTPISTDIVFHSMQYKIYELLLEKRNVILSAPTSMGKSAIVDSLIASGKFNKLVIVLPTVALVDETRRRLEERFGQTFQIIHHGTQRSGQEKILYVLTQERVNDRDDLENIDLFVLDEFYKLAFKRKKDGEIDDEDERVPALNSALSKLLRCSEQFFMTGPFINGVSGLPKTNLNYTFIPTDYNTVAVDIEFFNIKPDSIDEKNEALARTLKQINGPTIIYCKSPGRAVQVAKFLLKSGYVKSVEDDYLAWLDQHYHPKWEYTRAFRNGIGLHYGGLPRAMQQYTIDKFNRGELPFLICTSTIIEGVNTVAKNVFIYDNRAGNFSIDRFTHGNIKGRAGRMGEHFVGKVFCMEDLPKQSDCFEVEIPLGKQTEELPLNFLAGIQPEHLTDFSQSRFEAGTSASKAGKDFLRKHASFKFETIEAAFSFIEICDESEFQSCLFSGVPKTGFANLLSRFVDRVCSGSLKKLGLINNISVINARVSAYLMAPSHEKYLTQQISRIPSGTESEALSEQINHALNFASRIFGHSIPKALALLEDIVNLKLEERGADFRASYGHLRSIFENYHLHPAWAGLEEMGIPVQLLHKLGTLFPIAEEASVDDASRTLHENLHRLQRLTPLERHFIDRALGRVKR

SEQ ID NO: 55900 - protein, 330 aa, Mesorhizobium plurifarium
MGQQSIDPPESHHLETVLAALSRDYSKLGPRIRELKHEVACECAGVTLRLHFPAFRQGKTTVHELVELAWLHLTPFTLTRKEIDAVKALQSTLPFEDFLIKTTQLNDAAAKLFIKAHKATNRNGEAGELLLYLLTEWILGAPQFIAKMTLKTDPQMPVHGADGVHVRYCPETARLFLYWGESKMYGDVGAAIIAAAASIAKSLEPDEQGHELQLVQRNIDFTGLGTEAKAALLRYLDPYEEEYNERKDVITCLIGFDFDGFQKASAAGEQGAEDAFRVLAKEELAAVAPKISTAFETAGLGSQDVELFFFPLPAVQEFRDLFQARIGWLP

SEQ ID NO: 55901 - protein, 844 aa, Mesorhizobium plurifarium
MMQELADKVWNNSGFHDAAHRIELAWLTKEIGGIDDGYADITDATRLMRSAAILACSETADHRRAAFRVATCAYDLFGTGQVPLDQALRMVLTRLGNFPSIGTRADVASARVRLPLVLAAEEIASANAHEVTINGQTVLLTDFQQRLWLNLLQRRRIALAAPTSAGKSFVLQGYLSALFDNEQPKSVVYIVPTRALIAQVAEDLTIQFRGMDQNIPDIVTVPVDAETNLAERAIYVMTQERVQLALGAHPDLSASVIIVDEAHSIADGSRGVLLQWVIDDLLIRNPASQILFASPAIRNLDIFGRLFGLTDLVEFASIEPTVAQNFLVTTVQSATKGELEIHTVGDGSRALRQVATLKLGRTVASRTEKLVHIPAVLGRGHSNIIYANGAAEAESVALQLAELMSDREPTELRLALSDLAKEAVHANYALVECVKHGVAFHYSNIPTQLRRAIETAVSSGEIDYLVCTSTLLQGVNLPTKNIFMFAPEKGRARALESTDFWNLAGRAGRLKREFQGNIFLIDYDKWKKKPLHGPKDSIVTPAIESSLNEHHDQLLTVISGSPRTSKSDNTDLETTFVRLYTDFKGGDLNQTFERAGIAPGDIQSGLVEAALAAASDKLTLPTAVLRRTPSISAHKQQRLYDRLNAKIAQGADVARTLIPLHPRESEAFHSYANILELCHEIILGIDTSKNLHRFHALIARRWMLGVPLPQIIDEQISRNASKPVRTTIRSTLDLIEGDIRFQAVRLFGCYSALLVYALDSAGLVDMASSIPSLPLYLEIGASDKTMISFISLGLSRVTAMKLNEMSARKDLDKTGALRWLRTRPLEALGLSPLLLAEVRAIAIA

SEQ ID NO: 55902 - protein, 283 aa, Vibrio halioticoli NBRC 102217
MGYQSNFLKVSVHQPSNSPVLRAFCVGFEQGMWRGDDFIKHLIKNHLVSFVLPPEEAANVNASNAGTYLARAAQSIYTSEKPEKRGEIGELILYSIMLEHFNAVPLISKFYYKTHANDTVKGFDSVHVTLTEDDSVNLWLGEVKFYKSIDGAIRDVVSELHDHFQAKYLRSEFMWIENKINDGNEYKRKLEPMLDAANSLDDIIDSIHVPVFLTYESKLYADATKATAEFKEQVEAEIQGIYDKFTRKNIPDVNIHLILLPLQDKSVLVSSFDNKLKALQELF

SEQ ID NO: 55903 - protein, 698 aa, Vibrio halioticoli NBRC 102217
MSQITTMDRIFEDDNIRTNPFSVLSEVSKIVNGSDDKLARDAVIFAMEKRELFGQYKPILDKLTRSVGLFPYVDFENLDINDKIAYRFNQPTENSDIVFHREQAEVYRALMSGENVVLSAPTSFGKSLIIDKLIATERYDNIVIIVPTIALIDELRKKCLKHKAYKIITHFGQEKADKNIFVLTQERAVERDDIENVDLFVIDEFYKLDPAAEGDEERAIVLNIALYSVAKTAKQLYMLGPNINEIPQALGEKYRCRFFRTDFNTVSSKLLTLKAKPNRKQAFLKLIRTMNEPTLIYAKSPGQANTILNYLIEELPVIESNDDVAEWVADNYHQGWNVVDGYRRGISVHHGKITRSIGQLNVRLFNEGKLKFLVCTSSLIEGVNTVAKNVVIYESKVANNAMEYFTFKNIQGRAGRMFEHFIGHIYTFDEPPEPVDESVDIPAVTIGENIPESLAVQLDDQDIVNESLKNRLEYLHSQTSIPFDVFKELKGVPPSSIINLANDIYDHVSAYHEFLCWKNKPSYDQVDFCNELLFRHLTNGKGGIRSSKQLTFWWNRLRRLGSGKDFIWDVYQNDSNINNMNKAIEASFDFERRWANYMIPRLYSALDKVQKHIFGVFEMPAGDYSSFIAQVENLYEVPELIALDEYGLPLPIAKKIRKQLKLGKGLDETLASLRQINPSSLYVSDFERKFIEDAMKNI

SEQ ID NO: 55904 - protein, 313 aa, Pseudomonas veronii
MEDLKSEKWEKYISTDLKWVDKFFIQHPSQEKIKTKVRVLSVKFSGTEQETLALVEYLADSIKHFIFGRSEIQKFQLEGVEPFRRAAAHFGSTNPVMDGKYGELMLYMLVEAVLKAPMVSHKLRLLTNVNDQVKGGDGVFFGKYGDEMSIFIGESKIHQSFSKATDSSLESLDRFHQNYSSSALSHELFIARSNISENFSLDQLETIYNAFLPGTDEYQSCIKTHPVLLVYDDAGISKIEDECTSKSHAEQLVEKWISKNGLKLSESINGKVDGYKKLKKVHLDFFLIPMSDVGGFKKSLYKAIHNIEFKEDK

SEQ ID NO: 55905 - protein, 871 aa, Pseudomonas veronii
MSQSTKLSEDASKHPGFCSVYDTLLESLFLKKKGISIPEHLSLSVEQLRKATWLASIVATGSSEALKNLANSYGALLFLNDPGNEVYRKACYILQSRTGNLLSSKHVPNIFSSGQYQSNFSTVLDFELSAKRSYLTQEFFDSTTATFTDFQRKLWDTLIAGHNTAISAPTSAGKSFIIQKYIVEMLLQKPSVAFYIVPTKALINQASSELKIALGESAHIYTTYRELEKFDKSVVFVLTPERCIKTLQDEMSKPPKIVFFDEIHNLEDASRGIVFENALYRMVTKWRNTQFMFAGPFIHNVADPIKKVAKIKLVEAATISSPVFQIKASITFKPREKIASYRLFSQTGKVIGGELKLKRSIYSKAKNNHGEAIAAFMDNIDKNDSCIVFSPSKSSAEKWANKIAPIVGMSNASITEGASQDIKDLLEYLADEIHPDYCLIKTLRLGVGFHHAGLPDIARMEIEELYTNNHIKNLVCTSTLIQGVNLPADKLIVINPKVGATALTQFEFMNLIGRAGRASTNLYGEVYCLDIIDEEWAAGRITDNKQKTIRPSVVSALEDNFERIYQLVDKERSHIVEVENGEKLYPTISYIRQLHAADSTHYQRILESAQIPDKYRDAIAKKLAPVSSSLSIPSELLQRNPYIDPLLQNKLYKLIVAEPLEDWITTKFAVSRKSKGGVDSSDEPTFYSQFESIAQKLNDVFNIEHEINSNRWGSYISIRRLVYDAYYWMAGKSHRYFIERILNEAVGEDEQEDPKVDSAARFVTDHISRNITFIMVKYFSLWSDIVSHTLTEEQKEENAYSLSLPAMIELGSFDPKVLELMSLGINRSIALRLRKMIPSEVVDLEEWVKRAPLRGLPLLFSRYLKRSGYRT

SEQ ID NO: 55906 - protein, 320 aa, Myroides odoratimimus CIP 101113
MDKLDKFNIHFDKSLKEFCPDIDIEIIDGRDVLSVANDFSDNKWQYQKFQNFIFNNIARTALSKRERDNIIDNSYGTLVESAKKLRLIDSKNELSDTEGSELAEILLYGIMHHRYKALPVVPKIFNKQNSSDNAKGADSVHIVVEEGDEFSIWYGEAKFYNSIEDPRLYEIVNSVLNIFSSSAFNTENRILSNSNDLREYLKDNLALYEKIINVLDTDSPIDYVKARLNIPILLLHVCDITKQQMVNNEEYIEGILDFQKNRVTSFYKKLYNKAIKNNSKVQPVINFDKIKFHFIFFPVPDKKSIISNFLKRAENLREEL

SEQ ID NO: 55907 - protein, 706 aa, Myroides odoratimimus CIP 101113
MIDYFERCKLLFDYIKVDKYLEARNGVIHLLHDLKENKIQYDELINHLIREVGLYQYIDDETSNWNDRFAKESFKVDTGAGFQTIHLEQSSVLKLLLENKNIALSAPTSFGKSFIIDAFIANKKPNTVVIVVPTLSLTDETRRRINRKFGHEYKIITTPNIKISDKNIFIFPQERAIHYSNIIEEIDLLVIDEFYKISKVNDKERAVKLQEALIKLDNKSKQKYFLAPNIKSIVDNPFTEGMISVEKLDFNTVILSHHKLYNEIKGNENLKEKYVLEICKKDKNLIYAALFREISILQELFLNKYEDKKDKLIVDFSNWLKTNYDPEWSFPNLILKGIGIHNGRLHRSITQYQVLLFDDEKSGLDSIISTSSLIEGVNTSAKNVIIWSIKSGQGNNNLTPLSYKNIQGRAGRMFKHFIGNVYELVEPKLKDSDNIQLSIEVDTSLIGGIKNESYLSQISIERQQVAEDNINKIESVLGEGMYRYLREENLLASNDEELIYKICVELRDNYVEWKGLKWLNNDDPEKWWYILGKLCFLNPQSLRWDSSRDNNQFNQAKKFIQILSKSWSTSLPNLMIELKQEGLNIDDFFALEKRICHNFSGYLNDFNNLNKIINESDFIDISNFISKCSNGFMPSIVLELEEYGLPRMITKKINYVKVIDFERAEMNIEYAIKRFHSVGKDKIIVSSKEYLDNFDIYIIDNFFENI

SEQ ID NO: 55908 - protein, 308 aa, Bifidobacterium boum
MGNPISRSLPDVSMDSVFTEVMHNEKLGLRNPEQLRLFRLQVSNNAFVYTSLEDYLTDIISEYVFSRAQIEKLSQPGVGNPRSIGNKALRVMKRNGAANQKGTGNELGEILLYAFLEEKLNAPKIFSKVELNAGTTPFGTACDSVHLLDLGDDTGMSYYQTVFGTSDIEGDIADAIDSAFDAIVRIENENGNGIQFVDNRSLNDSFDENVVDKLKSIIIPKPGAPVANDRAYGVFLGYSLGLDPHTRSTPEFLKDLGTKMDTDIKNHAAYIADKIKTLGLDTHSFYFYIVPFNDAKLDKKQVMENLLM

SEQ ID NO: 55909 - protein, 887 aa, Bifidobacterium boum
MSRKRIRLGDAIFTDIEENEYLNCLYEGILFNYANKTLHTQLEYRNVNIHDALRFADLLSKSNSADKAEQHKMWAQEIVVLLNALYPENDEIRVVAGSVFANTDNARGTSLLDANFEDPFVLNRIFSDYKKDYLRIPAAPNLRFFGAQKQAYDHLQDSYFSYSAPTSMGKSFLMRMFIKEQVANGAKLNFAIIVPTKALINETSQKIIKEDLKDLLEEKNYKVVNAASDIALDGNHNFILVLTPERLLYLLIGKPDIQIDYLFVDEAHKMSGKNSRGPFYYKTVDMLKNRDNPPHFIFASPNVPNPEVYLRLLTDIGEHGDKRFRTEFSPVTQVKFLLDLQNREISVYNEHTEKEMHITSIPQNKATLTHFLLKIERRNDDLPEDAMRQTIVYFNGKTRAVEAALDLSQYLDELDDEDLAALSRDIANEVHGDYYLAKIIKKGIAYHIGYLPAAIRMRIEDLFRKGKITTMFCTSTLLEGVNLPADNLFITDNKIFRSRMTPVDFRNLIGRVGRIEYNLYGNVIFVSSQDEKLPETEYVKMLKEPVPEQTLSIDAGPKTLTNPERKYIVEALKEGNIELVKRNKAQSEESYIMMRKFGLILLRDIMTDNNSLVRQSFSDLISKDDAALIKQKFEDPIALPDDDINVSADQTRNLIIAIRNGLEYPKAVNGEFDYDEVVGFLEKLCTIFKWEKYEYSTLGKVTDGVHKKLRWYAVVLIQWMSGLGLSNIMRQGIRHHVQHPDNFWISKTQTTVYKDNVEFRNILFADTLEVIDNIILFSLSNYFLRFSNEYKKIYGITEFDNNWYEYVEYGTTKPVTILLQRIGFTRENATYIREHRDKYILQESESKLLLSRDLLECNNQNVREQANMILLNMPEMFEPKGESGRQA

SEQ ID NO: 55910 - protein, 301 aa, Bacillus clausii
MNLSITSNDFLKIFKHLSTHDINNTSSKVNLFLCPINANKFDYNRIIEELIEPVADFAISRKVKKSYSNKPMKLSKVARERFVEYKKNTGELGEFLLYCFLEGHLNAPKIFSKLEMKTSTSMYVNGSDGVHFLKIPDGNYQLVFGESKTIKGLRPALNDAFKSIYQFITEVNDKGAAKSGINFEKRLISDNLDHEIWSEEEKKFLTKLIYPTSEEDFNVDDAFGIFVGFQINLDGEERKLGNNEYRKKVEAFVKSQLLKELEQIEHLINKYNLYGYSFYVYALPFTELDKAREQIMKGLTT

SEQ ID NO: 55911 - protein, 853 aa, Bacillus clausii
MSFLNELAIKAINDPYLETLISKLEKIYGYNFAGNTIIKLNGKEYTDLLRFSDILCRSDLTEARNLSYKIISLLYDFYSEDIFFKMQATTVLVKLGNFPSLKLAIGSDEFNLDEIKVESIIKETYQLAPDSKNIFTDAQYKVFEELKDSNHFSFSGPTSFGKSFIIESFIKHLIKERNASDNIVILVPTRALINQVKNKLKKEILVSKYKILSHPTVPLLFRNKGSKYIFVFTPERLISYLSNDNPAINYVFVDEAQKLLTENDSRAPLFYHALMLAKRKSINLYFSSPNIKNSEIFLQLFGNSTDDTLSVTESSVAQNRFFIDCVENKAVMFTENGEEIDIPYDSFNTNEHESLKNAITILGREVQNIIYCNTVDDTIGYALNFAQNLEAKSNPNLDCLIDLVRTTMHEEYYLVDCLKKGIAFHFGGLPQRIREKIEVLFRNKDIEHIFCTSTLLEGVNLPAKNIFILSNAIGLRKFSDVDFWNLAGRAGRLTKDLSGNIICLRLKNKKNRWDKPQKDLKVVKEKKVNKVESILMTNKEKFYINIGNSIEEKPFTRKSLSESKKKMFETYGNILSYHALSRTESILRSKFIENNKDGTKILNKIDIKNEVPKEILAQSMNIKLKYQNKILKKGEDLPNIPNEVDYDACLKLLITLYDYYNWRDEESKGKRRLGKNKKVLSYYAVLMNSWINSKPLNLIIKDIIKYYVSNKKDILLGNNFYEPFDPSNRNHINKVVNNAVSDIENVLRFKVKNYVSNYILLTNKIQEYDRLPGKIDWSEYLEYGTNDKIIIELQNLGFPRHLATFIKKNYIQFFIIEDNVITDFREIELKKHFNKVLHNEEYVELAEILDWKI

SEQ ID NO: 55912 - protein, 305 aa, Erwinia pyrifoliae DSM 12163
MDFEILFDDTVLTLFPPLEANNFCNNKFISMINDFEDGGWRLKKFHRFVWDNIIETALSFKEREALISDPHSALASAAQNLRLTDKLDDISQGSELAEIFLYGLMKHHFKALPVVPKIFYKQNVQDNAKGADSVHIVIDEAGEFTLWFGEAKFYNSIGNDRINSITESVKNSLNTDKLRKENSVILNVNDIKELILDEGIKDDIFKCLSNANSIDNIKGKINIPILIIHECNTTSKATCISEAYKKEIIDFHKERTVAYFRKNRQKIQSLFGYENIKFHLILFPVPNKKSIIDNFVKSVSFYKEQ

SEQ ID NO: 55913 - protein, 710 aa, Erwinia pyrifoliae DSM 12163
MDSFNKTIGDHHEYIFDICRKISNLIQKNNETEARNTLIKLLDYHYRNELDYTPLVNHLIRNLGLYPYLRVNTSDWQDRLIYEAFKVDVGLKFPVTLHREQSLVLKKLINGTDLAISAPTSFGKSFIIDAFISIKKPTNVMIIVPTISLTDETRRRLHRKFSAEYKIITTSDVELGDKNIFIFPQERAIGYLEKINQIDILIVDEFYKASEVHDKERASVLLKAIIKLSKKATQRYFLSPNIDQINSNPFTKGMEFIKIDFNTVFLEKHDFSSEIKNDDSLKGKYLLEILNKSKGKSLVYAGTYKNIDKITDVLTKSSVNSSSNITTQFSNWLRENYSTGWKLPKLIENGVGIHNGRLHRSLSQLQVKLFEESDGLNTLVSTSSIVEGVNTNAENIIIWQSKNGSRNLKDFLYKNIIGRSGRMFKHFIGKVYLFSAPPQEEFSELDLTIPDSLITDIDEKEFSDSLTPDQIAAIISYREEMSTLLGEEKFKRLHSEGAFKSNNPSLIIQIAWDIIQNPREWERVYFLNTQKPDDWDSYLYKILKLQPGSWGIEYSKFVAYIKSASENWSKTIPQQLIGLSSNNISIDNLFELEKNLTHKLTSLLSDINVLLRELTAKNNADISSFIFKCSHAFLPPIVFQLEEYGLPRMLSKKIQLKFLLDFDKENLSVHQAIEHLKFIDSIIGLAEAINASEFERYIISNFIDGVTLQK

SEQ ID NO: 55914 - protein, 305 aa, Erwinia pyrifoliae Ep1/96; identical to SEQ ID NO: 55912

SEQ ID NO: 55915 - protein, 710 aa, Erwinia pyrifoliae Ep1/96; identical to SEQ ID NO: 55913

SEQ ID NO: 55916 - protein, 323 aa, Herbaspirillum rubrisubalbicans M1
MTTYVDEHQPEPHFDGLLGNRKVDARVRKCEIHEEGLPPVSAHFLYPVFRAGKPTVPELVKMLVREITGFCATKRQRREAKEKDFKSKYDSREWEDLADWAKGLFIKADASSGRSGEAGELLLYVFIEHYLKAPLVLSKMRLKTSPAMPVHGADGVHAMWDVDGKRLTMFFGESKLHERFSSAMSDAAESIGWLANNVNGRMDNELQLTTGHIDLDGFPAELQEYLLRYLHPYATEEGNRRNDRFAILIGYDYAAYEKLIAIAPDAAEERFLESYRENLRQKLEAAQSHLQRHNVSLASVDIFFLPLPGVKAFRDAFNEELRG

SEQ ID NO: 55917 - protein, 856 aa, Herbaspirillum rubrisubalbicans M1
MDNFNQQLAYRVANHQQFQDAYATLQKQSLASLSGKIPELEIAEKNRLLRSALILAQSKKQEYATLSQDIVYALATLQLENSERLVCQHILAILGNFPASDFLRGDRSKFANLPWQLQLAEQVRRDENFVKILGEDVLLTDFQVDVWEELAERQYLSIAAPTSAGKSFLIQLYLKKILSNTDRLVDIAYVVPSRSLIHEIQAALTRAFQGFENAPLISSVPRQNEGLAASQSRIFVFTQERLRTAMDESDLMLDYLVVDEAQQIADGARGMLLLSCLEEVRKNSPRAQILFITPGSRSGGPIGSLLGLGQLPTVETALRPVRQNLIYVRFRSLNQKQYLELTLHRANQEPLALEKADVEGPPVFAAGARFFRTIMTLGDEGQNIVYASTKKTAEKIAIAIANELRERNEIPKNPISLLELSDFVKRHVHPEYVLAECIKVGVAFHYGSMPTTLTKAIEEYFSKGAIKYLVCTSTLLQGVNLPARNIFISNPYKGNGNPMGTEDFWNLAGRAGRLSKDTHGNVFLVEYQHWDSAPVDEPRQLEIIPSLSKAFSTARPEMLRFMRNENHESGLRKTNFAESVFTRLFIDAKEGLIERTIERANMGKISEGAGVLKEVVEGHLNKVLLPPEILKRNASISPLRQQAMFDVLLAEVQKGRTRHLIPPHPRHPNTARERMEYVMSLIHQHLQGKETRRQRYFGWFSISWMRGSSLADMIEYQLRKARREAEEKGTRPPEPGEIIVKVLGQVENDLRFHYVRYIGCYIDLLRYAFEKVRPGRSIEIPAIPLFLELGACSKTMISCMELGLSRIAAREVTDLLGKEGLDAVAVKFRLKKMKISNFSLSPIIVSEILRLGLANA

SEQ ID NO: 55918 - protein, 239 aa, Delftia acidovorans CCUG 15835
MEWLPEFCLSFSEHESIKGTNAVSQLRAAAQTVYDTDKYDRRGEFGELLLHALLRETKQTQLAISKIFFKDSVNNTVKGFDAIHVIDTPQGLELWLGEVKFYKDIGKAISDVAAELEVHFKDDYLKKEFLLITRKLDPAWSGTPKLKELLHRNTSLDKVVSTIVVPVLLAYESATTQAYTRACTEYTQKLEAELIQLHARFKKANTVTRVRIELFLFPMSSKADLLDQLHKRLIAAQNI

SEQ ID NO: 55919 - protein, 712 aa, Delftia acidovorans CCUG 15835
MSYADLRNTLADRNNGSEFDPFKFLADLSAFASLADEDDKLQEARDILIRVLEDSAKFKGYEAIIQTLLRNVGLFPYLDFKNVDAADQLAAEAHRPEAMPENIVFTAKQAEVYRELMAGRSVVLSAPTSFGKSLIIDAVIASNKYHSIVVVVPTLALVDETRPRLLKFRDRYKIITHLSQEPSERNIFVHTQERVVENSNIKDVDFFVIDEFYKLHIEDSAEGDERAVLLNHAFYKLAKRAKQFYMLGPSIHELPDGFGPNYRCLFIRTDFSTVASDSHLVPEGRDDISRLKALVPNLEGPTLVFSGSVGGARKFGRAIAEVRSEFSPKEALKQTIAWLSANYSPNWGLVNALSRGVGIHHGKLPRSIAQLLVRLFNGGFLDYLVCTSTLIEGVNTAARNVVVVDNKINKKKYDYFTFNNIRGRSGRMWQHYVGHVYLFNSPPDRELEFVDVPVFTQNESAPDALLVQLEQQDLSDDAKARVNKIWNQAVLSPQTIQQNVGIDPQGQIELAREIEARLQELTPLLCWTGQPTYDQTKEIFDLAWRHFKVKAGSGVRSASQLTLLVNRYRKNPDYSAQLSAAIAGKIGDETDEALESFLEFARQWLSFKAPRLVSAVGRIQGDVLLRHGIRPGNYAFFCTQLESLFINPVVIALEEYGVPIQIASRLAPMLGDPKTLDEALAGLARRRPAEFSGLTTFERVLISPLCARPAAQ

SEQ ID NO: 55920 - protein, 451 aa, Lactobacillus selangorensis
MKLRKTPKKLGSKMAKEANFTYLIDLVNPYLPDAADTSKEETVSLIIEYASDNQYSPMPASSTLNTYATDGISRSASKKLLNLINKETSSLEEYFNKIGADQLTLIAKKLKKDGISPDVYRGKAPALLANLFTEEFEKVASRKNRRKQKIPTKSEDKDIFTKTVSDETFSTVFRQVNASEIDAVKNRNSIHAFVLKPELLPFSYTNLKNLVTSNITSYAIARGVSKTDVVGLQAANLLRKYAKSGIPNNLLGELLAYIFLEHEDNALKLYTRAEILKFKRTIDSEGIYLKRDQGKTQLILGASQLNNNLEDAINNVVKKIATFDNNRSNEMVLATNIVDRSILRTQFGEDKSNAIIKLMAPTETDFEDIASYGIFIGYKFRTQLDLDDCTQEEAKEKCRQAINCDLEQAIRQLNIVIQQHHWQKSSFYVYLLPFTNAEEDTHAIMKDLIGE

SEQ ID NO: 55921 - protein, 870 aa, Lactobacillus selangorensis
MPQQEKRLGEYLYEYLENDDYLHKLMSILSKQYGCWLFHLDWKLTGKQKHDLLRFADLLSKSINKKGDSRQKNSALKIVATLSKMYPNDPEVSLITNEVLTSFNNFLPRQGQSYTLVPTIEQLWNEALVNYQKEKRQIPGEESKSFIGKQDIIFKSLSNELTSFSAPTSMGKTFLIEKYIELQVKEGVVGNFAITVPSKALITEVRVQLIKDLGAKLGEKQYRVISHPEEYRVDYEGSYICVMTPERLLALLTQYSEARLIHLFIDESQKVTEASSRSVFYYEIFDRVSAWENRPKVTFASPLIPNPGIFKKLVQTAASNDGLRIVESPVTQVEIIFDRYANKAEVYDDLNQNTISIGKFKETLSVPDIIRKMISILGNSNCNLVYYGSKVNAISDAVVVSRSMEESNDTRLIELADYISRKIHPKYILVKLVRKGIAFHTGELPVDVRIRIEEACRQGILKLVFCTSTLLEGVNLPADNIFVTTLQNGKRTLSQLDFLNLIGRVGRLGHSMLGNVFLITGDTANSHSNRAAYLSRMNNRLKKAKLSVDVIKPKQAAAIKKSLEKGDVRLDNIEKDKNYDLIRKLSLLYVKELRNDHHGVVRIHLAKHITYKEERKILQSLQERYADELEDDINFSSDQSESLRNKISQENIKGYPNIHDGEKLRWPEAKAFLLKLSEIFNWAIYESDFVKSKQDKETQDKVIEDDAKIALLWMSGYSLQRICDFAIQIRDPERGDTRFLNRVRQYHENTPNIDWETITINLVMKRLQNLQFVLGKYFLKVTQELTKSGMPPQNDWYRFMEYGTDSDLRIWLQQNGYSRESSEYIEDNKDEFIIQTDNNYFVSKNILKANDLDAVSETKEIEINVPEIFI

SEQ ID NO: 55922 - protein, 451 aa, Lactobacillus selangorensis; identical to SEQ ID NO: 55920

SEQ ID NO: 55923 - protein, 870 aa, Lactobacillus selangorensis; identical to SEQ ID NO: 55921

SEQ ID NO: 55924 - protein, 212 aa, Microbacterium oxydans
MKRAIRATFGNGNDRGLPGEILLHAICRQLYGSSTVLNKIYFKTADNDTYKGFDSVHCVHTVDGNLELWLGEAKFYRSAKRAIDRVIADFDTHLEADYLHTEFAIVSQKISASHPHAEDLRKLMHPNTSLDEVFDRLVIPVFITYDSKVTNAHSKDCPEFFDEIRDELDALHDKVTSAFGDDLPVSVRVFFLPLADKAGLLQALEKELAPWK

SEQ ID NO: 55925 - protein, 704 aa, Microbacterium oxydans
MEMTFRQARTLLKKGLLSDDNAFEVLGALGRETSFGNRDAARDAIFWALGQRTAIPGGLSPLMESLLREHGLFPYVQDVLDMPLGDRLAYAAHRPDADMGRDLVFHAEQAKVYEHLRAGENVVLSAPTSFGKSLIIDAYLAEKSFTNAVIIVPTLALMDECRRRLTRLPGDFKVITHGSQKLGERNLFVMTQERFIELDALPQIEFFVVDEFYKLDPSHGDVERSAVLNIALDTLLGTGAQFYLLGPSVASISKLAEARLDTTFVHHTDFTTVATDVRRIETEDLTEAVPEICQELDGGTLIFCRSPKRTREVAEWLLARGVGGGHNLETAADWIGEAFHEEWTLAKALRQGIGIHHGKLPRALGHHMVRLFEEGRLPYLIVTSTLIEGVNTSARNIVIVDPTVSTSKYDRFTFNNISGRSGRMSKHFVGRVIVFNEPPADDGTAVDIPALSQSTRLDDAVLLQLSESSLSDGALERLREIERTSAVSLSTLRRNKGVPVAKQMEVGAALRDNRQRWQPALSWRTGVPGVEEVKRMGDVLVQLTGTGNVVRSGKQLSARINMLRHQGGDVAALARQEMERNGKSADEAIEDTLDFARNWMQFKIPRALMTATSLGQDVWGPATKVSNPLAFVAQLENMFMPPFVVMLEEYGLPTSTTMKIKDQLGLDSAESLDEVLDRLREVRQVPRTMGPFEREMIVDTIRTI

SEQ ID NO: 55926 - protein, 326 aa, Chlorobium ferrooxidans DSM 13031
MSSLSENEIAQQNPSLYNSLHPLLRVIPTELNGYLEKVACKVSVPGTKTQAHCYFITLDGNRRPRVKDFARFIADKIADFAIPRSEIERALKEAQDKNSVAPIARLNKKANKLFTTLPNSGEGGEVLLSLLAEAFIEIPQIFTKMVLKTNSEMHVHGSDGIHAGVNNDGHLALYWGESKLYKNANSAIKSCFNSLAPFLLDTGGSDSNQERDLQLMRDGLSLPDPALLNALKHYLDPDDPMFKKMEYRGLCLVGFDSDSYPTSPNSKEIQEVKNAIEEVFMQSKEKIHEHVTDKKIESFTIEVFCLPFPSVEEFRMAFRKELGLAK

SEQ ID NO: 55927 - protein, 861 aa, Chlorobium ferrooxidans DSM 13031
MSKSELQNWLFSNKGFQERYRHVVIDSVTNQFPALNRLPSGEKHDWSYLLLCASLLAQSADGNCQDVSLRIAQFCLQANNLQSEYKDAAAVILDILANQPAINLAEARNLIECGFEDRLPHNMLCEWIRRSLENVISLSDCRTLSVNHFQREFWGRTKQNNWISISAPTSSGKSFILGQWLADYIRSSPCATIVYLVPTRALIQQVQQDLERVVKSENIPLVAISTLPLLSAYKPGVANVFVFTQERFHILIGERGANLSVDLLIVDEAQKIGDNYRGVLLQQAIENTVHRNKNCRIVFASPMTDNPDVLLDDAPDGVISGDIVSEDTMVNQNLLWVSQITGKPKEWEVELILDGKSECIGQIALPSSPAPDSKRLPFVAFTLGSKDGGNVLYVNGSADAEKAAKQLYDLLGKDADISFDEEIDELVDLIKKTIHSQYSLSRVLLRGVAFHYGNIPLLVRTEIERLFCSNKIKYLVCTSTLIEGVNMPCQSIFARGPTKGRGVPMTPSDFWNLAGRAGRWGKEFQGNVICVDTKRNGVWKNGAPLRRSKFRITRTTDQVLSSIDALLEYIANGTPRDEAIMNPNLEYVFSYLMSCNIQNGSISNALWSRRFPEDVIQRINLLLAEISNTLSTPHDVILRNPGISPLAMDGLLGYFHERTEYRKMSVEELLPPPPESENAVNGYARILMRINKHLGDVFGREGRVFQLALLIVNWMKGYPLARIISSREKYYGNDNLAGLIRNTMKDVEEIARYQAPKYLACYVDLLRVYLERINKPDLINRLFELNVLLEFGVSQKTQLSLVGIGLSRSSAIALSELITDDSMSEETCLTWLHENDWMTHDMPALIKREIRTVLDRKKRSY

SEQ ID NO: 55928 - protein, 539 aa, Pseudomonas sp. M1
MVTTPRPSNKGGPAARQGFKYQDHVAVSFILKMLADSSYVQIECETADDIVAVKQSAGSTINEYIQVKTTEKDGKWNLKESTQLENRKPDSSLIQKSLKCDVRPGPACFRIVSKRDVAKVLEDFTQELDKRVTPDGATAQGIKLAKRFPKSISAMGRNLSYWADHFVWQVCGKVNALESINLRLLSEVIEFYGENPSHRQLKEIYANFLGWADDAATADVKIAPQDKIILRADALARLKALLDSASKQANAFAKPYKSKPDPFLVEFHSATETGLLRSISGFDVEYDFEEWRSDQFAEHLVQWLPEFCLRASEIANFQIHQLSSALAKSISMLDQTPGSRDRLIAELILHAILRHRENSEPIACKAFYTVNGKLSEFGNAHVVQSEGEVDQLWLGISRMIYTGTMDQTLKDICNVLDATISRAALTEEREIIVTLREPQHHRPNAEAFNKALHKNAPTQDMLKVLCFPVLLAYDSEVLAGGFLADYVANLKTEVTQHYKTLLSTLPSKIQQVRVVVFLVPMESIRQLVQKFNSLCKAVS

SEQ ID NO: 55929 - protein, 714 aa, Pseudomonas sp. M1
MKYEIIKQQLESLGGKDSDKTGLLAGVTQIVNRGKPEWEGRDLVIRLLDKFAFLDEIEQSLLLSLVRTVGLFPYITEHVEQVSAADRLAYEIHRVEGVEKGLVFHRLQANVFHLLMQGRNVVLSASTSVGKSLVIDAVLAQGKFRKVVVIVPTIALIDETRRRLVKRFRSVCNVITHPSQEAKTGLINVYLLTQERVLQRDDLNDVDFFVIDEFYKLDLASDSEEKNRSVDLSLAFHKLANLGAQFYLLGPHIHNIQGLDGYEYNFIPSNFSTVAVDVTYFNLRTRGDERKEKLLELCEQLTSPTLIYCQSPASANRVAQLLIDRGNFPSLPETKDVSDWISSNYHPDWNVAKAISLGIGIHHGGVPRAIQQYFVKLFNERTIRYIICTSTMIEGVNTSAENVIIYDRRINKNTFDFFTFKNISGRAGRMNQYFIGKVFMLEEPPEEENLTVEYPIGLQDSTSPMGLLMKLEPEYLTDQSRQRLEVVYSTPQLSSSTLIENRHIPVDRQIEVADRIRRELAISHIWLTWKGNPEQKQLEYLCTLIYDHLPHKLQEFSIHSGLQLAWHINALRAQKDFQAYLQQAIDEDPTDRTPSESIGQRLKFIRNVISYRLPRDIMALSKIQADVFTRIGIEPGDFGFLAEQLENLFNDPLLTALDEYGIPTQISTKFKSAILPAEGMTQLMEKLKQWAPRLEYSHLSRFEKSIVKWAIEDM

SEQ ID NO: 55930 - protein, 102 aa, Clostridium sp. ASF502
MKKEFLESLIYPTKNRNFDVDDAFGIFIGFQIDISDEEKEMPTSDFRKLIKSRVDIEVSKYLVSIQQKIIDNKLQGHNFYIYVLPFTDINSKRQRIMEAITQ

SEQ ID NO: 55931 - protein, 848 aa, Clostridium sp. ASF502
MKWLEAMVRRALNDPYLDELTRKLEYKYAHIFLYQKDDILLTEKEFDDVLRFADILSRSDKADGRNKAYKIVSLLYDVYKDNVQFQYYANSILTKLGNFASLSIAVGNSEIVDTIETALEKQIKKTYQKVPFNDLVFTDPQYKLFEAMKDSNHYSFSGPTSFGKSFIMDAFIQYIITERHGIDNIVILVPTRALINQVTARLKKTITNKNYKVLAHPVVPMIYRNRMLKYVFVFTPERLISYLGEKENPVINYMFVDEAHKIIAEKDSRSPLYYHAILLAERKSIKLYFASPNIPNAHVFLQLFEKSIDEQMIIKESPVAQNRFFIDYVEGKGRMFTETGEDIIFQDLGKKEQDYVGKLLRKLGKNCKNIVYCNTVADTIDFALKFSKGLPEQNDARIDSLIELIKSYIHKDYFLIDCLKKGVAFHFGRLPQRIRERIERLFEEKVIDYMFCTSTLLEGVNLPAKNIFIFSNAIGNSKFSDVDFWNLAGRAGRLSKELSGNIICVRIEDKKNRWDNPNKDLEVVRNKKIEAVKPLVINGQKNFYTNLDYSLRNKDFTRANYSQTEKEVWDHYANIVFSHQASKTDSILMSNFLRKNADGKKLLERMEKENHIPLYILEQCSNIKVIYQNKVWEKIKESESAFPNEITTQTCLEVLEKMYDYYNWGEEESKGRNPMVKQRTRLQYFAVLMYSWMKSTPLNMMIIYIINYYKRKGEIWDRNEMVIFNPNDRNQINLIINNLISDIDNVLRFKIKNYFLNYYLIVSEKVGKQNAGANWAEYVEYGTTDDIIIELQNIGLPRHLSMMIKDDYIDFLTFEDGMLVDLNARELIENIDCKKYKNEIEELKEMIL

SEQ ID NO: 55932 - protein, 306 aa, Pseudoglutamicibacter albus DNF00011
MAHATIAPTLRGDTFASTFTEVKHSNTLGLRNDEQLRLFHLSVQNNRFDHTALVKFLKRNVGRYVFSRAEYEGYKQRDDLEEVALDAVNRMRSQQDGMGLGEILLYVLLEQILEAPKVLSKIELNQAQGQIHSRCDAIHLLTPDGQRTTSSIVFGTSSVVGNIGDAITAAFDRVVDIEQNRSDEVQLAENTVFTKTLDETTAGYVKDLLIPKPGGAPVFDTAYSMFLGYDIGLDPKNYGNQQYRAALDQKMQGDIAAHAQMIANEINTRNLDNYSFYIYVLPLNEVDVDAVAIMDGLVGGQGGSHV

SEQ ID NO: 55933 - protein, 890 aa, Pseudoglutamicibacter albus DNF00011
MGSWAGKVVAMSDKQVTVGDLVFADIDSNEFLKQLYANLLYNYGLHRLGLVDRQPYDVDLEAALRFADLLSKSTHPTNRDQHRVWAQEIALLCHILYSEDVRTKAYVPAIFTTLGNYPGLKQLGVTSDAGILDVAFNAYQAEYLTVPGDKSMKFFAPQKEIYDRLTDGKFSFSAPTSLGKSFIMRTFITNQIKSGVKANFAIIVPSKALINETRSKLIADLGEDLERHNYRIVSAAGDIVLEGDHNFIFVLTPERLLYLLIGKPAIEFEYVFFDESHKLSGKNSHAPFYYQTVTILQHRHRPPHFVFASPNIPNPEVFLRLVDPNSDENETNAVATQYSPVAQFKYLVNLHENSISSYNDHTQEFTHLASLQAQDATTQGVTRFVSESSRGSDHRGQTIVFHSARHHAVQAARDYAQGLADLNDKDLDALAKDIERDVHEDYYLSGLIRRGVSYHIGYLPPAIRERIEGLFREGKISTLFCTSTLLEGVNLPADNLVITTNKIGRAGMTAVDFKNLIGRVGRIEFNLYGNVFIIVGDQLASERQAKELLQANVPEQKLSVQTDSQIISKKMKQGVVADLQEGQIEFAKGDESYERYNMKRKFGLMLLRDITTGRQSLVREEFSDYLDDQTVSQIRESFAHREGQQDDDINVSVDQAESLTQAVRAGLKYPHISPDGKFNYDETLAFLQRLASFFKWRVYDPETLGKTDKYSNQLTMLRWYTVLLTQWMEGHGLRSIMNRALQYRLQQGTLYIKGQGEIRYENTLQHRNIVISEILKVLEDVILFSLSNYFLKFSNEYKKVHGVEQFDNDWYEYIEYGTTKQETILLQRLGFTRESATYIRTNVSNAIFLHEEKPYLNPILLESSNINVRKEANEIRYNVPEAFSMPDFMF

SEQ ID NO: 55934 - protein, 301 aa, Leptospira alexanderi serovar Manhao 3 str. L 60
MELKTSVPKNFLDLFYNEIECEIPDTQSKLNLRILKIENNRFCYDDLVEKLAECVVHFTLSRTSLEDLSVEGKYSKPYREAVRRFRDYTNNDGEAGELLLYCFLEAHLNAPKIVSKLELKTSSNDYVKGSDGVHILKLDDKEYQLIFGESKLHTGLTSSLSEAFQSIHDFIYRPKNNINHEISIINTQLLKEAYDEDLYKLIKEIIIPKANHPKEIKKDNAFAIFAGFNIELSDVEKKMGNREFEIHLRNRIRSEVEGKKENIKNKIQQHQLYGYTFYTYIFPFIDIENTRKKIIQKLTTP

SEQ ID NO: 55935 - protein, 861 aa, Leptospira alexanderi serovar Manhao 3 str. L 60
MIIDKLTEDILQDEYFWQLFKKASKMLAHNLFHDNINDNYFSQKDLCDLLRYADILSNSNKPQARNKSYQIIATLNEYYRNDPKYRTVSHAVFAKLGNFPGINYLSVSDKNKSELPFDRDIEKKIKEKKQEIPNSDGLIFTDVQFDLFEKLSNSDYFSFSGPTSMGKSFIIKSMIRKIISSDKKSNIILMVPTRALIAQFSNDLRKEFNNTLIEYGYKIMTTSSVSDILTEEKSSYLFILTPERLLSFLSNKKSPNITYLFIDEAHKLASILDMRSITAYTAVEKAIKANREIKLFFSAPNVSNPDIFLKLFNKEKPNTYHTIESPVSQNIFFVDLIKSEVTHFTGYEKYLFTPEVLKSIKKGDEFIRKIGSGESNIVYCSAKAKTISKAMELYNILEQDEEDDFYKSNEIISKQIKNYIHEEYYLAKLLKRGVAYHFGNLPQLIRNKIEFLFKEGKISYLFCTSTLLEGVNMPSKNIFILNNKKGNTNLEKIDFWNLAGRAGRLKFELSGNIFCLRETEKEWKSKNLLDDSEKIQIEPTIERHINKNLKEIEKIIKDQEGQIDKKKLKEILKYIANVISIDTLEITSDYKSNIIKKLIEENKDQIIELSKNKFKNLEVPISILNVNQSIKVAIQDKAYKKLKSFSNKEDIKLPARVDYNLAVVWLNRLHELFEWETEEKEIFKRTNDASKKRNMLSYYALLMNKWINGEPLSLIISHSLKYHRDNAIQIYDENRKIEIFNNTAKHINIVIGNIIDDIENVLRFSFEKYFNNYYSILVEILGEDNAGPNWAIFLEYGSQNPTIIDLQIAGLSRHSANFLFKNHTNCLNIEKGKVISINKEKLRSSMNNESIEYEEISSLFF

SEQ ID NO: 55936 - protein, 320 aa, Burkholderia ubonensis
MTKANDGFSALLDPIKGVDNVLKEVTATPLLEQPRLLFLRMQEHIPQVDALAELLVDQLVNYVIPLRKRRDAFAQSSNSATGGDMSAMSRLRREAKRLLVKYNEKHPGRYGEVGELIAYVVAVRYLGAAQLGAKMALKTSSEMPVHGVDGLHGSQADDGSVFFYLLESKLIPSATDASREMVDSIAEHQADHGRMLNELRLVSDLSNLDCLEGEAREAAKSFFNSYTGDGSHLRRRDVHVGSLVFSESAFQDKLPRDLKKPPEIHEQHLEKLYAAKHETFSKNLKNQADAKGVDLGGCIVFLVAIPDVNEFKRIFAELNT

SEQ ID NO: 55937 - protein, 875 aa, Burkholderia ubonensis
MSTFATEIAIDIRREPGFWSDLAELRAVGIRSTVLQANQQVRVDGPVLAEKALTRLLNTASVFASAADEESKELAQQIAVFASLASSEDIVHEASIRILSDLGNFPGLRKLESAHPVDLGFETHMRRGLLRELNTVDMAGVRVPLTEYQLDLWRSLDSSAATAVSAPTSAGKSFVVLEHLCERAMAAERFAAIYIAPTRALLTEIHGKLEKRLSSISKSIRITTIPVPDPESRPKQIYVLTQERAQFLLSTVAVAGLIDLVISDEAQSLGDDSRGMILQDTLEKLRESNPAARFLFLAPGASGLQLIGDSIGLPDINVKETTLSPVVQNRISVGFSDVDEHVVRLDLVTPKKLEPIGTYQFQRGFALGDDTKLAAVALELGASGRSLVYATGAKNAEDLTALLALNRQPGTSKGLSDLAKFIEQHIHKQYSLANFVRQGVAFHYGNMPSLLREGIEAAFKRGELDYLCCTTTLFQGVNLPARNVFIDTPTRGKGTALDEAALWNFAGRAGRLGEEVVGNVFLVNYEHWESKPLTERKPFAMKAAFKQTVEADFDAVVELLQAAVDKAPILERDRAAGDRITAAAGLILFRSSQKTLDGLLGRRSLSLTTAQKDSLTELADQALTSLELPASVLTTSWMLDPVALAGLLQRIRELVRQRDFAKVMPSNPSGDAYTVYNSIIRRLYKYLGGMNLKGDEAKGNRGFVAHVTVTALKWMRGEPLTQLVAEAVKYKKKVAQQTNKRPLTQAAIDGAIRDMFTLIEQTIRFKLVQWAKAYVDLLKFALAQEGLDEMVSQVYDFSLALELGVSTRTGRSLVEFGLSRITAAAMASLITDSSLSSDQVRGWFSQQPAALIQQLSPLVVAELRERGLVSVEYSA

SEQ ID NO: 55938 - protein, 316 aa, Burkholderia ubonensis
MSTITATDLESALTGNPEALEVHLTLVERDVPVDGHSVRIHCHCLSVDGNGRVQPRRLAEFMRNAIVDYAIPRSKLADAKARDNRFNSTEAVTELVERAKRSFTDLANTGEGGEMLLFLFAERFLKLPQILCKMDLKTDARMHYHGADGVYAGVTPEGTLKLYWGESKIYGDVNAAIRACLSSLAPFLIEPENEDAERERDLMLLSDKADLSNPAVTDALRKYFDKSSVMSKRVQYCGVALIGFDANFYPTDNVKAVAEEIITASRAELTGWSKNIGERLKFEKLDQMEIEMFCVPMPSAEGFRAAFLKAMGVTEQ

SEQ ID NO: 55939 - protein, 866 aa, Burkholderia ubonensis
MTPADLQSWLLKDGVRDDLDVITRLTVRNELDNLHVDESAPSGAAIDWPRLLLAGSILARSDQRGDQEAALRIATAAITLTDRQAINDAGAVLLGKLSNFRAITLATNRDLITADLDGRLGVALRLEAQRREMERSILMQSSGAWLQVNEFQQRFWTNATESRWLSASAPTASGKTFLVLQWLIDQMTAGETRVAVYLAPTRALVSEIETNLKRLIGNTGLMEVSSLPLPDKYKAARAGGAQVILVFTQERLHLLANVLGDVFSIDLLIVDEAHKIGDNQRGVILQDAIERATRANPKLKAVFISPATQNPEELLMDAPDGVQTIAVDSDSSMVLQNLIVATQVPRKSKLWALTLRQQDSTLPVGTLQLESTPDGLKKRIAFIAAAVGQRGGTLVYTNGAGEAEEVADLISQLLPELGSTDLELSQLAELARKGVHRDFRLAPLVEKGVAFHYGNMPSLLRLEIERLFRSGKIRCLVCTSTLVEGVNLSCRTIVVRGPRKGKGHPMEPHDFWNLAGRAGRWGDEFQGNIICIDPDDTQAWPSGVPGRARYPIKRESDAVIELGDGMADYLRDRGGADLSSLEDTDKFEQVGAYLLTTFMRLGSISAASLAKRHDVASIATLDQALGALAQQIEIDVDLATRHPGVSAIGLQRLLEAFRSYAGDVENLLPAEVASNDSYDRFVTIMGRINKHLFLAFSPEGRIRLYALIVFKWLRGYSLARIIRDSVEWHQDAGRSFKLPDLIRGTMELVEQVARFKAPKYFSAYMDVLHLHLREIGRADLIHDGLDIGTQLEFGVSSTTLLSLMELGLSRMSAVALYEKIARDDLSKEGCIEWVAERVDQLHAMDIPAIIVREVRERLALRGDIAT

SEQ ID NO: 55940 - protein, 300 aa, Burkholderia ubonensis
MDWVTIYLTEHSEPDSGGVSIRQFFLTLRDDEPMLMEFAAKLADQIIAYCLPRKRLAKAVQKHLNNPSDLAAAMAALRREARKAFQKYREEYPARSGEGGEMLAYVFVEHFLRAPMAIAKMHAKTNTTMPVFGADGVHVRYLSESDELEVIYLESKVHATIGSAARDASKSIDEFRQGQQRTVELRLALDLGNFDQLESEAQQALEEFLDPYSGARTGNRLDRHACLLAYNEPSFEKAVGPNAKESLREAFNEGCDGRRRVVTDAYKGRQLPEDKIVTFVLGLPSVAEFRSEFEKALSNG

SEQ ID NO: 55941 - protein, 834 aa, Burkholderia ubonensis
MCANGIAALTENQDLQLDVDRSEDETVRLTRLVESASCFAMDDDVRSHQLAQTIALYGVASNREPALAAACGHILAELGNFPASSFVRKLHNIEEDSLPRVVHVRDFARRYHNTVKLPSGSIPLTDFQFDIWHDLTEGLSTAVSAPTSAGKSFVVREYVVQKIKEMPTVRVAYIVPTRALMAEVQDKLALSLGHDDKTLRITSVPIEDIEMRPRQVFVVTQERLLSYMDEVPSACFDFVVVDEAQQMGDGSRGMILQECLERINKANPGCYQYFIAPMASRVDNLAAAVGRSQIATHLTQDSPVVSTKIVVRPSADSVQDLILEMVDRGQRIPVGRLHREYGFGDRRTLLASVCIELGAAGGSLVYASGQADAEAIALQIAVDLPERDTAELIELARFIRSDVHRDYSLAYCILRGVGFHYGSMPTLLRQALETAFHNGSLSYLVCTTTLFQGVNLPARNVFIDKVKRGRNDQLEEDDVWNFVGRAGRLMHDVAGNVFLVDYDNWPAKLLDAPPQVRVEPALSKILGPGLAQLEQYIEKRGAVEKGFQNLRDVEAAAGLMLNRVRRGTFRETISRCGGHLGEIEVTKLEQQLEGALAQLNVPSDVLDKNWLVSAWRLQAMYEFLEGQVVAGTWREYYPSHPMLPESYARYQNMFTAIEVHLNGKPNERWARYLNYQALAWMKGATISTMVDKELAHNPPKPRKNAAGVSTSNTAVRKIFDLLEKTLRFTYVQLTRAYCDCLAAALRKAGLTKEADSVYSVALALELGACTKTIISLIELGLSRISAQALSNVIKGSELTAPQIRSWLLSRSERDLPISRIVLDELSRLRLLRTT

SEQ ID NO: 55942 - protein, 320 aa, Burkholderia ubonensis
MTKANNSFDALLDPIHGIDNVLKEVTATPPLEQPRLLFVRMQEHIPQVDALAELLVDQLVNYVIPLRKRREAFAQSNNSATGGDMAAVSRLRREAKRLLVTYNQKHPGRYGEVGELIAYVVAVRYLGAAQLGAKMALKTSSEMPVHGVDGLHGSQADDGSVLFYLLESKLIPSATDASREMVDSIAEHQADRGRMLNELRLVSDLSNLDSLEGEAREAAKSFFNSYTGDGSHLRRRDVHVGSLVFSESAFQDKLPRDLKKPPEIHEEHLEKLYAAKHDAFSKNLKNQADAKGVDLGGCIVFLVAIPDVNEFKRIFAELNT

SEQ ID NO: 55943 - protein, 875 aa, Burkholderia ubonensis
MSTFATEVAIEIRQEPGFWSDLAELRAVGIRSTVLQANQQVRVDGPVLAEKALTRLLNTASVFASATDEESKELAQQIAVFASLVSGDDIVREASIRILSDLGNFPGLRKLEREHPVDLGFETHMRSGLLRELNTVDMAGARVPLTEYQLDLWRSLDSSAATAVSAPTSSGKSFVVLEHLSERAIAAERFCAIYIAPTRALLTEIHGKLEKRLSSISDSIRITTIPVPDPESRPKQIYVLTQERAQFLLSTVAVAGLIDLVISDEAQSLGDDSRGMILQDTLEKLRESNPAARFLFLAPGASGLQLIGDSIGLPDITVKETTLSPVVQNRISVGFSNLDEHVVHLDLVTPKRLEPIGTYQFQRGFALSDDTKLAAVALELGASGRSLVYATGAKNAEDLTALLALNRQPGTSKGLSDLAKFIEQHIHKQYSLATYVRQGVAFHYGNMPSLLREGIEAAFKRGELDYLCCTTTLFQGVNLPARNVFIDTPTRGKGAALDEAALWNFAGRAGRLGEEVVGNVFLVNYEHWESKPLTERKPFAMKAAFKQTIEADFDAVVELLQAAVDKAPILERDRAAGDRITAAAGLILFRSSQKTLDGLLGRRSLSLTTAQKDSLTELADQALTSLELPASVLTTSWMLDPVALAGLLQRIRELVRQRDFAKVMPSNPSGDAYTVYNSIIRRLYKYLGDMNLKGDEAKGNRGFVAHVTVTALKWMRGEPLTQLVAEAVKYKKKIAQQTNKRPLTQTAIDGAIRDMFTLIEQTIRFKLVQWAKAYVDLLKYALAQEGLDEMVSQVYDFSLALELGVSTRTGRSLVEFGLSRITAAAMASLITDSSLSSDQVRGWFSQQPASLIQQLSPLVVAELRERGLVSVEYSA

SEQ ID NO: 55944 - protein, 300 aa, Burkholderia ubonensis; identical to SEQ ID NO: 55940

SEQ ID NO: 55945 - protein, 834 aa, Burkholderia ubonensis; identical to SEQ ID NO: 55941

SEQ ID NO: 55946 - protein, 320 aa, Burkholderia ubonensis; identical to SEQ ID NO: 55942

SEQ ID NO: 55947 - protein, 875 aa, Burkholderia ubonensis; identical to SEQ ID NO: 55943

SEQ ID NO: 55948 - protein, 300 aa, Burkholderia ubonensis; identical to SEQ ID NO: 55940

SEQ ID NO: 55949 - protein, 834 aa, Burkholderia ubonensis; identical to SEQ ID NO: 55941

SEQ ID NO: 55950 - protein, 320 aa, Burkholderia ubonensis; identical to SEQ ID NO: 55942

SEQ ID NO: 55951 - protein, 875 aa, Burkholderia ubonensis; identical to SEQ ID NO: 55943

SEQ ID NO: 55952 - protein, 300 aa, Burkholderia ubonensis; identical to SEQ ID NO: 55940

SEQ ID NO: 55953 - protein, 834 aa, Burkholderia ubonensis; identical to SEQ ID NO: 55941

SEQ ID NO: 55954 - protein, 320 aa, Burkholderia ubonensis; identical to SEQ ID NO: 55942

SEQ ID NO: 55955 - protein, 875 aa, Burkholderia ubonensis; identical to SEQ ID NO: 55943

SEQ ID NO: 55956 - protein, 300 aa, Burkholderia ubonensis; identical to SEQ ID NO: 55940

SEQ ID NO: 55957 - protein, 834 aa, Burkholderia ubonensis; identical to SEQ ID NO: 55941

SEQ ID NO: 55958 - protein, 320 aa, Burkholderia ubonensis; identical to SEQ ID NO: 55942

SEQ ID NO: 55959 - protein, 875 aa, Burkholderia ubonensis; identical to SEQ ID NO: 55943

SEQ ID NO: 55960 - protein, 300 aa, Burkholderia ubonensis; identical to SEQ ID NO: 55940

SEQ ID NO: 55961 - protein, 834 aa, Burkholderia ubonensis; identical to SEQ ID NO: 55941

SEQ ID NO: 55962 - protein, 320 aa, Burkholderia ubonensis; identical to SEQ ID NO: 55942

SEQ ID NO: 55963 - protein, 875 aa, Burkholderia ubonensis; identical to SEQ ID NO: 55943

SEQ ID NO: 55964 - protein, 300 aa, Burkholderia ubonensis; identical to SEQ ID NO: 55940

SEQ ID NO: 55965 - protein, 834 aa, Burkholderia ubonensis; identical to SEQ ID NO: 55941

SEQ ID NO: 55966 - protein, 320 aa, Burkholderia ubonensis; identical to SEQ ID NO: 55942

SEQ ID NO: 55967 - protein, 875 aa, Burkholderia ubonensis; identical to SEQ ID NO: 55943

SEQ ID NO: 55968 - protein, 320 aa, Burkholderia ubonensis
MTKANNSFGALLDPIHGIDNVLKEVTATPPLEQPRLLFVRMQEHIPQVDALAELLVDQLVNYVIPLRKRREAFAQSNNSSTGGDMAAVSRLRREAKRLLVTYNQKHPGRYGEVGELIAYVVAVRYLGAAQLGAKMALKTSSEMPVHGVDGLHGSQADDGSVLFYLLESKLIPSATDASREMVDSIAEYQADRGRMLNELRLVSDLSNLDSLEGEAREAAKSFFNSYTGDGSHLRRRDVHVGSLVFSESAFQDKLPRDLKKPPEIHEEHLEKLYAAKHDAFSKNLKNQADAKGVDLGGCIVFLVAIPDVNEFKRIFAELNT

SEQ ID NO: 55969 - protein, 441 aa, Burkholderia ubonensis
MSTFATEVAIEIRQEPGFWSDLAELRAVGIRSTVLQANQQVRVDGPVLAEKALTRLLNTASVFASATDEESKELAQQIAVFASLVSGDDIVREASIRILSDLGNFPGLRKLEREHPVDLGFETHMRSGLLRELNSVDMAGARVPLTEYQLDLWRSLDSSAATAVSAPTSSGKSFVVLEHLSECAIAVERFCAIYIAPTRALLTEIHGKLEKRLSSISDSIRITTIPVPDPESRPKQIYVLTQERAQFLLSTVAVAGLIDLVISDEAQSLGDDSRGMILQDTLEKLRESNPAARFLFLAPGASGLQLIGDSIGLPDITVKETTLSPVVQNRISVGFSNLDEHVVHLDLVTPKRLEPIGTYQFQRGFALSDDTKLAAVALELGASGRSLVYATGAKNAEDLTALLALNRQPGTSKGLSDLAKFIEQHIHKQYSLVFRPRNNFA

SEQ ID NO: 55970 - protein, 316 aa, Burkholderia ubonensis
MSTITATDLESALTGNPEALEVHLTLVERDVPVDGHSVRIHCHCLSVDGNGRVQPRRLAEFMRNAVVDYAIPRSKLADAKARDNRFNSTEAVTELVERAKRSFTDLANTGEGGEMLLFLLAERFLKLPQILCKMDLKTDARMHYHGADGVYAGVTPEGTLKLYWGESKIYGDVNAAIRACLNSLAPFLIEPENEDAERERDLMLLSDKADLSNPAVTDALRKYFDKSSVMSKRVQYCGVALIGFDANFYPADNVKAVAEEIIAASRAELTGWSKNIGERLKVEKLDQMEIEMFCVPMPSAEGFRAAFLKAMGVTEQ

SEQ ID NO: 55971 - protein, 866 aa, Burkholderia ubonensis
MTPADLQSWLLKDGVRDDLDVITRLTVRNELDNLHADESAPSGAAIDWPRLLLAGSILARSDQRGDQEAALRIATAAITLTDRQAINDAGAVLLGKLSNFRAITLATNRDLIRADLDGRLGVALRLEAQRREMERSILMQSSGAWLQVNEFQQRFWTNAAESRWLSASAPTASGKTFLVLQWLIDQMTAGETRVAVYLAPTRALVSEIETNLKRLLGNTGLMEVSSLPLPDKYKAARAGGAQVILVFTQERLHLLANVLGDVFSIDLLIVDEAHKIGDNQRGVILQDAIERATRANPKLKAVFISPATQNPEELLMDAPDGVQTIAVDSDSSMVLQNLIVATQVPRKSKLWALTLRQQDSTLPVGTLQLASTPDGLKKRLAFIAAAVGQRGGTLVYTNGAGEAEEVADLISQLLPELGSTDLELSQLAELARKGVHRDFRLAPLVEKGVAFHYGNMPSLLRLEIERLFRSGKIRCLVCTSTLVEGVNLSCRTIVVRGPRKGKGHPMEPHDFWNLAGRAGRWGDEFQGNIICIDPDDTQAWPSGVPGRARYPIKRESDAVIELGDGMADYLRDRGGADLSNLEDTDKFEQVGAYLLTTFMRLGSISAASFAKRHDVASIATLDQALGALAEQIEIDVDLAARHPGVSAIGLQRLLEAFRSYAGDVENLLPAEVASNDSYDRFVTIMGRINKHLFLAFSPEGRIRLYALIVFKWLRGYSLARIIRDSVEWHQDAGRPFKLPDLIRGTMELVEQVARFKAPKYFSAYMDVLHLHLREIGRGDLIHDGLDIGTQLEFGVSSTTLLSLMELGLSRMSAVALYEKIARDDLSKEGCIEWVAERVDQLHAMDIPAIIVREVRERLALPGDIAT

SEQ ID NO: 55972 - protein, 316 aa, Burkholderia ubonensis; identical to SEQ ID NO: 55970

SEQ ID NO: 55973 - protein, 866 aa, Burkholderia ubonensis; identical to SEQ ID NO: 55971

SEQ ID NO: 55974 - protein, 316 aa, Burkholderia ubonensis; identical to SEQ ID NO: 55970

SEQ ID NO: 55975 - protein, 866 aa, Burkholderia ubonensis; identical to SEQ ID NO: 55971

SEQ ID NO: 55976 - protein, 300 aa, Burkholderia ubonensis; identical to SEQ ID NO: 55940

SEQ ID NO: 55977 - protein, 834 aa, Burkholderia ubonensis; identical to SEQ ID NO: 55941

SEQ ID NO: 55978 - protein, 181 aa, Bordetella hinzii 1277
MHGLDGIHAKVENGALYVFFLESKLSQSANAGVKDYAESVAGFGNNLKQYLLEYSIVRDLGNLDSLAGEERDLALACFDVMDSPDAVERRERSVGVIVYKEGQFGKLTPVQPKQPVGFHEFEFAGAYAAQLDHHQQAALKHLSAGNVDCNKCHVYFVAVPDVDELREQFYIRMGYKPEVKK

SEQ ID NO: 55979 - protein, 868 aa, Bordetella hinzii 1277
MSTFARDLSRRLTGHTSFWNYLGQLQGSGAARTLAKPPADAPTVDLQNLLKLLYCASVFVQSEEDELKRLAQTIVLNTLLLHEDGELRERSLHVLTELGNFPGLSYAERAYGAGDQTLLGRMNRKVSQALNTVPINGTPVPLTDYQKQVWDSLPTTRALAVSAPTSAGKSYVVIEHLCRQAERHRHFAAVYIAPTRALLSEVHQKIQHRLKDRDNIRISTVPSLDPLQRTCQVFVLTQERLHVLLSIWNAAFNIVVVDEAQNLSDQARGMILQDCLQTVMSRSSATQLIMLAPGASGLPEVARSIGVKALRPEFTSLSPVLQNRIIINKVKGRPNEMRLQLLRGPKERVEIGNLVSSLGLDNKATRLAAVALELGGGEGSLVYETGPRGAEKTALQLMNELRRRHPDPQDQSLLELSEFIKEHIHPEYQLATMVVHGVGYHYGRMPSLLREALESSFKQAQTGLRYLVCTTTLAQGINLPARNVFIDTPKRGRGESLDPALLWNFAGRAGRLSQDVVGNVFLLDYDEWDSRPMDEFVPFEVTSAITTTLSSHFDRVMDAVRGDMPVALPWNAEATRIRACAGLLIAKAAAGVSNPFLESVLPPDRLDSAAGIAEIAASAAQEIDLPASLLQANWTIDPYGLRRLYDRLVEKIDADELDNVIPLNPREAPEGLYQSIFNRILRTVDQQQGNFGALVAGLAIQWMKGIPYPVILKYWVRRARMAEERSAQKAGSRGSRPKRPRTVDALIREAFDLIEDTVRFRFVQLGKAYRDLLVLALQEKGLQNRVAKVYDFALALELGVSTETGTAFVELGLSRIAASALEDLFPSSSMTAVEARQALRTLDVVANKLSPIIVAELDRLGLRGTVAT

SEQ ID NO: 55980 - protein, 544 aa, Acetobacter indonesiensis 5H-1
MSQKLEPLIDPNAASDAGGVAGRVGFRYQDHVGAGYVIDMLFDGSLVQVEFETADDITLRWRADSEVVNEYVQVKTTESNTKWSIKEITDRVDSRSGSSLIEKSLKLDINTGPALFRFVTKRDVGTSLRPFLNHRDKRRLVKTKLDAAIKSIGNKWKTIKSACGRTTKDWAENLYWVVAGSEIATQNSNINRILQLAERAGEIPSHSVACEIYHQLMTLVQTAGDASRVSDPDAKAIDRGEALAWWKGKVDVIRQLNRAGLRVYRVSTEAFFSDLHHINDATICRSLRAYDVEFDEGQWRKSELIEYLLRWLPEISLPANVLSEFDILHARDLTRRAVARIEQSRAISDEELFAELMLHAVLRHYFDSEPVACKIYAGTGPNRSITSAHIVPEDAGDQLWIGRSRITTAASHGAILKAVIAELEAAISSEFLKEERSLIMTLREPRHMRATSLDTVLSARGKVEELRRCLHFPILMAYDSNVIQSGFCEDYLVDLRKEVVTEYESIKSRMTPALVNIQIHIFLIPVENPAGLIAEFGKHLRGKS

SEQ ID NO: 55981 - protein, 714 aa, Acetobacter indonesiensis 5H-1
MIFLEDDLRSILAKDEITSTNAEIAVATIASWVNDFATHDLGRDFLIRLLAKKPQLPEHLYDLIDGLLMTTGLLPYAGPPRTLEDALFREAHTIPNLDGDRVFHSLQLQVFRLIMNKKNVILSATTSVGKSVIVDAIIASGRFRKIVVIVPTIALIDETRRRISRIFGNTHSIITHPTQESDGSLPTIYVLTQERVLSRKDLENVDFFVVDEFYKLDLDRPDNRAVDLNLAFHRLASSGAQFYLIGPHISEVRGIASRYQHVFLPSTFSTVALDIEYFNLSQTSDDRETRLLELVRDLKTPTLIYCQSPPKCGEVARILIKSEYFSHVSETEIAVDWLLQEFPEEWIVIEALQRGIGIHHGNVPRALQHYMVRCFEEGSIRFLVCTSTIIEGVNTVAENVIVYDRRLNTTTLDSFTFRNIAGRAGRMGQWFIGKVYVLESPIEDEQKAVILPIEDQDTNTPMSLLLDLPDSDLSDLSFSRIEDALRTSTLSLATLRANRYISIDAQRQIADRIRSDLVYLKILNWRGMPSARELTAACELIYEYIDEGRSLKAYQIFGGEQLSARLFNLSSATLRSFIADRVARRRDDQSVSDAVELTLRFMRSYVVHTFPRQLSAINTIYKDVALALGFDVAADYSFYTARTENLFLESGLFALDEYGVPPQTAYRLGSRYPGMDSLNKALDLIASIDLEQEKLHPFEQDLLHELQRSLARRD

SEQ ID NO: 55982 - protein, 419 aa, Lactobacillus frumenti DSM 13145
MSGEDSSSIEASVRVVLDKYTGKWEKPYSTQNLKRLYYHGLNKNAAKKIKDAGIDEDSLKKYIDDFSDEDKEIIAKKIQATNDNDPLMKIDQISYYCVNWLSRLVEEAINGQQKKPTISSGYNEKNDISLTIREEGRIFEKTFNSIKEIKLPLQNSRMRAFALLPVKGIYSHKNLISLLRKNLARYVFSRKNRNECDDLEELTAEATTELREFVRKCNPQILLGELLVYIFLEHCEKAPKIFTRAEFFHKYGAIDKKSVFLRENDEGWQLIVGTPNLSTTLDQTILATLEECEKLKNQNEFGDGPYVAEKLQSSFLEDSYYPEQIKKIESIMFPSLRRKSLGVQVDSYGIFLGYQVDDFGNDEERVKQLLIQDADRAVKMINNFVTNHDMQRHSIYVYLLPFKNPKYESSRIIDKLVGC

SEQ ID NO: 55983 - protein, 873 aa, Lactobacillus frumenti DSM 13145
MTKKIKLRDAIASDLKKNQYLKQLHQELLRAYGLQLFGKEFQFKNKSIQDLLVFADIMSKTEDVKLEQLSLEIVICLNKMYPQSHSIKFYKNQIFEELGNYSRPELDNEYKPGKSVDSIIDSVQRVNEMSLRHFPTGKGYFIGDQKGLYNSISKQLNSFSAPTSMGKSFLMKMFIEEKVSSGEQLNFVYLVPTKALITEVTNDLCNKLGDNLKDNHYRIVNHFDSIGTGSSLTNFIYVLTPERFVNLLLNNFSGAIDYLFIDEAQNISKDDSRSTVYYRIFDLLRQQEYAPKITFASPLIENPEIFETLASLEKGNVLKANLSPVCQIYFLLNEKGTFEVYDSMTSEFLRINDLSSYSNVYYLKNLLYTLPGQKLIYRNSVNNAVNGANYWYQECDDPIDKKLLKLSDYISKQVHPDYCLSTIVKKGIAYHFGKVPDEVRNKIEMAFNDGKINTLFCTSTLMEGVNLPADNMIIDNRRIGNRVMRPFQFKNLTGRVGRLSSSMLGNIFITATSDMDYKKFKELIRSKDMTAVLSITDLMDTDILKAVDVDLKAGDLTLQNVREKIKNQHKFDTVRKFSLIYLNNLQNSREGVVTRHFSNVISSEDREAIRKTFKEKYEDHTEVDVNFSIDQSMKLEKYVKKSDIIYPHILDENGDLNTNSTYEFLKQLGDIYNWSKYEPELAISEENNIILQDYAELLLRWMNGDSLHQLCDFMIQYRKKELNFLDRSQKIRDNYGKINWCGRRNNSLDESNLSIYVLLKALDTIQFKFGNYFLKFSHALMKERQIDKLENDWYQYVEYGATDKNVIWLEQLGYARNSAFAIANSELNIILTDELGNKVLLRNRIEELKRPEIIDETERIIKNYPDLFISEAD

SEQ ID NO: 55984 - protein, 306 aa, endosymbiont of Bathymodiolus septemdierum str. Myojin knoll
MVNFEKLIDTSFVDISINPALLSIDKKHVLSLINDFESGKWRYDKFQNYIWDNIAETALSKNERDKLIEKPNSALIESAKKLRITSNDTIGKGSELCEILLYGIMKDYYSALPIVPKIFYKQNSQDNAKGADSVHIVIEDKGNDFSLWFGEAKFYKNIDGAIDSAIGSVDNFLRNDNQIKKENSIITSVSDIDNMGLSSELVEKIKSTLSGENSLDNIKPKINIPILLLHECDITKKENELTEEYKNKMISSHKKKANKYFKKQVKVMSNIFKYSNIKFHLILFPIPNKRDIVDRFISNAEYYRAP

SEQ ID NO: 55985 - protein, 690 aa, endosymbiont of Bathymodiolus septemdierum str. Myojin knoll
MDIFKNCQNINSLISSNEEEAREKLIKLLDSCNWDISQDDDAIEYSHIINNLIRQLGLYPYLNISTSSWQENFIYEAFKTDVGDDKPITLHREQSSVLKDLIDGKNLAIIAPTSFGKSFIIDAFIALKQPKNIVIIVPTIALTDETRRRLQKKFSDRYKIITTSEIELGEKNIFIFPQERALHYVDKIAELDMLVIDEFYKASADFDKQRSTSLLNAILKLGEKSKQKYFLAPNISEIQSNPFTEGMEIERIDFNTVFLNIHDTYKTIKNNDKKSELLKILNNTRDKTLIYAGTFTQIAKLSEIVRDDFPDLDSDLLNNFSQWVATNYSQDWELVNLIKKGTGVHNGRLHRSLSQIQIKLFDKDDGLKNIISTSSIIEGVNTSAKNIIFFGRKNGNSNLKYFDYKNLIGRGGRMFKHFIGEIYLLEKPPEEEGVQLSLEVPKELIDENNIENFTNNNFQKEAIDFYGKMNNKLGGLVYKKLRRQSFFEENNWTLIEALADDMIEKPGEWNGLNYLNTVNTGHWERHLYKVLKIAKRGPSGELVKFIKISPLGWDKSIPNLINKLDISVNKFFELEKKVSFSVSNIFNCVNILQKEILPNLNTDISPFTTKLSYAFLPKNVYLLEEYGLPRMISKKIHLSGLINLENNDRNLHSIIDNFNEVTCEKIIQQVESLDDFDKYILKYFFNGIKR

SEQ ID NO: 55986 - protein, 307 aa, Bradyrhizobium sp. ORS 285
MPGLSFEILVDDALAEVTSASQLATAVNKRVLSLINDFEDGEWRYPKFQSYLWDNIAHTALSQRERSALIDHSHSSLIAAAQNLRLTDKDELGQGSEIAEVFLYGLMHHRFGALPVVPKIFYKQNVQDNAKGADSVHIVVNGDDFTLWFGEAKFYNSIVDARLDAIVTSVLNSLSTDKLKKENAIITSVSDLDGLPIAANVREKIKAALSNRESIDYLKPKIHIPILLLHECTTTKETKELSEQYKSKIIAYHKDRAASYFSKQIAKSGAINKYDKINFHIILFPVPSKKTIVDAFVHAVAFYKGQT

SEQ ID NO: 55987 - protein, 704 aa, Bradyrhizobium sp. ORS 285
MEIFETCQEINGLLSGRNEMAARNLLIRLLAELERTKTPYPQLVNHMIRETGLFPYLQLASASWDQKYVHHAFEVDVGRRLATLHREQSTVLARLLNGKSIAVSAPTSFGKSFIIDAFIAAKRPDTAVIIVPTIALMDETRRRLFKKFSEHYTIITAPDTRLGTKNILIFPPERAFGYLKLLEQIDLLVVDEFYKASQEHDPARAPALIKAILKLSKNATQRYYLAPNIKTLKDNLFTRDMEFIELLDFNTVYLNIQEPYKEIRGDIEKKGAKLIELMSTDKQKSLIYAGTYSEIRKISELVVKHLPLVDRIYTSSFAKWLRINYQSDWTLADLVERAVGVHNGSMHRCLSQLQIKLFEYEDGFDSIISTSSIIEGVNTSAQNVVVWRSRAGSTNLKDFTYKNIIGRGGRMFKYFVGNIYLLDAPPRPEDNQLDIVFPDEMLGTLDEVGDVEQLTDHQLERIIEYKTQMASIIGEQEFARLKRENVLQDSDADFLLRLAKNMKEAPEEWRGFGYLNSSNPADWDTMLFKVIGLKPAGWDSAWSNVVNVAKAIAHNWRRDLPQIISSLKNNGISIEEFFKLERTITFKLTALLSDTNELHKIIIDPSVDISGFIGRMSRAFLPSAVYHLEEYGLPRMISKKIHAAGLIDFEEPEMDLSNTLERFKALGRETVLAVKSLGPFDRYVVRFFFDGITPDEPQLAEVSE

SEQ ID NO: 55988 - protein, 553 aa, Marinomonas mediterranea MMB-1
MPKSDSGGIGAKKGFLYQDYVAALYTLKMLDDKSIEKVRCEVSDDIDIIYDDHIEYIQVKTTKADKSWQLSEFTKASYKTTKTKTGRERKKYNNDSILHKSLDCDAEHLNGLFRIVTPRDVYANLSYLKIPLSERSGNPRREGILKSLRGALRDYESPNGNNVEYWLDHATWQVIATDEQIKLAAFKIITTVAYEYCGVHLNPTRDPQRILNDLLTNLIEKSATSIVLRSEDQKTYTRKDFIYWFKKEVEHYGNQARNQLKVYTTDSAKLTAILDTFLTDDNLYRLEGDKSCRGIKGKYHRKKYKYESISKGITKWLPEVLLRPSEIADQSPEKLEDKIQSYASKKAHILSTLDSLIANVLLHSTIRTSYNSQPIPAHLYIDDEKGTSFDNVHILLNDHEPDSLIMGFSHLIEGDVDGSLEKIVEKFDELLESDAFSSRNEKILEDKEDSYLLKHDIDEILQSNTSLDEHISRFRFAFFLGYETDILKCNQCEMSKEYLVELEAEVISHFQKLIDSLIEKDDFFEDLHIYVYLCPIPSIDTLKSSVRKVVEEV

SEQ ID NO: 55989 - protein, 717 aa, Marinomonas mediterranea MMB-1
MFNLNPKVCIENVRNDVLSPFMYLKHANKCLSSPSHKSIGREYVIRALDEFDKFESQSQLLKNLVRKAGLYPYLIKFFSSTKAPDIELLLQLYQSEISPDFVFHSMQAKIYNLLISGKNVVLSAPTSMGKSAIVDSLIASNRFNRLVVVVPTIALIDETRRRIQKNFGRKFQVIHHGSQERRKDRTIYVLTQERVNEREDLQNIDLFVVDEFYKLAFSHEDKSRAISLNIALSKLLSVSKQFYMIGPYIDAMRGMDALQKEYVFVPSDFNTVALNVNEYNIKPNDVASKNSQLKKILETYKGQTIIYCRSQKSIDQVVTSMDYICFDKPSREIKNYYRWLKRFYGSNWCYSRALKLGIGVHHGALPRALQQKTVDLFNKNKIKYLVCTSTLIEGVNTVAENVVIYDNRRANASIDDFTHKNIAGRAGRMNQHLIGNVFCLESLPSREFQSNVVELPLGHQNVETPLNLLAGIQSEHLTDMSRESLSQFDMSSKVPLDLIRKHASYNVLSIESAYSFITELSIEDMKLLSKKKTPDSYNLELLVQFIKILEAGALQKLSLHFEDNDELKNRMAWYIYAESHTDYIRERLKYIYSHREGVQRVSEGTDWEFKIARNIFKHSIPRALMLLQDLLNYQFDQLDIKVVTDFGYLVHIFENSHLPTAFSALEEMGIAIETLEKLVTERVSSSSIETLSRYIRMYYKKSERLHAIDRMFIRLAL

SEQ ID NO: 55990 - protein, 541 aa, Pseudomonas psychrophila
MVRISSPTNKGGPAARQGFKYQDHVAVSFIVKMLRDSSYVQIECETADDIVAVFQHSGLTVFEYIQVKTTEGNHKWNWKEVTDLENKKAESSLFQKSLKCDIRSGTARFRIVTKRDVATILEGFKTELVKRLLPDTTTERSEALLKKFKTFCSPQNRDFSYWAENFVWQVYGEVNALEAININTLAKLAEQYGNRPNYNQLKDIYEELLELADKAATADVKTDAATKIISRETTLTLIRQRLDEADAVSTSTSKPYKTRPEPFLVQFHASTEEGLLRSVTAYDVRYSLKKWRCEDMAKHLIEWLPEFSLKASEIVNIQAHNAEAIIARSISAFSNNELPRERLVAELILHAILRSRANSEPIACKVFYKAAGKLSEFGNAHIIQEQGQNDQLWLGLARLIEAGSMDTTLEQICEVLDATISEAVLSAEREIVIALREPHHHLPKAETFNQALHRNSPVDDMLNVLCFPILLTYDSASLASGWLADYVNHLENEIIDHYSALRTQLPENIQQVKVAVFLVPMESVAKLIKAFNERCKKLEDL

SEQ ID NO: 55991 - protein, 714 aa, Pseudomonas psychrophila
MNYEKAKENLVQLNESSLLSIDLLIAINTFVSRSDPEWEGRDLVIRALDKFDLFGPVEQSLLLNMVRAVGLFPYITPHLSNMDLSDRLAYEAHRVEGLEQGMVFHHLQAHVFSLIMQGRNVVLSASTSVGKSLVIDAVLAQHRFKKVVVIVPTIALIDETRRRLVKRFKQFNLITHPSQEAEAGTTNVYLLTQERVIQRKDLDDVEFFVVDEFYKIDLGSDKDGSTRAVDLSLAFHKLAKTRAQFYMLGPHIQQITGLDSYEYNFIPSDFSTVAVDIQNFNLGMRSEERKETLLKLVKTLASPTLIYCQAPASANRVAQYLIEEAGLSEVPETKEIAAWISKHYHPEWNVAKAIALGIGIHHGGVPRALQQYIVKLFNEGVIKRIICTSTMIEGVNTSAENVIIYDRRLKTSNFDYFTFKNISGRAGRMNKYFIGKVFMLEEPPVERGLTVEYPIGHQDESSPMGLLMQLENEYLTDVSRGRLQEAYSNPVISPATLIENRHIPIDRQLEVANAIIRELAESRQLLTWKGIPEKSSQLNYLCDLVYSLEGGNLMEYGISSSSHLAWHINEIRTKKDLPSYLQDAVLNRREDDTPSEAINLRLKFLRNMVCFRLPRDIMAISKIQDDVFTQRNIEPGDFSFFAEQLENLFLDPLLTALDEYGIPTQVSTQIKGMILPSDNLNDLLRKLRALAPQVERLRLSNFEKSLMSWAIAEM

SEQ ID NO: 55992 - protein, 163 aa, Helicobacter canadensis MIT 98-5491
LGESKLYDKLDDAIRNAIKSLKDHLSDDEIMRNEARIIANPYELDNLAKHHNIQASTLANFKQIINENINLDELKSILHVPISIIYNCDYTKSIEEITDDYKTTIKNFHKEKGNKISEEIKKLSNKITYIDRIKFHIILFPVPDKEEIISKINKIFESYRNAD

SEQ ID NO: 55993 - protein, 704 aa, Helicobacter canadensis MIT 98-5491
MPTNEQIGEKIFDKCVEIYEILNNDKEAEAKEKLLYLLDEIQDKALYPPILNHLIRQFGLYPYMNQDTSILEDKFLLECFKANIGEDEPKVLHREQSRVLKRLLSNESLILSAPTSFGKSFIIDALIAMRKPKNILIIVPTISLLDEARRRLIRKFHNYKIITTTQQINLESNNIFVFSPERAIEYFSFMSKENVRLDFFIVDEFYKISKEYENERFAPLQNAILKYMNISNQRYYICPNIDKIKNENSILSKGMEFECLNFNTVFIHINKCYEDKDFKKEEKIIEIVKKDEKTLVYTQSQSNIKKVCKILVENAIIENSNALLENFAKWLSKHYGEHYLNDTLKIGVGIHHGRLHRCLSQLQVRLFDEKDLLKTIVSTSSLIEGVNIPAKNLILWDKRNGTKNINYFTYKNIIGRSGRMFKYFIGEVYLFESPNEDSNEEKILDVEIKSESLSINDEINNEIPDNIQAEVKNNQREIINLIGVDKFNLLKKEASLKNDLKVIKKIIQILQYKDFDCGIFTHLFNDEPDKWYILSKIASIGEFHCKNIGDINTVELVKKLSQNWTKPLPELIEYMGIDLDDFFKLENHVAFKVASIFSDINTLQKILYPEKAIDISSFVTKLSNAFLPSVVYTLEEFGLPRIVSKKLHKCGFIDFENKDLAIEQVLDKFKECTADAIINKLKEKNLYDDFEDYILNYFYEGLGQ

SEQ ID NO: 55994 - protein, 318 aa, Paenibacillus dendritiformis C454
MTSIFGSENVVIEQITESALKAYLVGFDIDDKGQKKYRWRNLVNILQDALTEFAFGYHEGEVVHISQSTRLLYEAASAVYKIDEFVETKKIYVDEDSFIEDDDIDKKYLKRGEFGELILHLLLRDYHNTIPLLSKIYFKDSYGVPVHGFDAVHIEPNSKTLWLGESKLYIDGKKGIEALIGDIKEHFKHDYLNQEFTLISKKIKHMSGDTIPEKQHWINLMDRNKALKEVFSSINIPLICTYSSNLFYEYDDETDPEFIAFFEDEIRNLVNHFNLKNDHPLKSHLNIILLLFPVQCKNTLIRRMHKKLYTLQGIYDDE

SEQ ID NO: 55995 - protein, 736 aa, Paenibacillus dendritiformis C454
MNSSQVDDVVENFRMANHISDNAMFEYTQLCSKLLRHSETEYLGRKIIINVLDNWKKISPQFHEIWTDLIESAGFYPYLEKNKEQFPLSSTASLIRKKLHVSSNLQGKILHEEQYLLKKLLQNEKNLIVSAPTSFGKSLLIEEVVASLKYNNIVVIQPTLALLDETRKKLNKYKDNYKIIVRTTQEPSRNKRNLFLLTAERVMEYKGLPKIDFFIIDEFYKLSAKRDDERSDVLNNAANLLLNKHGSKFYLLGPNINKISDGFAKEYNAEFYSTNYSLVDNISIDVYLEHQGLFGSRGAKREYKEKVLFELLDDLKFEQSLIYCSSPHRARQLAKKYLDYLVTKTQHKLQEQFELIAWVKENISDKWSLISCLEYGIAFHDGALQKHISSTLVDYFNNNKISYLFCTSTIIEGVNTSAKNVIYFDESIGKNKEIDFFDYSNIKGRSGRMMIHYVGKIYNFNKPPKKQDIVIDIPFYEQNPISDEVLIQLDDSDVKDKNSEQYKRLKSIPFEERELFKKTGEIVVGQQKIVEILKRDIREQYSNIGWSRYPNYEQLQYVLTLGWNNLIRENENVKPMTLKKLVKVTNDYSRLQNIMILVENNMKFYKTQKSYEKYDEDELFDFAIREAFQTLRHWFQYKVPKWLNVVNELQKYVCTQYNMRAGDYSFYASQIENDFIRENLAILVEYGVPNSAVKKLESMIPSNIGEDEVLNTIRRNKYYELSSLIDYEKGKIMELF

SEQ ID NO: 55996 - protein, 293 aa, Serratia symbiotica; identical to SEQ ID NO: 55224

SEQ ID NO: 55997 - protein, 540 aa, Serratia symbiotica
MSIENFEMELDKIKNSKGKKINLVEDFLIDIYRRLDHTENYNSCIKAICHIANLQLEDAMVQQLLHDCIIKSRIFLYDDMLGNSDIGYNPNISPQDIFLKSFYTSSVSETTLTKPQKEIFNEFQKSRRLIVSAPTSFGKTRIIREIISHNEYKMVVIIMPTVSLLSEAYNDFKHEFSDRYIVSKSSKIKIEEKKEYILILTPERMSVLMQDNINLRVDFFVMDEIYKADYKLNDDRYKVFADILYRLTKSGADLYLIGPYISAFSEKFRSKFNIKMLRYDIEIVQKDYYELDVVSRRGSHLIEGVDIRVVGDKYKNLKKITGNDKIDGKYLIYRYQKQYVESLAEKFIKDLDDKEYNRSLVDYLENNISKSWSLVQCLKKGVAFHHGAMPRHIQDLLIDEFNKNNEEGVKYLFCTTSLTEGVNSTAKNVVLYDLKIGDGNQIKSLDRRNIEGRAGRFMQHFLGRVFYFDHVDRDINEDTNVEIEFVDSSNPDIETLVQLSESDISEDSRNKYKSFVEYLSGLNIPLNLLKDISSSISAVR

SEQ ID NO: 55998 - protein, 548 aa, Vibrio albensis VL426
MRQTAMEQSDSGGVAALKGFTYQNLAAAYYVLSMLRDKSLTSVRCEVVDDIDLVYDNRIEYVQVKTTDGDSKWCIKDFAEATTKTVHPTGRQRVNQTISQEDSILHKSILCDKDRLPGFFRMLTPREVTDSLRYLKVPLSDRGEKIQERGPLLKRLSAAVNRHRKKLPPFSSPNGNDTEYWLDHAEWTVIPNREHLELLCTKLILQSAHQKGIYLSANEDPERILASLLKNVTDKGATSRVLKTIANKSYHRKDFIPWFNAEIEHYANLSSSHVKVYATSSKELKAILSSFFHHQKMYELVGDKSCTGLHGQYHQRKYSYNIIAKNLHQWLPEVLLLPGEIADNTPENLTRKFSTFTERYSKNADFISNLVSKALLHSTIRTEYKSQPIAAVLHIDDAQKTCFDNVHIVLEDHAPDKLILGFSELIGTDIEESLVDIVTNFDDLIESEAFSSQKEKILTAKDDSYLLEHDIDEILAPNKSLDDSLDRLRFVFFIGYESNHLKCDKKEMEETYLDKLEGEAIHQFKALIDQLILKNDFCKDLHIEVYLY

SEQ ID NO: 55999 - protein, 718 aa, Vibrio albensis VL426
MDSSLNPELCLNDVQNEQLSAFSYLKKASDCLSSPQLNALGREFLIRALDQLPLLEGQSVLLQNLLRKAGLFPYIKKYFPTLSPEQELVLDIYRSNFDDNFIFHSMQAKVFRLLTSGQNVVLSAPTSMGKSAIVDALIAERKFSKIVIVVPTIALIDETRRRIQKKFRHEFQIIHHGSQLKRKGKVIYILTQERVNERDDLRNIDLFIIDEFYKLAYSNDEPSRVIALNIALSKLLTISKQFYMIGPYIDAFRGMENLRRDYTFIPSEFNTVALNVHKYDIAANDIESKNEQLAKIVEKHQEQTIIYCKSATSISQVAQFLGTLENVKDRNFGPLRKYHKWLVSNYGQDWTCSKALTNGIGIHHGALPRAIQQKSIDLFNSKQIKYLLCTSTMIEGVNTVAKNIVIYDNRKGTPSIDSFTHKNISGRAGRMNQYLVGNVFCLESIPDKEAQVVELPLGQQNDNSPINLLAGIQPDHLSDQSNQSLNQFVKLSDVPIELIRNHSSYKVEVISDAYELITELSVSDMELIATMTKPRKYHLGLLSRFIKTVESGALSKVGLHFYDNDDLQNRLSWYIYADNHSSYIKDRIRYIYRSREDEKSRSETTDKELKIARNIFKHAVTRALLLLEDLLNYEMMNLNIPHKADLGYLVHLFENSHLPPSFSALEEMGIPIETLEKLTTERLSEANIDVLTRYLRMYHKHFIKLSSIDHSFIKQAVY

SEQ ID NO: 56000 - protein, 548 aa, Vibrio albensis; identical to SEQ ID NO: 55998

SEQ ID NO: 56001 - protein, 718 aa, Vibrio albensis
MDSSLNPELCLNDVQNEQLSAFSYLKKASDCLSSPQLNALGREFLIRALDQLPLFEGQSVLLQNLLRKAGLFPYIKKYFPTLSPEQELVLDIYRSNFDDNFIFHSMQAKVFRLLTSGQNVVLSAPTSMGKSAIVDALIAERKFSKIVIVVPTIALIDETRRRIQKKFRHEFQIIHHGSQLKRKGKVIYILTQERVNERDDLRNIDLFIIDEFYKLAYSNDEPSRVIALNIALSKLLTISKQFYMIGPYIDAFRGMENLRRDYTFIPSEFNTVALNVHKYDIAANDIESKNEQLAKIVEKHQEQTIIYCKSATSISQVAQFLGTLENVKDRNFGPLRKYHKWLVSNYGQDWTCSKALTNGIGIHHGALPRAIQQKSIDLFNSKQIKYLLCTSTMIEGVNTVAKNIVIYDNRKGTPSIDSFTHKNISGRAGRMNQYLVGNVFCLESIPDKEAQVVELPLGQQNDNSPINLLAGIQPDHLSDQSNQSLNQFVKLSDVPIELIRNHSSYKVEVISDAYELITELSVSDMELIATMTKPRKYHLGLLSRFIKTVESGALSKVGLHFYDNDDLQNRLSWYIYADNHSSYIKDRIRYIYRSREDEKSRSETTDKELKIARNIFKHAVTRALLLLEDLLNYEMMNLNIPHKADLGYLVHLFENSHLPPSFSALEEMGIPIETLEKLTTERLSEANIDVLTRYLRMYHKHFIKLSSIDHSFIKQAVY

SEQ ID NO: 56002 - protein, 221 aa, Lactobacillus iners LactinV 09V1-c
MIVSQNSKDVIKIFQNIKDIPISTNLDDGNLNIFMCPINARKFDYNQISLVLVDSVIDYAISKKNITKYQNKPGRLSQMARKKFKECLNNTGELGELLLYCFLEGHLNAPKILTKMEMKTSNSLYVNGSDGVHLLNNGDGTYKLIFGESKLYKKLSDALNAAFNSINDFINENNPNGKNKTGINYEKDLISSNIENCEISDEDKDVLELLIYPTKNEKKYA

SEQ ID NO: 56003 - protein, 349 aa, Lactobacillus iners LactinV 09V1-c
MNNFIDYISSKAYTDDYLINLIYNLEKNFCNKLLDQDYKIDLSNKEKCDLMRFADILCRSSKDEHKNLSLRIVSLVYEFEELLEDKFIKLSIINVLTKLGNFPSINLMGIKDENTGIDEIDLDLIVKRVYNESPIKEIFTDEQLKIFNELQTNNHFSFSGSTSFGKSFIFEAFTKYLIDEHNQSDNIAFIVPTKALINQVSYKIRKLVKSYSYKVINSPEIPKVIKRQDGKYIFVFTPERLITYFLDTTNPKIDYLFVDEAHKLLSVKDTRTPLMYHALVMAKRKSINIFFASPNIPNPSVFLELVNNTPDESHAVKVESVSQNRFFVNCHTDSSYMISDYGKDILFPN

SEQ ID NO: 56004 - protein, 304 aa, Lactobacillus iners SPIN 2503V10-D
MIVSQNSKDVIKIFQNIKDIPISTNLDDGNLNIFMCPINARKFDYNQISLVLVDSVIDYAISKKNITKYQNKPGRLSQMARKKFKECLNNTGELGELLLYCFLEGHLNAPKILTKMEMKTSNSLYVNGSDGVHLLNNGDGTYKLIFGESKLYKKLSDALNAAFNSINDFINENNPNGKNKTGINYEKDLISSNIENCEISDEDKDVLELLIYPTKNEKKIRIDDAFSIFIGYETDISNETRSCTSNNFSDEVKKKILLDLDKYENKIYEKIKDNNLLGHTFFVYIIPFTDIDITRRKILKDILT

SEQ ID NO: 56005 - protein, 475 aa, Lactobacillus iners SPIN 2503V10-D
MNNFIDYISSKAYTDDYLINLIYNLEKNFCNKLLDQDYKIDLSNKEKCDLMRFADILCRSSKDEHKNLSLRIVSLVYEFEELLEDKFIKLSIINVLTKLGNFPSINLMGIKDENTGIDEIDLDLIVKRVYNESPIKEIFTDEQLKIFNELQTNNHFSFSGSTSFGKSFIFEAFTKYLIDEHNQSDNIAFIVPTKALINQVSYKIRKLVKSYSYKVINSPEIPKVIKRQDGKYIFVFTPERLITYFLDTTNPKIDYLFVDEAHKLLSVKDTRTPLMYHALVMAKRKSINIFFASPNIPNPSVFLELVNNTPDESHAVKVESVSQNRFFVNCHTDSSYMISDYGKDILFPKLNFSGNIITDLGIILNTFSNGRQSIVYCNTIEKTILTAFEFAKTLEEVRDENIDKLIDIINEKVHEQYYLRYCLKKGIAYHFGGIPEEIKIKVEELYKLGVIKTIFLYFNSIRGSKFARKKHFYFK

SEQ ID NO: 56006 - protein, 304 aa, Lactobacillus iners UPII 143-D; identical to SEQ ID NO: 56004

SEQ ID NO: 56007 - protein, 858 aa, Lactobacillus iners UPII 143-D
MNNFIDYISSKAYTDDYLINLIYNLEKNFCNKLLDQDYKIDLSNKEKCDLMRFADILCRSSKDEHKNLSLRIVSLVYEFEELLEDKFIKLSIINVLTKLGNFPSINLMGIKDENTGIDEIDLDLIVKRVYNESPIKEIFTDEQLKIFNELQTNNHFSFSGSTSFGKSFIFEAFTKYLIDEHNQSDNIAFIVPTKALINQVSYKIRKLVKSYSYKVINSPEIPKVIKRQDGKYIFVFTPERLITYFLDTTNPKIDYLFVDEAHKLLSVKDTRTPLMYHALVMAKRKSINIFFASPNIPNPSVFLELVNNTPDESHAVKVESVSQNRFFVNCHTDSSYMISDYGKDILFPKLNFSGNIITDLGIILNTFSNGRQSIVYCNTIEKTILTAFEFAKTLEEVRDENIDKLIDIINEKVHEQYYLRYCLKKGIAYHFGGIPEEIKIKVEELYKLGVIKTIFCTSTLLEGVNLPAKNIFILSEKIGLSNMNEVDFWNLAGRAGRLSKDLAGNIFCVNLYNQQGYWNDDSKIKILRDKNIEETKPIILRKNNKNLYKNIANYYTRNDYTNKKLSEDDKKIIEMYGNILLYHDTVNSDSVLKDRFIDSGNNSLDVLKKIRNENSVPGNILAKSIDIDIGIQNRVFKGNKEKLPTETTYEGCYKVLRLLCEEYDWLSTESKGNYPMIRSKEQLSYYATLMEGWINSKPLKYLIQKTISYYYNSGESKEISLRKDGKIYYMKFDKNNALHINTLINNLIKNLENNIKYKIKTYVSNYQSILRSCGVDLECDWEEYIDYGTTNPQIIDIQNLGFSRTMAIFLMDKYYNLFIRNDIGEIIDIDDEKLRTSIDKKKYDEEYKELNILFEWEK

SEQ ID NO: 56008 - protein, 306 aa, Lactobacillus iners SPIN 1401G
MSPILNFSNQGNNLSSIFTEVKHSESLGLVNPEQLRLFHLNVSSNLFNFASLSNYLINIVSEYVFSRAQVEKLSQSSNPRSIGIQALRVMKKNGAADVRGTGNELGEILLYAFLEDILGAPKLFSKVELNASSTSFGKSSDAVHLLTLENTPFPCYQTVFGSSDITGDIRSAIDHAFTTIDKVEHDIKRVDSILIDSNIFEESFDAETAEKIKDIMVPSANTKMANDIAYGVFLGYSLGLNPQSRSNLDFLKAMDAKMQTDIKQHASYIANKIKQFNLGTHSFYFYIVPFNDAEKDKKEIMEDLLM

SEQ ID NO: 56009 - protein, 883 aa, Lactobacillus iners SPIN 1401G
MSDDKVKLGEAIFNSISENEYLNKLYEKALLSYAQKMLSVPIDNNSLNSTELHDLLRFADLLSKSNHATKYEEHKMWAQEIIVLLNFLFPDNKNIKAFGGSVFSNTDNTRGISILNTDFEDPFILSRLFQEYKKSYLRIPTQENMHFFSAQKQAYDHLNDKYFSYSAPTSMGKSFLMRMFIKEQITNEKHQNFAIIVPTKALINEVSQKIIREDLNDLLSKKNYKVITASTDIALEGKHDFVYVLTPERLLYMLIAHPNLKIDYLFIDEAHKLSAKNGRAPFYYKVVDMLRKRKCPPKFIFASPNIPNPEVYLRLLTDISEGNVSALKTSFSPVTQIKFLLDLKNKKMSVYNQHSKNLIEVADVKSGNIQLEDFLQIVESQNKSSDVPNHHQTIVYFNSKSKAVNTAKNFADRLNDLNDKDLNALSNDIATSVHKDYYLADIIKKGIAYHIGYLPSSIRMRIEDLFRAGKITTLFCTSTLLEGVNLPADNLFITTKKVFTRKMTPVDFKNLIGRVGRIEYNLYGNVIFVTESDDKSQASEYVDMLKTDVPPQSLSIEAGAGVLTKPERKYIVNTLKSGSVVIEKRKNNQSEESYELTRKFGLILAKDIVTNNNSFVRQSFSDLLTPTDEKNIKSKLSENGFVPDDDINISSDQTAALSKAIIDGLQYPQRSDGHFHYTDIMEFLEKLCTIFKWEKYEFSTLGKVTNGQHKKLSWYGVLLMQWISGFGLNNIINKGIEYHREHPDNFWISRTQTVTYQDTIEFRNILFADTLEVIDNIILFSLSNYFLKFSNEYKRIHKVTSFPNDWYEYVEYGTTNAETIMLQRIGFSRETATYLKHHKEYLINAENGQCKLKRTLLECPNISVRNEAQNMILNMPEAFAHKI

SEQ ID NO: 56010 - protein, 316 aa, Bacillus toyonensis BCT-7112; identical to SEQ ID NO: 55594

SEQ ID NO: 56011 - protein, 720 aa, Bacillus toyonensis BCT-7112; identical to SEQ ID NO: 55589

SEQ ID NO: 56012 - protein, 315 aa, Enterobacter hormaechei subsp. oharae; identical to SEQ ID NO: 55046

SEQ ID NO: 56013 - protein, 885 aa, Enterobacter hormaechei subsp. oharae; identical to SEQ ID NO: 55047

SEQ ID NO: 56014 - protein, 315 aa, Enterobacter hormaechei subsp. oharae; identical to SEQ ID NO: 55046

SEQ ID NO: 56015 - protein, 399 aa, Enterobacter hormaechei subsp. oharae
MAKSTATTALNHQDFTSVFNLLIEHLFLKNRGKEEKYKISDEMIRRATWLASLGSSGNETDKNIASAFGTLLYLYDTSNDLYLKACYILQSRAGNIVSAKHLEGLFSQGNIIKHFSSSLDFELTSQKFLLEKRVSDNNYIYFTHFQRSLWDKLERGENVAVSAPTSAGKSFVIKRYIYDSVISANDGYFVYVVPSKALINQVGNEMSRELKDIATVMTTYKDSENDDLKIVYVLTPERCMRLLNENGKKAPKIVFFDEIQNLEDKSRGNVFENVIYRMTSLWQSTQFIMAGPYIINLHHSLNKIIDLNLVEQTTSTTPVLQLKVVLTVHKNKKTVNYKLISPVGDAVLGEYDIGKALYSKLSSSKGAALKHITSILDSDEQNIIYAPKKNLAEVTCPHD

SEQ ID NO: 56016 - protein, 543 aa, Providencia rustigianii DSM 4541
MMSITSLSDAGGPAARQGFKYQDHVAVSFIFKMLRDSNYSQVECETADDIVAVYQYAGQILNEYIQVKTTESDGKWNLKEITALDGTKANSSLLHKSLKCDVRPGIARFRIVTKRDVARILEGFKKEIDKRMLPDITTTRGVALRNKFKTFVSPQKRDFLYWAENIVWQVYGDVEALEAVNIKALAQLAEEQGNRPNFTQLKAIYEEFLEIADKAATASVKTSAASKIILRAPTLAHLRKLLDKADDKSAATSKPYKKRPDPFLVEFHANKKEGLLHSFSGFDVRYALKKWRHENYAKHLIEWLPEFSLKASEIVNILAHNAETILARSISTFSDSELPRNRLIAELILHSILRSHQNSEPVACKVFYKSAGRLSEFGNAHIVQIPDQDDQLWLGLARLIKVNDMDKTLEQIREILDKTISETVLSTEREIIISLREPLHHQPKSDSFNQALHRNSSVDDILNIICFPILLTYDSTALLSGWLADYVDNIKIEIETHFSTFTSKLPENIKQVKVIVFLVPMESIENLTKAFNAHCEKLEKLQA

SEQ ID NO: 56017 - protein, 713 aa, Providencia rustigianii DSM 4541
MNYEKIKNILAKLGEDNTKAVDMLLAINTIVNRSNSEWEGRDLVIRALDKFTYFDSVEQSLLLNMVRAVGLFPYITPHLSCMAISDRLAYEAHRVEGVEQGMVFHHLQAHTFSLIMQGRNVVLSASTSVGKSLVIDAVLAQRRFKKVVVIVPTIALIDETRRRLVKRFKDFNLITHPSQESVIETTNVYLLTQERVIQRTDLADVEFFVLDEFYKIDLGSSTDGSSRAVDLSLAFHKLAKTGAQFYMLGPHIQKISGLDDYEYHFIPSDYSTVAVDIQNFNLEMRSEERKEKLLELVATLDTPTLIYCQAPPSANRVAEYLIQEAKLTPVPETQEIAEWISEHYHPEWNVAKAISLGIGIHHGGVPRALQQYIVKLFNDGIIKRIICTSTMIEGVNTSAENVIIYDRRLKNSTFDYFTYKNISGRAGRMNKYFIGKVFMLEAPPLEQGLTVEYPIGHQDENSPMGLLMQLENEYLTDISRGRLQDVYANPVLSPTTLIENRHVPIERQVEVAETIIHDLQSNSNLLDWKGIPEPSQLNYLCELVYNLEGGNLMDYGISSSLQLVWHINELRTQKNLPAYLSDAVKNRRQEHTPSEAINLRLKFIRNMVCFRLPRDIMAVNNIQADVLAKKGVEPGDFRFFAEQLENMFLDPLLTALDEYGIPTQISVQLKNLILPSEHLNDLLDKLRSLAPKIEHLQLTHFEKNLMYWAVSEM

SEQ ID NO: 56018 - protein, 342 aa, Dysgonomonas mossii DSM 22836
MKFNSNDILVSKVTKSKLKTFYIGFDLGLCQTSQFAEILMDTLVDFAFGYHSGILKSYNRRILKEAAKALYNVKEFKEVKWTYVDEDSMLDDDELDAKNKYLKRGEFGELILHLILRDYFNTVPLLSKIFFKDSDGVTVHGFDSIHIGSDLIDSKKSSIFLGESKLYYRKTGKAGEFGINDLVNDIKEHFNRDFLQRECILISKKKNAFPLLDSYEDMNTKEEFTNYLKQKDYWIDILEKVGSGTHKIQDFIDSVTIPLICTYESEIFKKFTDDTHPDFEKTYDEEMENLRKILDDKLNNIPAEKGEIVKSNLNIVLILFPIPSKKDLVKLLHQKLYNQQNA

SEQ ID NO: 56019 - protein, 735 aa, Dysgonomonas mossii DSM 22836
MHNNIDLIIKSLEDNQHAINISVAESFKYAQLANNLISKYDENGYRLVINILNNWDKIPTETIELWTDIIEVAGFYPYLEKNKESIILKNLSGTIRKELHLSEYIPQKYFHDKQFELLELLDSDKNVIVSAPTSFGKSLLIEEVVASAKYNNIVVIQPTLALLDETRRKLQKYRDKYKLIIRTSQEPSTIKKNIYLFTAERVNEYKFFPKIDFLVIDEFYKLSGLRDDERSASLNNAFYHILEKFSPKFYLLGPNIDKISDGFSKKYNAIFYKSNYSLVDTREFNIYKDYDGKFGASGKKKEFKERTLFDLLLSLNDEQTIIYCSAPPKVRSLANKFTTYLIEKSISPVKVNYSLVEWIEENISTKWSLIQNLQYGIGIHDGALQKHITTSIIDYFNEGLIKYLFCTSTIIEGVNTSAKNIIYFDDKKGPNDVDYFDYSNIKGRAGRMMEHYIGKIYNFNPPPKKEDIIIDIPFYQQNPIKDEVLIQLSESHVLNKNTNQFLEIQKIPLREKEVIKLNGLSVNGQKNILSILRKEISQNYGLLSWTNFPTYKQLEYVLSLAWNNLILDGETTRPMTANRLTYMTFNYGIERSINSIINDTFKYDKKNNKNASKTDYDILNEAIQKIFQIMKHWFQYKVPKWLSVMTSLQEIVCIDNQLKPGNYLVYANTLENDFIPENLTILLEYGIPTSAIRKLERYIPREIGQDEVLAYIKAKSLQESDKLLMYEKEKFSINL

SEQ ID NO: 56020 - protein, 545 aa, Laribacter hongkongensis HLHK9
MSATSQSNAGGPAARQGFKYQDHVAVSFIFKMLRDSSYSQVECETADDIVAVSHHSSGMYVYEYIQVKTTEDDRKWSVTEITALDGAKANSSLLHKSLKCDVRPGLARFRIVTKRDVAKSLEGFKTELDKRVLPDTTTERGKRLQKQFKTFTSPQKRDFTYWADNCVWQVYGDVESLEAVNIKALSQLAERLGNRPNFTQLQAIYDEFLEMADVAATANVKTAAASKIILREPALVHLKKLLDEADDKSMATSKPYKKRPDPFLVEFHASPEEGLLHSFSGFDVKYSLKKWRHDNFAKHLIEWLPEFSLKASEIVNILAHNAEAILARSISTFSDSDLPRDRLIAELILHAILRSRQNSEPIACKVFYKSAGKLSEFGNAHIVQVPDQNDQLWLGLARLIKANAMDATLEQICEVLDETISETVLSAEREIIISLREPLHHQPKADVFNQALHRNSPVDDMLNVLCFPILLTYDSEALSSGWLADYINNLKAEIETHFSTFTTQLPENIKQVKVMVFLVPMESIELLTKAFNARCEKLEELQVCS

SEQ ID NO: 56021 - protein, 713 aa, Laribacter hongkongensis HLHK9
MNYETIKNKLAKLGDEGASVIDVLQAINSIVNRSSSEWEGRDLVIRALDKFNLFDAVEQSLLLNMVRAVGLFPYITPHLSKMALSDRLAYEAHRVEGVEQDMVFHHLQAHVFSLIMQGRNVVLSASTSVGKSLVIDAVLAQRRFKKVVVIVPTIALIDETRRRLVKRFKDFNLITHPSQEAVPDTTNVYLLTQERVIQRPDLADVEFFVLDEFYKIDLSNDADESTRAVDLSLSFHKLAKTGAQFYMLGPHIQKISGLDGYEYHFIPSDYSTVAVDIKNFNLGMRSDERKKKLLELVTTLDSPTLIYCQAPPSANRVAEYLINEAGLTPVLETQEIAEWISKHYHPEWNVAKAISLGIGIHHGGVPRALQQYIVKLFNEGIIKQIICTSTMIEGVNTSAENVIIYDRRLNTSPFDYFTYKNISGRAGRMNKYFIGKVFMLEAPPLEKGLSVEYPIGHQDESSPMGLLMQLEPEYLTDISRGRLQEAYANPLLSPTTLIANRHIPIERQVEVAETIISDLPLSSELLGWKGIPEPNQVNYLCELVYNIEGGNLMDYGISSSSHLAWHINELRTQKNLPAYLRDAVESRRQEHTPSEAINLRLKFIRNMMCFRLPRDVMAVNKIQADVLEKEGIEPGDFSFFAEQLENMFLDPLLTALDEYGIPTQISSQIKNRILPSEHLNDLLAKLRALAPRIERLQLNGFEKDLMRWAISEM

SEQ ID NO: 56022 - protein, 315 aa, Acetobacter cerevisiae
MSNITVENLDAALTGNPETLEVHLELVERDAVLDGHKVKIHCHCLTVDANGRVDPHRLAEFMRNAVTNYAIPRAKMADAKARDERWNSGEAVAALHEEAKRSFTDLALTGEGGEMLLFLLAERFLKLPQILCKMDLKTDTRMHYHGADGVYAGVTEDGILKLFWGESKVYKDVGDGIKKCFASIAPFLIEPDHEGAEREKDLILLSDKADLSDPIVTTALRQYFNKNSKQSKRVRYCGIALIGFDADYYPTDGVKGIAEEIAKAAKAELENLKTPIGKQLTAEKLNQIEIEVLCIPLPSADGFRKAFLKAMGLTE

SEQ ID NO: 56023 - protein, 869 aa, Acetobacter cerevisiae
MSLDQLATWLMDEGVKDDVEILTRLAVRTELDHLAPETVETAPIDWHRLLFAGSILARSAFRQHQEAALRIATGAVTMADTQPVKDAGAVLLGKLTNFRAVDLANDRKLLETNLEGRLGFGLRMEAQRRKLDHSVLIESSGHWLQVNDFQQRFWDSATLNNWLSASAPTASGKTFLVLQWLINHMRSAETRVSVYLAPTRALVSEIETNLAQLLGKAAEIEVSSLPLPEKYDAAQLGGKKLILVFTQERLHLLANVLGKDVHVDLLIVDEAHKIGDNQRGVILQDAIERLERSNDDLKVVFISPATQNPEELLADAPGTAKTDAVDSDAPTVIQNLIIAEQVPRKPKLWNLSIKEGTASQSVGVLKLASSPNNATKKLAFIAAAVGERGGTLVYANRAGDAEDIADLIAQLVPAIDGTDKELIELADLARKGVHPNFALASLVLKGVAFHYGNMPSLIRQEVERLFRSGKIRFLVCTSTLIEGVNLSCRTIVVRGPRKGMGNPMEPHDFWNLAGRAGRWGNEFQGNIVCIDPDDTTAWPNGVPIRSRYPIKRESDAVLETGDGMADYLERRADTPLFELAEVGRFEQVGAYLLSTYLRLGSIAQASFAKRHSPNTIAKTDEQLAALADKIEIGSGFSERHPGVSALGLQSLLEAFRAYEKDVENLIPAPVESQDSYDRFVTIMRRINEHLYPAFMPDSLIPLYVVIVVQWLKGFSLAAMIRANIDYHNRHGRKFVLPKLIRQTMEHVEQVARFKAPKYLSAYMDILHLYFREIDREDLIDTDLDIGTQLEFGVSTRTLLSLMEMGLSRMSAVSLYEKIARDNLTKEECMTWIRQRDDQFDTMDIPAIIVREIRGKILAIDQGSPDTVSP

SEQ ID NO: 56024 - protein, 280 aa, Burkholderia anthina
MQEHIPQVDALAELLVDQLVNYVIPLRKRREAFAQSSNSATGGDMAAVSRLRREAKRLLVTYNQKHPGRYGEVGELIAYVVAVRYLGAAQLGAKMALKTSSEMPVHGVDGLHGSQADDGSVLFYLLESKLIPSATDASREMVDSIAEHQADRGRMLNELRLVSDLSNLDSLEGDAREAAKSFFNSYTGDGSHLRRRDIHVGSLVFSESAFEKKLPRDLKKPPEIHEQHLEKLYAAKHKAFSKNLKKQADAKGVDLGGCIVFLVAMPDVNEFKRIFAELNT

SEQ ID NO: 56025 - protein, 875 aa, Burkholderia anthina
MSTFATEVAIEIRQEPGFWSDLAELRAVGIRSTVLQENQQVRVEGPVLAEKALARLLNTASVFASATDEESKELAQQIAVFASLTSGDDIVREASIRILSDLGNFPGLRKLEREHPVDLGFETHMRSGLLRELNTVDMAGARVPLTEYQLDLWRSLDSSAATAVSAPTSSGKSFVVLEHLSERAIAAERFGAIYIAPTRALLTEIHGKLEKRLSSISDSIRITTIPVPDPESRPKQIYVLTQERAQFLLSTVAVAGLIDLVISDEAQSLGDDSRGMILQDALEKLHESNPAARFLFLAPGASGLQLIGDSIGLPDINVKETTLSPVVQNRISVGFSDLDEHVVRLDLVTPKRLEPIGTYHFQRGFALGDDTKLAAVALELGASGRSLVYATGAKNAEDLTALLALNRQPETSKGLSDLAKFIEQHIHKQYSLATYVRQGVAFHYGNMPSLLREGIEAAFKRGELDYLCCTTTLFQGVNLPARNVFIDTPTRGKGAVLDEASLWNFAGRAGRLGEEVVGNVFLVNYENWETKPLTERKPFAMQAAFKQTVEADFDAVVELLQAAVDKAPILERDRASGDRITAAAGLILFRSSQKTLDGLLGHRGLSLTTEQKDTLTELAEQALASLELPASVLTTSWMLHPVALAGLLQRIRELVRHRDFSKLMPSNPSGDSYTVYNSIIRRLYKYLGGMNLSGEEGRRQRGYVSHVTVTALKWMRGEPLTQLVAEAVKYKKKVAQQTNKRPLTQAAIDGAIRDMFTLIEQTIRFKLVQWAKAYVDLLKYALAQEGLDEMVTQVYDFSLALELGVSTRTGRSLVEFGLSRITAAAMASLITDSSLSSDQVRGWFLQQPASLIQQLSPLVVAELRERGLVVIEYSA

SEQ ID NO: 56026 - protein, 468 aa, Lactobacillus coleohominis 101-4-CHN
MVRLKFGIMLTDFWACSSLKQRVACDYLFKLVNPDYNVENGVATKMKNCLASIPRDITGNIFYIEEDARFIQNVRTKIVPLITKPLAFVAFFLNCLKKDSSLNDDTPIGNNTKRHYLNASSFDLAQTIADFLFFTIRQNDNEDQETHSYIKSLSKTKIASFNVAGLSLTEARHPLNDVKLTSSNRNFDSVFEEICVGKLDIPNPNHIRAFKLRNSLYEEDYTQVISLLQNNICNYVYSRAEIDQLERNISFADVQRKTLLAASQLNVDSNTLGDLLNYLFIENEENAPKLMSKIEFNNYKNDCDGVYLKKINDKYQIVLGTSKIYPSVYDGISHAVERICSLVSQSFNPSILVSDFNFINRFPVDDLKALKRIFIPTQPQDELEVNGFGIFLGYSMNLSCDINLLSTEKVREIVNLQINNDLKDVIQQLNIAISDKNIKQYSYYVYLLPFRDVTETSKMIMEKVLGKR

SEQ ID NO: 56027 - protein, 867 aa, Lactobacillus coleohominis 101-4-CHN
MKTTTKAAMEEFFGDITSNKYLKVLFSKLLDEYSNKVFGKKHQLDLVTKNNLMRFADLLAHSRMLKESNFHQNISQQIIFMLEYLFPDDISVKFVKQRIQSTLNNYSVQNNDLHTVPSGDALLNYLANTYKKGELQIPGSHDQTFIGEQKAVYIDMTESNLSFSAPTSMGKSFLARTYIKNQILTNKNGNYAFVVPTKALINEISSKIINDLGNNLSQNRYRVIRSVSELNEYSIDDGYHYVFVMTPERLMYLLIAFPNMDLPFVFIDEAQNISKHDVRSGFYYNLVDMLEERNSRISFASPNIPNPDIYLELIRDNKKSKNARKIKYSPVVQVSYVVDFTDSTVQIYNPVSKQLKPLKNIGEESLFDLIDSFSDNSNCGIQNLIYCNKIDTAIGLAVQYADSLEDKNDLTLDKLSSDIKSEINEDYYLADLVKKGVAYHVSFLPKNVRLRIEKAYRAGKIKNLFSTSTLMEGVNLPADNLIITSNKKGNAILSTVDFRNLVGRTGRLKHSMIGNVFLAILPESFSGRANKRDYKKLLKATIEHQRLNTDLLTKKVVLLIKKSLFEGDLTLKLLFNLSNWTNWKYKTVRKFVLQYLNDIQNNRQSIVRKKFQQFIDPQEEHEILTCLHSRYSEKFDNDVNISTDQTSKLKLMIKKGLKYPTFNESGQLNYQEVLSFLDQLDSIFNWQQYEKSKIGNANKRRWYAVILIQWISGLGLRNIINKAIEYKRENPHNAIYRNQEYYDFDDSKSQKNIIINDTLYAIQNVLLFDFASYFLKVSKEMKNYFNVPSLDNDWYEFIEYGTHDGFRIWLQKCGYSRESANYIEKHPEFFDVDGTSYRLSSDLANVNDINLRDETRDIMFNHPEIFV

SEQ ID NO: 56028 - protein, 301 aa, Prevotella oryzae DSM 17970
MRKTLEDIIVKAITFRYQLPNMQLSIPPYKNSVRKDECYKGLNNNDFANAIYNGLIDYSYNDNDINVDSLTPLHKRALQAKIRYDKNASIEEQEKYGFYGEVILHLMLNKFYKTSTLISRGYFYHPIENAETKGFDCFHLIQNAPDLVELWFGEVKFYADGKAAIKSILEKVSTSLSDGYLSKNAITIFDEDADKWNIQQSELLRIATDWKDNPSINVVDEIEKYNMRLVYPMLVICNNIKNKDYNETISGLIDYANNKYASLNIKLSVPFELFFILLPVNDTKTIKQTVIQWISQQVQPK

SEQ ID NO: 56029 - protein, 753 aa, Prevotella oryzae DSM 17970
MDKSASAAKIVRMLNQNDDSLTPQIIHDVCEFFDEEKANGLSNADLQFLYYVASKVGIPQYYDMLPHFNKDVPQIPNVNQLVFGYVVQNSSYYVDNDSYLHRYQINVLDHYHHRELNRYFLSASTSFGKTYLVYEIIRKMKYKNIVLMFPTIALMTENLAKIYSNDEYEWIREKYKIHTLSDSKPEGEWNIFLYTPERYLTFIDNNKNISLDFIFVDEIYKLDNGFIIDEESKEDQRDIAYRIALYFALQDAHTDALLAGPYVEIHQTEEGRDKSSLFRFFSKYGIKPLNYNSIELVNKIEQSVYIIKDAKKMFLREVSEILKKNQNAIVYSKSRSDAENKVKQLIKENFSFLNINNTPDEFKEFIEHIKANYPKDHDGRQWIEITALEQGIAIHHGLVPKYIQKEIIDFFNRGIIKILIATTTITEGVNTTAKNVLITSSMKGTKDLKKFDAQNIEGRAGRFMSHYSGNVIILDSNFKKIIESDSEKLEHLYFRKDVEHTSIDFPYTENKYLSDKEKDIYISTRQKQNRLGIPDDIMNMLKALSLDEKLTVYENVANLSDEDKREIKNLILNFNQKKFLDKKLLEIIIKTIAPIAVNSKIDSFIKGRKEDHCYLTGIILSYMKGGLPGMIKYKIDEQKKNINTAIRESTEFVYHILKYQVTKYFGAFNLMYKYYLSKTTNTPFEKVVGIDSVLMKFEYNSYTHNGRIVSDFGVPQKIIDYYEVAEDSKKKQLQKGFDNFERKVFNDVQKIVE

SEQ ID NO: 56030 - protein, 307 aa, Pseudoalteromonas porphyrae
MKNMKINHYASVDKKTFDSCIGSIEHEYDINELNTKVRLHYLKLNGNGEPMVKALANLLYEYIIDYCISSANRPDVLTARDSTRLTKEARKLFRHPEIGENNPDRTGEAGELLLFFLVEAVLGAPQIVSKMELKTNHRDEVKGSDGIHARYSEQDDMVDFFFGEAKLYIDPISAITAALKSIDDFHSVDMLEHEFTMVTKHFKYSNDETKKSISSLIISGEAGPNVRLNHACLIGYNFKDFASLDGSTPKEMTADFIRKFLSDSERLTKSLFSKVDNMKCKQLSFEVFFLPFPSVDAFRNAFNNALD

SEQ ID NO: 56031 - protein, 838 aa, Pseudoalteromonas porphyrae
MNSKESMPRLLRELTKASVIKQLPKSFVQTDSVEITDKQVSALVSYSSILSLGVGEDINKSYEIITRLLEHDSENTLVKSAAEVILSRIGNFPGKKLLEERHGLGNSISAPLRLEIIARESENTIYCDDQEIQLTDFQLQLFNSLKVERNLSISAPTSAGKSFVLNLSLSEQIRDGNGESIVYVVPTRALISEVSGRVRSAINNIGSDKAIIRTAPFPIDRKKIKSNVVYIFTQERLFSFLSSKDILPHIDTLIIDEAHEIQKGKRGIILQAAVDLALNKFKNVKLLFASPLINNPEYFLSLFNRTNNGKFFTEVVSPVAQNILLVNQVPKKTKRLSVTLVGERENIQIGEFDIPFVLRKSIAEQIGNFALSLSGGDSAVISFSNTPISAENRAIAASKIAPKIDISPELEVFINFVSSEIHPEYSLLDCLKKGIAFHYGNMPSLLRSGVEELYKQGSITTIFCTSTLLQGVNLPAKHIVIENPKSGENPMSRSDFLNLAGRSGRLLHEFHGNVWCIRPQDWDSECYKGDKLQTISSAINNLMIDGGTEIQRVLSGNYTDHDDDKSSDEANIAVGKLYNDYLDAKGSLFLEQYRSENNSDSIDLTKHLIESIQVTLPPEIVKNHQSIRPDYLERLYLYLSSQNVLENYYPIYPYTQGAKARVEEIIKVLIHCFDWDIHESYVSWLSFLSYQWVWGKSIGQILSGRITYLEEKKGKRNVNPSTEIRNCLKSLETDVRFKMVKYFSAYIEIIRYVAEKRKLSTNGEIEAYHIYLEFGSCKKSILNLISVGLSRFTALHLDRVFKFNEHDEPENYINQIKKVDISSLNIPKLCANELIKFI

SEQ ID NO: 56032 - protein, 315 aa, Thalassolituus oleivorans MIL-1
MDKLKAINWPSLVAGKHSWIDDHFKVHSVLDDKKTVCRFFSLDFSGTQQEILSLTESLSESIEHYVFDEKQLASFHKEGKVPFQKAMKFFGKTNPDMDGKYGELLLYLLTEKFLQTPLVSHKLSLITNTNDQVKGGDGIFFGDYKGELAILIGESKIHQGAAGAMEDALESLDRFYDNYSSGQLGHEMFIARSNISENFSSLDDAESLYQAFTPGTKQYKGCVKAHPVLLVFESSKISTIEEKAKNKDEAEQMFSDWLTGRSKEIQKLLGDKLNKYSELKKVYIDVFLIPLTNVSKFKHALYREIHGIDYVSNEK

SEQ ID NO: 56033 - protein, 864 aa, Thalassolituus oleivorans MIL-1
MTQIYSQAANHEDFIRVFDKLLEKLFLEDKVADNVQVDLDNEEIKKATWLASIAALSDDDKERNMANAFGALLHLTDRENEIYKRACYILQSRAGNLITSSHIPKLFHKENTLSDYGTLLNFELAAHRALLEHEFSDDTKIFFTEFQKKLWESLNSGENIAISAPTSAGKSFIIKKYILELVQGGAKNIVFIVPTKALINQVSNALKSQFHEKAHVYTTYIANEEDDLATIYVLTPERCLKLLQDKNITPPELIFMDEVHNIEAGSRGVIFENILYRVTSTWASTQLVVAGPFISSLSDSIKKICNISIIDHQTLSSPVFQVRSALTFFPSKKIAQYKISSPTQRIISGEIKLKKSLYSKIKTNKGEALEVIADMFSPEDHNIYYAPKKNLSEKWASKIAPVIASKNPKIIEAADSRVKDLIDFLSEEVHPDYSLIRTLRLGVAYHHAGLPDIARQEVEELYSESIIKNIVCTSTLLQGVNLPADRLIVISPKVNSQDMPAFDFLNLLGRAGRANTKLYGEIYCIDVVDDEWGSKKLEADVNKTVDTSSNLFLQKNEDYLSVIADMSGDQIREMTGDKDIYGNLSYLRSIFKTDRNHFDRILSSSGISSENVEIFSKKIESMYNGITIPQELIAKNPFIDPILQNKLFEAIQSEGAGNWLISKKPMTKGGSDLDYVAFQEKSYYFQLWSVFDRLNEIFNIEYELNSNGYANDNYINIGRLVRDAHRWMTGKKHKFFILDLIGENNNDEAEVDKAARRVTSHISTNLTFIAVKYLMLWSDMISYFLSDEKIEENAYILNLHSMLEMGSYDPVVLELMSCGINRSVALSISSKVKMIDASAEKALAIIDKDKLPNIFKRHLMKAGY

SEQ ID NO: 56034 - protein, 316 aa, Bacillus marisflavi
MSRAVEIKNVLSCKINEANLHSYFIDFDLNDEGKAEQMLKDFVTLLAEEIPNFALGYHQGVMVPQENILRVLIEAANSIYKIDAYEKSAETYLKGECWDDDIEEKYLKRGEFGELILHFILKYFFNTLPLVAKVYFKDSYGHAVHGFDSVHINPEEKTLWLGESKLYTDGKRGVDALVEDLFEHFNGDYFESEFTIISKRIKDTEKNLVSAGTDPESWIKLLNKYTKLSQKLNKITIPMFCAYETKLFSKDHESEEFEREYIEEISKLNERFMKKKSKHPWNKHLNIIVILVPLESKKKLISALHRKLKGLQMLGE

SEQ ID NO: 56035 - protein, 720 aa, Bacillus marisflavi
MEWIGVDIANIERLNFEESFSLARYVAQQKLVDQENANKIIIKVLDIWDEIDDSTKELWIDLIESAGFYPYLLKLIASNNQLDTTSEIRSSYHSSNKLEDITFHKEQKILANLIAEERNIIVSAPTSFGKSLLIQEIISLNKYKNILIIQPTLALINETRINLKKFNGDYNIIVNTTQEKEEKNIFILTAERVLEYEGLLDIDYCILDEFYKLSSFRDDERSDVLNIALKKVFRNNPIFYFIGPNIDSISEGFQERYDAIFFKTKYSLVNTEIVKVNLNYQTTGVRKQAIEKERKLFELLYMQRDEQSIVYVSSPQRAYNLAIKYYNYLSENKLIKKEQYLPVSEWIQENLSENWRFNALIKNFIGVHSGIIPKHLVHSMIEYFNNGKLDVLFCTSTIIEGVNTAAKNVFIFDNKKGPNELDFFDFSNIKGRAGRMLKHYTGKVYIFNKIPQKEDVDLDIPYYDQKFINDEILVNLDRDEVHSPHIDRYDKLHEYNEELLKIIKKNAVSVAGQKEIIRKIELELKKNPKLIIWDRFPNRDQLNFVISIAWNHLLKPTETTRPMTIKKLPVTIRKHISNNLHTLIKEEEIYLQKNNPKWEAERVMDTAIENVFREKRHWISYKVPKWLNVVNALQKAICINKGFSRSGDYSYFASYLENEGVEERFSLLIDMGIPSSVINKINHLVPTDLKGQELIHFVKNLRKNNISSLLVYEINKIKQL

SEQ ID NO: 56036 - protein, 349 aa, Pseudomonas poae RE*1-1-14
MSSSLATVPSLIEVIDKLLNQSPLDDFVKCALDFSVQLPGSPPKLALLHVRFQEDTPNTTSLADFLSSQAVNYALSRRRRDAYMTQLNSGKNGDLSLTSQIHKAVRSAFIDFRKEFPSRASEVGEVLAYCVAIHHLGAAQLVAKMSLKTSTNMPVHGLDGIHASVKDGVLNVFFLESKLAGSAASGTADYAESIAGFGSNKKQYMQEYGLVRDLGNLDALDPAEKELLMDYLDVFNKPNSPKRERSVGVICYSETKHFGNKVSVDDTVLDKHETHFGELYVKDYGRHHENVSNQLARHGVDPNKCMLYLVAVPDVDELREQFYESLGIVPALSDTALTPPLTDGDDQNE

SEQ ID NO: 56037 - protein, 876 aa, Pseudomonas poae RE*1-1-14
MSSFASELSARIIENAEFRKTLGTLQSAGAANTLPKGIERSEADPDVEALGKLLYCASVFAQSNIEAHVGMAQAIAFNAMLVNQEQSILDRCSAVLTELGNFPGLRYAELNFKSKLNSLVGLIQRRVVEHLNTIRVHAEQIALTDYQKEVWDSLEGGSSLAISAPTSAGKSFLVIEHLCRRAVSSSSFTFVYIAPTRALLSEVHMRIKARLASDIGIRVTDIPTFEQVPRQVFVLTQERFQVLLSTTAAKIDLVVVDEAQNLSDGTRGMILQDCIEQCVVRDERTHVVMLAPGAEGFKKALESLGLPEISEITTTVSPVLQNRIVVTKGVGPRQLDFKLLSSLNTTPIGSMTCSTGMSSPDSRLAAVALELGSSGGSLVYAKTPTEAAKLAGSIAIGVTDPGALGKTKDLVAFIKEHIHPEYHLIHMVEKGVAFHYGQMPSLLREAIENAFRNGSIKFLVCTTTLFQGINLPARNVFIDTPARGRGDKQLLDPALLWNFAGRAGRMTKDIVGNVFLVDYDSWSQQPMDKFTKFTIKSALGEAITHHASEVLKVLAGEAPAGKPRDEASRNAFASAGMLITKARQGNVQSFLERVAPELNVKDSQLLCVASQQASDSLDLPLNVLNANWTLDLFSLDRLKIFLRASLDDGTLEPLIPRNPSDLARKSIGHYRDIFNIMFKYIKGYGGNFGGYVARIAVRWMEGKPYPVILKYEINSKQSQIQKKRDIEGMYARTIEGYKVKRVTELNPSKVIKDTFDIIEDVIRFQLVQMGKAYIDILTYVMVENGMSHRVPEIFDFSLALELGVSTVTGRAFLELGLSRIAAAELQRLVPDSDLDVVSARKLIIDFDHTPFSLSQVIIDEIAKVRATISDTLVVTE

SEQ ID NO: 56038 - protein, 306 aa, Actinobaculum massiliense ACS-171-V-Col2
MAQATITPTLRGDTFASTFTEVAHSNTLGLRNDEQLRLFHLSIQNNRFDHTALVKFLKRNVGRYVFSRAEYEGYKQRDDLEEVALDAVNRMRSQQDGMGLGEILLYVLLEQILEAPKVMSKIELNQARGQIHSRCDAIHLLTPDGQRTTSSIVFGTSSVVGNIGDAITAAFDRVVDIEQNRSDEVQLAEQTVFTKTLDPATANYVKDLLIPKPGGAPEFDTAYSMFLGYDIGLDPKNYGNQQYRAALDQKMQGDIAAHAQIIANEINTRNLDNYSFYIYVVPLNEVDVDADAIMDGLVGGPGGSHV

SEQ ID NO: 56039 - protein, 889 aa, Actinobaculum massiliense ACS-171-V-Col2
MGSWVGQVVAMSDKKLTVGELVFSDIDSNEFLKQLYANLLYNYGLHRLGLADRHPYDVDLEAALRFADLLSKSIHPTNRDRHRVWAQEIALLCHILYPQDARTKAYVPAIFTTLGNYPGLKQLGVTSDAGILDAAFNAYQAEYLTVPGDKSMKFFAPQKKIYDRLNDGKFSFSAPTSLGKSFIMRTFITNQIKSGVTANFAIIVPSKALINETRSKLIADLGEDLERHNYRIVSAAGDIVLEGDHNFIFVLTPERLLYLLIGKPAIEFEYVFFDESHKLSGKNSRAPFYYQTVTILQHRHRPPHFIFASPNIPNPEVFLRLVDPNSDENETNAVATQYSPVAQFKYLVNLHENTISSYNDHTQEFTHLASLQAQDATAQGVTRFVSESSRGSDHRGQTIVFHSARHHAVQAARDYAQGLADLNDKDLDALAKDIERDVHEDYYLSGLIRRGVSYHIGYLPPAIRERIEGLFREGKISTLFCTSTLLEGVNLPADNLVITTNKIGRAGMTAVDFKNLIGRVGRIEFNLYGNVFIIVGNQLASEQKAKELLQANVPAQKLSVQTDSQIISKKMKQGVVKDLQEGRIEFSKGNESYERYDMKRKFGLMLLRDITTGRQSLVREEFSDYLDEQATNSIIATFSRREGQQDDDINVSVDQAEALTHAIQAGLQYPQLSPNGKFSYDETLAFLQRLASIFKWRIYNPETLGRTTKGSDQLAMLSWYTVLLLQWMEGHGLRSIMNRAIEHHRKTGIVWINRQPNRYLDSKEHRNLVFSDTLEAIEQVILFELSNYFLKFSNEYKKVHGKEQFDNDWYEYVEYGTTKQETILLQRLGFTRESATYIRINVSNAIFLHEGKPHLNPILLESSNINVRKEANEIRYNVPEAFSMPDFLF

SEQ ID NO: 56040 - protein, 379 aa, Dickeya dadantii 3937
MTHTSSITSNQKNPNSKYELLYIKTFDLEVIQGMKSVDANSLHKIYKPVYGLEHIIILAQESLPTAPFKVNLLCLGFKEDMPKDKELAETLFLELVHYCIPHPVIEKRKKQALDEGKDEARLYSELLREARSLFMKYKLESAIKKKSGETEEKFEQRVRNANSRYGEVGELISYCIAIHFLKASQLVSKMALKTSSEMPVFGLDGIHATIDADGTLTVFYLESKITREFDSGSEQFSKSVSGFEIDRNGRRNEYRIIQDLSNLESLEGEERSKAINYFNPYSSQSSNVRERFIGIIAYSEKNYSNKLPINDEAPLSIHFEHFKNGYTSSYQEKINTLTSDLTKAGATLQKCRAYIFALPDVDNFKLDFAKELSGEHFSA

SEQ ID NO: 56041 - protein, 858 aa, Dickeya dadantii 3937
MQRSYPVSTLAHEIISQIRNKFEFKSDLGFLFSHSFLKKNDKNIFVNRHSEEDNAPTEIFKRLIESAYLFSQSESDEDKNLAQSIAYHLNTITDDDFLKKMSENLLRILGNLPGANYLQKENRDLPESFYSYFKRRFIEKENTIKISNKELILTDFQKKVWDSLHTNKSQAISAPTSAGKSFLVVEMIINKIISGEINFVVYVAPTRALVNEITEKFINKTLEYHNKIRVTSIPTVNDGFHKQIFVLTQERLQVLLDHQYHKIDMVVIDEAQSISDEIRGMILQDGLDRISVQNPHAKYVFIAPGAVGFDDLADIIGIDKLHIEKTNYSPVVQNKIIVKVDPAKENNLKLSLLDNSNILPIGEITSKRGFANENTRLAAVALELGKNEGSLVYGTGAADAEDVAKQISSGLLPIKNDNDLQELSKFIKKHVHKDYSLANHVLRGVGYHYGKMPSLLRETLEKNFIKNKLKFLVCTTTLFQGVNLPAKNVFIDTPTRGNRGEKLDPASLWNFAGRAGRLGYSFSGNVYLIDYDDWETKPLDSKIDFQITSSFKKVVTDDFDKILERLNKDNHSGVSQYTNVDAAVGLLISRAAKGDLHNFLTRSFRSITEKSKINSIEIATRNSLESITIPHNILSLNWTVDPFGQERLYNRFIQKIKEGKADELIPRHPSGDVYANYVGVFSRINKYIINNNTAKFSNYLTSMALNWMRGKSLPEIIDLSIKKKKEKGGNKPVNVDRTVREVFDFIEDNLRFKYVQLGKAYVDLLRQALVDNNLSHKSEEIYDFPLSLELGVASIAGQAFIELGLSRISASYLENIIPNSNPTINMAKDWLKNNDYETLDLPLTIFRELEDKGLLNSD

SEQ ID NO: 56042 - protein, 542 aa, Dickeya zeae Ech586
MSITSLSDAGGPAARQGFKYQDHVAVSFIFKMLWDSNYSQVECETADDIVAVFQCAGQLINEYIQVKTTESDSKWNLKEITALDGTKANSSLLHKSLKCDVRPGFARFRIVTKRDVAKVLEGFKKEIDTRVLPDITTARGVALRKKFKTVVSPQKRDFLYWAENFVWQVYGDIEALEAVNIKALSQLAERLGNRPNFTQLQAIYDEFLEIADKAATASVKTTVASKIILRDETLAYLKKLLDEADDKSMATSKPYKKRPDPFLNEFHANTKEGLLHSFSGFDVRYALKKWRHEHFAKHLIEWLPEFSLKASEIVNILAHNAEATLARSISTFSDSELPRDRLIAELILHSILRSRQNSEPVACKVFYKSADKLSEFGNAHVVQIPGQEDQLWLGLARLIKANDLDTTMEHIRAILDETISETVLSAEREIIISLREPLHHQPKADAFNQALHRNSPVDDMLNILCFPILLTYDSEALSSGWLADYVDNLKTEIETHFSTFTSKLPENIKQMKVIVFLVPMESIEHLTKAFNARCEKLEELQA

SEQ ID NO: 56043 - protein, 732 aa, Dickeya zeae Ech586
MKIFQAGHSFVDILRNDAVMNYETIKYNLAKLGEERASTVDVLLAINTIVNRSSSEWEGRDLVIRALDKFKLFDSVEQSLLLNMVRAVGLFPYITPHLSTMALSDRLAYEAHRVEGVEQGMVFHHLQAHVFSLIMQGRNVVLSASTSVGKSLIIDAVLAQRRFKKMVVIVPTIALIDETRRRLVKRFKDFNLITHPSQEAVPDTTNVYLLTQERVIQRPDLADVEFFVLDEFYKIDLGNITDESTRAVDLSLAFHKLAKTGAQFYMLGPHIQKISGLDDYEYHFIPSDYSTVAVDIQNFNLEMRSEERKEKLLELVTTLNSPTLIYCQAPPSANRVAEYLIQEAGLTPVPETQEIAEWISKHYHPEWNVAKAISLGIGIHHGGVPRALQQYIVKLFNEGTIKRIICTSTMIEGVNTSAENVIIYDRRLKNSTFDYFTYKNISGRAGRMNKYFIGKVFMLEVPPLEQGLTVEYPIGHQDENSPMGLLMQLENEYLTDISRGRLQDAYANPVLSPTTLTENRHVPIERQVEVAETIIRDLPLSNKLLDWKGIPEPNQLNYLCELVYSLEGGNLMDYGISSSSQLVWHINALRIQKNLPAYLRDAVDNRRQEHTPSEAINLRLKFIRNMVCFRLPRDIMAVNKIQADVLAKEGIEPGDFSFFAEQLENMFLDPLLTALDEYGIPTQISTQIKNLILPSEHLNDLLAKLRALAPRVERLQLTDFEKSLMRWAVSEM

SEQ ID NO: 56044 - protein, 324 aa, Clostridium bolteae 90A5
MCFIWLGEGLLNMANRIFDKKNVILLKVNEDDLNTFLVDMDIDDEGNPKYCLDDFTKAICNTIPEYVFAQYEDPNIHQNDIVEKLREAAHCIYKIKDFQLMKQWCVDKDINAYNELKKSSTAKRGEFGELLLHLILREFKRTIPLISKVYFKDSASVPAHGFDAVHISTDEKILWLGESKLYDDSKEGIKALVKDLNEHINIEYLNDQFVIIKKNLDNNSIPDREQWIDTITNCTKLSDKLNIINIPMLCTYTHDIYKKFSDMNDPNAVAYHKLNIRELKEYFDKQNKMPLKDRVNIILMLFPVNDKNELVINLHKRLWHMQSI

SEQ ID NO: 56045 - protein, 738 aa, Clostridium bolteae 90A5; identical to SEQ ID NO: 55647

SEQ ID NO: 56046 - protein, 307 aa, Oceanibulbus indolifex HEL-45
MVNIVSGDPEELGVHLQLVKRDVLLKDCVARLHCHCLTVDGNGRVKPERLAEFMRNSIIDYAVPKSRLDDARARDARFKSGSAVAALHHEAIGTFTDLANTGEGGEMLLFLLAERFLKVPQVLCKMDLKTDSHMHYHGADGVYASVNENGLLKLFWGESKVYGDPTAAIRDCLSSLAPFLVETDHEGADRERDLVLLSDKADLSDPELTAAFRKYFDRTSPLSNRVEYCGIALIAFDADFYPKDDAKGIGEDILKAANDEMEKWVKNVKNRLSVEKLDKFDIQFFCVPVPSADGFRASFLKALGIKK

SEQ ID NO: 56047 - protein, 206 aa, Oceanibulbus indolifex HEL-45
MKDTELFDWLSGEALRDDIIRLTQITVATEITNLDAIHESADPKKSFDWQQLLLAGSLLARSTERTHQEAALRIATAAVTLETSPEVRDAGAVLLEKLSNRRSVELAILRNRIAPDLEGRLGVSMRLEANRRRFEDSILLESSGKWIGVNDFQKELWAGASSGAGWLSASAPTASEKLTSFCSGCSITFARARQRSPFTLPQPGLW

SEQ ID NO: 56048 - protein, 310 aa, Chryseobacterium koreense CCUG 49689
MTPFNSDKIIMHQINDDQLSSFIVGFDLDENAEKVYRLKPFIEKLTDVIHEFAFGFHEGTETLNTELVSKVAEAAKSIYKIDGFQKVKDIYDNDGTLSDDVTEKYLRRGEFGELILHLLLRDFYKTTPLLSKIYFKDSLGHTVHGFDAVHIQEDTKTLWLGESKLYHSGKSGVKALVEDIAEHFKSDYLNSEFMLISKKIKHFNNIPEKDYWNNLMSKSSTLSDQLASINIPLLCTYECELFSKYSDEKCEEFIQEYTLEINALKDYFDSINVHPLKSHLNVILILFPVQNKKALVKGLHHRLSLLQALS

SEQ ID NO: 56049 - protein, 725 aa, Chryseobacterium koreense CCUG 49689
MEELITRITSAQRFNVEESFEIYKAISQYIVSDDTIAQKLVTNVLDNRNKFDPALDLILSDLVEAVGFYPYINKENLVLESTNSLIRLEYHHSGNLNKFLHEDQKYLLGLLNTDKNVVVSAPTSFGKSLLIEEIVASHKFKNIIVIQPTLALLDETRRKLLKYRDTYKIIVRTSQESSNEKGNIYLFTAERVNEYKDFQPVEFLIIDEFYKLSAKRDDERADSLNNAFRHIIKTFGSKFYLLGPNIDGISEGFTDKYNAVFYKSRTTLVDTKTINVYNDHKEYFDKPLKYKEYKENVLFDLLLSKHEEQSIIYCSSPSRVRYLSAKFCKFLIEKSESSNEEELDLIEWIKLNISPEWSLINLLQNKVGIHDGALQKHITTSIIDYFNTCKLHYLFCTSTIIEGVNTSAKNIVYFDATKGDRIPIDYFDYSNIKGRAGRLMIHYSGTIYNFNTIPPVEFTIVDIPFYEQNPVSNEVLIHLETEEVKEENLDQFQRINEIPGPEKTIIKQNGVQVFGQKNIIEALRNDLPRKYHLISWTGYPTGDQLHYVLELAWNNLLKPTETVRPMTLKALVTVTQIYGYNQNISNLINNSYSYFRGLKQYENQTDAEVMDDAIRHAFQILKHWLEYKVPKWLSVVNSLQEFVCSELGLKAGNYGYFSNLIENDFLRDNLSILAEFGIPGSAIRKLEKLVPADLPQDNVLDFIKENNIQNNNVFISYERKKLIEN

SEQ ID NO: 56050 - protein, 297 aa, Acidovorax sp. JS42
MVTEVEIDALLASTDSLLNNVFTFTCTGHSMPGTSHRGAAVAHQDTLERKEDFLRELKNTMCAWVYSKNKYNKIFQDEMAVRGADVQNVSSHLQFLVRERFRKGYPQGQFGELLLFNFLQHFFKAAPLLRKMPITTNQAIERHGADAIHYRPQGGKNLVFIGEAKTYSSKYRFKAALDDAVDSVIKSFLNLSNELNLYINDDFIEDSLREIAGKIKRNTLPNVVYELVCIISYQENEKNKTGNCQSEIEKSIEDAVTSHILKHQGALGHFDQGTLGKIHFIFFPFWEFDKLLNGFDS

SEQ ID NO: 56051 - protein, 856 aa, Acidovorax sp. JS42
MIKDEQRIKEAAEALFLIEHQMFAANLGLIEHSGELLDDQSLISDLVFSIDELAWSNETEDRRLAIQMIALTWEHATSSLRARMREFFILSLSRLGVAPSTQMIDLEFKRSSHYAGISSFRSKLATVSMQIQSQLLIGEIRYQLTEFQKRAWDAFSRSPYVGISAPTSAGKSFAIYLLIVDSALRSGLPSVYIVPTISLVNQVTADLTELLDAHGLTNWGVSTSYNANQSNTLFVLTQERAILAIERGLSAQNLEILVIDEAQNLEKVGDDDETRSKILFDFLHDMREMRSANKIILSGPRLENIGLVGEAVFDTDFAEERALESPVASITYAVEQRGNDFYLNQFRNSLSEKSSLKIEDAERVQGLLSKGYGEEYYTTLAALVDSLGDTSKNLIFCPTTDQARKVATRLPGFRERPPGEQALQELSQYLAEAIHPRHRLVELVQRGVAFHSGSLPPHARLVVEQAFSDGLLKDVACTTTLMQGVNLPAKNVFIRNPNLFVRRRAGSENAELTEYEFANLRGRAGRLLRDFVGRTIVLNEEAFRTVGDQQDDLFKDTYKSLRLTYADILERNREEIFSELQVVGTANSQGAKFISAYVRQQLFRDGLNAPARLQSVGLELPADILQKVGHALKGLTIRRETILENRYWDPFDLQKISDELSAQKIEKLPETAWQARVPALIKLLELLETLCPNYFRRFLGDVSSNRFLMALVLSGISWARETPLRTILEDRKFNDDANYEGNIDDQIEIIYRKVVYGLPALLKPIASIQGQGTAFLASLESGAYHPVTHYLLSLGLYRETAVYLKRRNFGQIRGDDPNLTSLVDERVPSSLQGLNRWTSRQVEITLKRKLRRNANG

SEQ ID NO: 56052 - protein, 223 aa, Alcanivorax sp. DG881
MTKKAAKIVYQTEKYGLRGEFGEILLHIAIRQVYETLPAVSKIYYKSAVNETVKGFDAVHVVRKDGDLELWIGETKFYENITRAVYDVSKEVVDHLETDYLRSEFILIKNKIDPTWSEAEALNKLLHENTSLDSVFKQACIPILLTYDSDVVGVSESDNEEYREKIKVEMRDAYANLRGKINHEYENRFNQYFPLVVHVIFVPLKEKKQLIAALDARLKALQL

SEQ ID NO: 56053 - protein, 715 aa, Alcanivorax sp. DG881
MMNISAIREKLKSETWTKDPFIILSEIANVCSSSIDLGRDLVIRALEGQDFLDQDYRNILNDLTMQVGLYPYVSDLEDLSLRNALMHAAHRADGVMGEYVLHRSQARVLNWLMSGASVILSAPTSFGKSLLIDIIISAKRFDNVVLIVPTLALVEETRRRMSRFVDEYSIVTSSNQKIAEKNIFVLTQERYLSLEDDIPGIDFFVIDEFYKLSISSDGGRSTLLNQAFLRLSNTGAQFYMLGPSIKSIPAIVKEKLNCKFLIEDFQTVAVELHFLKKKPNKDEALANLLDEIDGQTMIYCQSPASTRKLIKSYLDIREVEMTQDGELLEAAKWTSDNYHDEWLVSVALRHGIGIHHGRLPRALGRFMIRAFEEGKIKILLCTSTLIEGVNTSAKNVVVYDSKLNRRSLDFFTFSNIKGRSGRMFRHFMGNIFVFDAPPEEELPFVDMPAINPGENTPSSLLINLSEMDVPSTLREKVDSLLRQKLLPVELLKQHSGIEPEYLLDAAKTLISLEVRELERYVWASRPVYDDIKLTSDLIWTQLGGAAAARQSSMRSASMMTFWIWRLYSSRNVPQFRREMIISQIERNTSPDEAVENVLAFLRGWASFNYPKYLAALNDVVNHVLQLKGLSGCNYLPFAMIIEHLFQPSSFSALEEYGLPTEISEKLLNGRVFNKDDSLDVVVNNLRNRKLDRFGDGIFEKRVIEDFQRGIGAKIS

SEQ ID NO: 56054 - protein, 540 aa, Klebsiella variicola; identical to SEQ ID NO: 55324

SEQ ID NO: 56055 - protein, 713 aa, Klebsiella variicola
MNYEKIKNILAKLGEESASTVDVLLAINTIVNRSNSEWEGRDLVIRALDKFKLFDSVEQSLLLNMVRAVGLFPYITPHLSSMAISDRLAYEAHRVEGVEQGMVFHHLQAHVFSLIMQGRNVVLGASTSVGKSLVIDAVLAQRRFKKVVVIVPTIALIDETRRRLVKRFKDFNLITHPSQESVSETTNVYLLTQERVIQRPDLADVEFFVLDEFYKIDLGNATDESTRAVDLSLAFHKLAKTGAQFYMLGPHIQKISGLDDYEYHFIPSDYSTVAVDIQNFNLEMRSEERKEKLLELVTTLDSPTLIYCQAPPSANRVAEYLIQEAGLTPVPETQEIAAWISKHYHPEWNVAKAISLGIGIHHGGVPRALQQYIVKLFNEGIIKRIICTSTMIEGVNTSAENVIIYDRRLKNSTFDYFTYKNISGRAGRMNKYFIGKVFMLEAPPLEQGLTVEYPIGHQDENSPMGLLMQLENEYLTDISRGRLQDAYANPVLSPTTLIENRHVPIERQIEVAEAIIRDLLLSSKLLDWKGIPEPNQLNYLCELVYILEGGNLMDYGISSSSQLVWHINELRTQKNLPAYLRDAVENRRPEHTSSEAINLRLKFIRNMVCFRLPRDIMAVNKIQADVLAKEGSEPGDFSFFAEQLENMFLDPLLTALDEYGIPTQISTQIKNLILPSEHLNDLLAKLRTLAPRVEHLQLTGFEKSLMRWAVSEM

SEQ ID NO: 56056 - protein, 540 aa, Klebsiella variicola; identical to SEQ ID NO: 55324

SEQ ID NO: 56057 - protein, 713 aa, Klebsiella variicola; identical to SEQ ID NO: 56055

SEQ ID NO: 56058 - protein, 299 aa, Klebsiella variicola; identical to SEQ ID NO: 55382

SEQ ID NO: 56059 - protein, 842 aa, Klebsiella variicola; identical to SEQ ID NO: 55383

SEQ ID NO: 56060 - protein, 318 aa, butyrate-producing bacterium SS3/4
MPIEDEYRKIYDNEVNRELKREIAIYEDETEINNYQPLSHNCKEKCVNKCDHQCYKSLGKLMRKNIVFYCYGEDEVVAKFNNGLFADLEKAIKVAYKMRLPHREPKMDGLPSEVLLDAIVQSLVPGAYKLAVRTIFRQNDNNEIKGYDLTYFTNVNGKITLWLGQAKMGSKQYCKNGILDDLNKKYSSLYLAEQIYFLADKPSGLTNEGKQLADLLSELNMLNALENDKKRAEQLMDFLKSKNIDICIPCLLAYDNSNIYSETMNIENKMKVEMNWMKHYFEKNFKFEDIKPKLIFIIFPIENIEALRGNEGFYAGLC

SEQ ID NO: 56061 - protein, 230 aa, butyrate-producing bacterium SS3/4
MDFINKKNINEKHISELQALYNQSIVNMYRSKVRNNNILDKSQKSIIDFYQSLDIKRMLISAPTSYGKTFIMREILYLNQEKYKNILLVFPTVALLRENALNMEELNQDKKMGYNVIKSIDREIDCQDRNIFVLTPERAMQLLAQYPNIEIDFFFYDEMYKIDEDYCNDETDDNDEKKNSYAERTFLDEARAKTFRILFIFAFKKSKRLLFSWTQPEKREVWKRNAKIYC

SEQ ID NO: 56062 - protein, 577 aa, Vibrio crassostreae
MSLNEMEQSDSGGPSALKGFNYQNVVAAYYVLKMLEDKNLKAVRCEVVDDVDVIYGDRIEYVQAKTTEKDTKWCVAEFADAKTDIVPPTGKQRVNQTVSKEDSILHKSILCDKRKGTLPAFFRIITQRDVTDALKYLKTQIDIRSEKLDLRPKLLKSLRSSVERNRPKKLAPFTSPNGNDVEYWLDHAEWEVIQSQELLDLRCTKLIRQAAHRKRIFLSENGDPERILCSLLDSLFRKGQKSRILNSMADKSYHRNDFLPWFENEIEHYTNLTNQHVKVYSTNQTELQAVLSSFFKNDSIYHASNDEGVKECIGLQGEYHRRQYGYDLIAHNLYGWFHEVLLLPNEIADHTATRITDNFKLLTRRYRQEASFLNKLIAKALLHSTIRTTYKSQPIPASLHVDDEKNTCFDNIHIILNTHKSDTLLMGFSHLINEASDQSLEAILQEFHALLASKAFSSQKEKVLIAKKDNYLLDHDINDILDANSSLDRNLDRFKFAFFIGYESQHLHCNSKSMDQDFEKQLVSEATNRFKHLVDQLITVDDFYKELHIEAYLYPVPSLASLLNEVQNQVAAQWKTP

SEQ ID NO: 56063 - protein, 725 aa, Vibrio crassostreae
MENTLDPQICLNNVRNKTLSAFSYLNKANECLSSPDLVPVGQEFVIRALDELSLFKKQSLLLQNLLRTAGLYPYLKKYFTNLSAEKEFVLDVYKSNFDDDFIFHSMQARVFNLLNSGKNIVLSAPTSMGKSAIVDAVIAEKKFNSIVIVVPTIALIDETRRRIAQRFGHEYQIIHHGSQIKRKDKVVYIFTQERVNERDDLRNIDLFIIDEFYKLADTKDELSRPRAFALNIALSKLLTVSKQFYMIGPYIDAIQGMRALNRDFIFIPSDFKTVALNIEKYDIAANNTTEKNKQLEKILDSYPDQTIIYCKSAGSIAKVIRFLSSLEKQQELKFLASADDSLRKYYRWLKKNYGMDWGCTKALANGIGIHHGSLPRAIQQKTVELFNSRQIKYLICTSTMIEGVNTSAKNIVIYDNRNGNPKIDSFTHKNISGRAGRMGQYLVGNVFCLEELPEQKSQVVDLPLGQQDDNSPINLLAGIQPDHLSEQSNQNLIKFTKQSDVPMEIIRKHSSYNVEVLASAYELITELSISEMEQISTVTKPKRYQLELLTTFIKLVEGAVLSRQRLHYQDSDELYNKLRKYIYADKHSDYIKDQVGYIYGSSEDRDYRSDTTDRELNIVRNIFKHAVARALSLLEDLLNYEFKSIEHPAKANLGWLVHVFENSHLPSSFSALEEMGIPIETLEKLVTDKLSDLDIDTLIRYIRMYHKYFEKLNPVDQMFIKQAIY

SEQ ID NO: 56064 - protein, 577 aa, Vibrio crassostreae; identical to SEQ ID NO: 56062

SEQ ID NO: 56065 - protein, 725 aa, Vibrio crassostreae; identical to SEQ ID NO: 56063

SEQ ID NO: 56066 - protein, 538 aa, Pseudomonas syringae pv. tomato T1; identical to SEQ ID NO: 55838

SEQ ID NO: 56067 - protein, 599 aa, Pseudomonas syringae pv. tomato T1
MQGRNVVLSASTSVGKSLVIDAVLAQGKFRKVVVIVPTIALIDETRRRLVRRFRQQCNIITHPSQVATDAPINVYLLTQERVLQRDDLGDVDFFVIDEFYKLDLASDSDEKNRSIDLSLAFHKLAKLNAQFYLLGPHIQNIQGLDGYEYNFIPSNFSTVAVDVTHYNLRTRGDTRKDKLLELCSQINSPTLIYCQSPASANRVAQYLIDEGDFSALDGTREISEWIADNYHPAWNVAKAISLGIGIHHGGVPRAIQQYFVKLFNERTIRYIICTSTMIEGVNTSAENVIIYDRRINNSPFDFFTFKNISGRAGRMNQYFIGKVHMLEEPPEEKSLIVEYPIGLQDGASPMGLLMKLEPEYLTDQSRQRLEAAYATPQLSVATLIENRHIPVERQVELADRILRELALGRVWLTWKGNPEQKQLEYLCTLIYEHLPHRLPEYGIHSGLQLAWHINALRAQKDFKAYLQQAINEDGSDRTPSESIGQRLKLIRNVISYRLPRDIMALSKIQADVLTRTGIEPGDFGFFAEQLENLFHDPLLTALDEYGVPTQISSKFKGAILPSENLTQLLDKLRAWAPRIESAPLTHFEKSIVRWAVDEI

SEQ ID NO: 56068 - protein, 538 aa, Pseudomonas syringae pv. tomato; identical to SEQ ID NO: 55838

SEQ ID NO: 56069 - protein, 714 aa, Pseudomonas syringae pv. tomato
MKYDLIKQQLENLYDLNSDKTGLLMGMSLIVNKGHPEWEGRDLVIRSLDKFELFDEVEQSLLLSLVRTVGLFPYITPHVESVSFPDRLAYEVHRVEGIEKGMVFHRLQAHVFHLLMQGRNVVLSASTSVGKSLVIDAVLAQGKFRKVVVIVPTIALIDETRRRLVRRFRQQCNIITHPSQVATDAPINVYLLTQERVLQRDDLGDVDFFVIDEFYKLDLASDSDEKNRSIDLSLAFHKLAKLNAQFYLLGPHIQNIQGLDGYEYNFIPSNFSTVAVDVTHYNLRTRGDTRKDKLLELCSQINSPTLIYCQSPASANRVAQYLIDEGDFSALDGTREISEWIADNYHPAWNVAKAISLGIGIHHGGVPRAIQQYFVKLFNERTIRYIICTSTMIEGVNTSAENVIIYDRRINNSPFDFFTFKNISGRAGRMNQYFIGKVHMLEEPPEEKSLIVEYPIGLQDGASPMGLLMKLEPEYLTDQSRQRLEAAYATPQLSVATLIENRHIPVERQVELADRILRELALGRVWLTWKGNPEQKQLEYLCTLIYEHLPHRLPEYGIHSGLQLAWHINALRAQKDFKAYLQQAINEDGSDRTPSESIGQRLKLIRNVISYRLPRDIMALSKIQADVLTRTGIEPGDFGFFAEQLENLFHDPLLTALDEYGVPTQISSKFKGAILPSENLTQLLDKLRAWAPRIESAPLTHFEKSIVRWAVDEI

SEQ ID NO: 56070 - protein, 463 aa, Pseudomonas syringae pv. maculicola
MTELDGTKANSSLLHKSLKCDVRPGLARFRIVTKRDVAKILDGFKTELDKRVLPDTTTARGKVLLRKFKTFISPQNRNFAYRAENSVWQVYGDVEALEAVNIKALSKLAEDFGNRPNNTQMQAIYDDFLEMADKAATANVKTAASTKIILREPALAHLKQLLESADDKSTATAKPYKKRPDPFLVEFHSSTEEGLLHSFSGFDVRYALKAWRHDGFAKHLVEWLPEFSLKASEIVNILAHNAEAILARSINAFTDSELPRDRLIAELILHAILRSRQNSEPVACKVFYKSSGKLSEFGNAHIVQIPGQDDQLWLGLARLIQAGAMDATLAQICGVLDATISETVLSSEREIIINLREPLHHQPKADAFNQALHKNSPVDDMMNVLCFPILLTYDSHALSSGWLADYVNHLRKEIEAHFSTFTKQLPQNITQVKVMVFLVPMESIEKLINEFNTRCKTLGDLQA

SEQ ID NO: 56071 - protein, 713 aa, Pseudomonas syringae pv. maculicola
MNYETIKNSLANLSDEGASTVDVLLAINAIVNRSNAEWEGRDLVIRALDKFALFDVVEQSLLLNMVRAVGLFPYITPHLSNMALSDRLAYEAHRVERVEPGMVFHHLQAHVFSLIMQGRNVVLSASTSVGKSLVIDAVLAQRRFKKVVVIVPTIALIDETRRRLVKRFRDFNLITHPSQEAVPDVTNVYLLTQERVIQRPDLDDVEFFVLDEFYKIDLGGDKDKNTRAVDLSLAFHKLAKTGAQFYMLGPHIQKISGLDGYEYHFIPSDYSTVAVDIQNFNLGMRSEERTQKLLELVRTLESPTLIYCQAPASANRVAEYLIQDAGLTPVPETQEIAAWISKHYHPEWNVAKAIALGIGIHHGGVPRALQQYIVKLFNEGVIKRIICTSTMIEGVNTSAENVIIYDRRLKTSTFDYFTYKNISGRAGRMNKYFIGKVFMLEAPPIEQGLTVEYPIGHQDETSPIGLLMQLENEYLTDMSRGRLQEAYANPVLSPATLIENRHIPIERQVEVAKTIITDLPGSQELLGWKGIPEPNQLNYLCELVYSLEGKNLMDYLISSSSQLAWHINELRNQKNLPAYLSEAIENRWENVSASEAINLRLKFIRNMVCFRLPRDIMAIHKIQVDVLEREGYEPGDFSFFAEQLENMFLDPLLTALDEYGIPTQISTKIKHLILPSEHLNDLLAKLRLLAPRMERLQLTSFEKGLMQWAVAEM

SEQ ID NO: 56072 - protein, 538 aa, Pseudomonas syringae pv. maculicola; identical to SEQ ID NO: 55838

SEQ ID NO: 56073 - protein, 714 aa, Pseudomonas syringae pv. maculicola; identical to SEQ ID NO: 56069

SEQ ID NO: 56074 - protein, 171 aa, Pseudomonas syringae pv. coriandricola
MAGTAASGTADYAESIAGFGSNKKQYLQEYGLARDLGNLDALPQADKDRLMEYLDVFNSPNAPKRERSVGVICYSESQHFANKLPVDDGALDKHEVHFGNLYANDHKRHHKNVSNQLEKHGVDANKCMLYLVAVPDVDELRELFYDSLGILPAQSDTALTVPSPGEDVSDE

SEQ ID NO: 56075 - protein, 876 aa, Pseudomonas syringae pv. coriandricola
MSSFASALSARMIRNVDFKKALGALQSAGAANTLPSNIARSQADPDIEALGKLLYCASVFAQSPVEGHVALAQAIAFNAMLVSKESSVLERCSSVLTELGNFPGLKYAELNFKSKLTSLAGMIQRHVVEHLNTINVHGENIALTDYQKGVWDSLEGGSSLAISAPTSAGKSFLVIEHLCRRAVSTSGFTFVYIAPTRALLSEVHMKIKARLASDPEIRVTDIPTFEQMSKQIFVLTQERFQVLLSTTSARIDLVVVDEAQNLSDGARGMILQDCIEQCVERYRRAHVVMLAPGAEGFKEALESLGLPEIREIATTVSPVLQNRIVVTKGASTSELNFKLLSPNGTASIGSLTCDVGMSTRESRLAAVALQLGHNGGSLVYAKTPTEAASLASSIAMGVTDPDSLGKNDDLVAFIKAHIHPKYHLIRMVEKGVAFHYGQMPALLREAIENAFRLGSIKFLVCTTTLFQGINLPARNVFIDTPARGRGDKQLLEPALLWNFAGRAGRMGKDIVGNVFLVDYDSWSDHPMDRFTKFTIKSALGEVITNNAHDVLKFLREDVFSAKPRDEGRKNAVASAGMLISKARQGSVQSFLERVAPELDILDSRLLCNASKAASERLELPLNVLNANWTLDLFALNGLMIFLKGSLADGSIEQMIPRHPADLGSKSFKYYRDIFNVIFKYIKGFEGNLGGYVSRIAIRWMEGKPYPVILKFEIEAKEVGIQKKRDIESMNVRTVKGYRAKSIKPLNPSKVIKDTFDTIEDVIRFQLVQMGKAYIDILAHIMTENGLSHRVPEIFDFALALELGVNTVTARAFLELGLSRIAAAELQRIVPNSELDSAAARQIILEFDGTAHTLSQVIIDEIAKVRAALLSSSVTAD

SEQ ID NO: 56076 - protein, 538 aa, Pseudomonas syringae pv. tomato; identical to SEQ ID NO: 55838

SEQ ID NO: 56077 - protein, 714 aa, Pseudomonas syringae pv. tomato; identical to SEQ ID NO: 56069

SEQ ID NO: 56078 - protein, 538 aa, Pseudomonas syringae pv. tomato; identical to SEQ ID NO: 55838

SEQ ID NO: 56079 - protein, 714 aa, Pseudomonas syringae pv. tomato; identical to SEQ ID NO: 56069

SEQ ID NO: 56080 - protein, 309 aa, Ethanoligenens harbinense YUAN-3
MELSKTVKDKTFDDYFTEVEHSETISGMVRPGSLRLFCLNVRNGNIKSSDLEKFTMLNIGQYVFSRAKQENYRNTGNFDLVTQQALRAMRKSAKARDIDAGETLGEIMVYAVMEEKLNAHKLLSKIELSADAAQYASEADGIHFLCRDGKTILSNQMVFGASSVTGDIKDAIDIAFEKISRIANHEDEELLLVEKTALDRFYEEDDLKVLTSYVIPEEHKNAAYGTSFGVFLGYSLGLIPDGYDDDQFRDRMHKKMIRDINAHEEYIAQKIRDAKLQNHSFYFFTLPLNQAREESDLIMQHVLEGDVDL

SEQ ID NO: 56081 - protein, 910 aa, Ethanoligenens harbinense YUAN-3
MTVEKRTLGSVIFAGIDSNPYLGTLYARLLKGYGLSLFNLNQRSSTELFNAKEKTDILRFADILSKSNDPEKADAHKIWAQEIAILMHEMYPQDSLVNLYAGDVFSSVGNHKGLELVNKDYSEPHALEEIFAQFRGDYLTIPAEPSQRFFGEQKNAYDHLTDDCFSYSAPTSMGKSFIMRMFIKDEIMHGAQKNYALIVPTKALINEVRAKVIDDLGGEKNTEKVNYLKLHNYSVVTAASDIALEDDNRNFILVMTPERLLYLLIAKPRFDLDYLFIDEAHKLSGKNSRAPFYYKVVDKLVHRQKKPHFIFASPNIPNPQVYLRLMLNAEEGDEDALAITYSPVVQIKFLVDLKKGRIEVYNDHALEDQCRILLANVRGSGIEVNDFLLAIETQNRKLSKEKRKQSIVYYNGRDKAIRAAHSFYERIKPNGPRNDPLLEALSKDIQEEVHQWYYLAEMVRYGIAYHIGYLPASIRARIEELFKSGNITVMFCTSTLLEGVNLPADNLFIMENKIFLSEMNTIDFRNLIGRVGRISFNLFGNVYFVAERNSKITTDDYVRMLGQEIPEQSLSIATDPNVLKKVEKQYVADILKSGKSEIPRRVNADGKAMQSEESYEMMRRFATILQGDIVHERDTLVRREFKDFLTPADEEFIRDTFKDAEVKPDDDINTSVDQTTSLIAAIRRERNPLRYPDLVDGKFVYDDVLAFLDELAEVFNWEEYEAGTLGKPSLRRWYAVILCQWMDGGGLKFIMDRALEYHQNHPYPFWINKHGSPITYNYLSDDHHNAVFGDTLEVIENIILYSISNYFLRFSNEYRKIRGDEALNRNNWYEYVEFGTTNPLTILLQRSGFSRESARYIKEHHEYVIRDGSTGQLKLSPALARCGNTDVRNEVIYIRQNSPEIFEADNNDEG

SEQ ID NO: 56082 - protein, 316 aa, Lentisphaera araneosa HTCC2155
MDFSDDISKAISRLVRKSPGDISAYIDHVCQSREVDGTKTESHFHFIQLDGNKRPRVSDLVDYIVNLIVDYSIPRSEIEKAKKELMTTGSTASLMKLQTKAKGLFADVVKTGEGGELLLYTLVQKVLNLPQLICKMPLKTNSQLHYNGADGVHVDYDKEADCLALYWGESKLYADLGKGLSSCFESLAPFLISENSQKSPQERDIQLISDHLDLADDKLQDAILDYFDKDHRNFNKLNYRGVCLIGFDVDHYPNKPNQKSIPELQLELNERVDSWVSSIKTQVTKHTDLSSFHIHAFLVPFPSVADFRDKFREALR

SEQ ID NO: 56083 - protein, 844 aa, Lentisphaera araneosa HTCC2155
MKLSFQEKILQRSSFLDQYKSLLISSAIEEFPLSNTDGYCENAVDVDWHNMLFFASALSKSEHHEHCEKALRICQVCLGSSQVQPEHKYAAAIILCELSNSMTLELAYQRDLLSRDFESNLSAVHKMNLCKSKIKFSICDSAQKILSVNRFQKDVYENYMANQCLSISAPTSAGKSYILKKVIIDLITQETNNYTIVYVVPTRALISQVEQEMKELLQENLIIDGYVSSIPNAPEGGNRFSKYVYVFTQERLHWFRSSNTNVLIDCLIVDEAHKIDDGSRGLLLQEKIEELITDHPDIRILFSSPFTSNPEVLYKGLLPTDQCKPIKTDFVAVNQNLFYLRSVYRKPRKWILSLVNKNDQVDLGEVLYDSRPDTEIKKIGFAVNYFGKNGGNLVYVNTADVAEKEAILLSELYTENIIDQEVNDLIDLCSNVIHKKYTLMKALNKGIAFHYGSMPMLIRSEIERLFELGKIHTLICTSTLLEGVNLPAKNIFIRKPSRGVGKPLSASDFWNLAGRAGRLGKEFQGNIFCIDPDTWVEKVPLEREKNIIARAVDKLEEKSVKDEIHFYIEQSLTSKYPFDFKAEAAFSYFYLKRLNGRLDAINIAFFKDVFQRVDELITLPRKHLVNHPGISPIGQQRLLQYFINYDKNITDLIPAYPEEEDALENYIKIVTRISKFLSGDNEAIAFYHALLIVNWLRGMPLSYIIKKNQTYWTKKDPKKSLATVIRKSMRDIETVVRFKFVKFISCYVDVLQIAFQQKGINEPIDELNNFKIWLELGVSQTTQINLINLGLSRHTAIELSKLLPKDDMSLTDVKKWMLDQDLETLNFSSIYIREIELVRKDFHI

SEQ ID NO: 56084 - protein, 320 aa, Sphingopyxis granuli
MGGHLSQLTETDLLSILTGNPEALDVHLTLVERDISIDGHKVKVHCHCLTVDGNGRVQPQRLAEFMRNAVVDYAIPRSKVADAKLRDQKFNSTEAIAELVERAKRSFTDLAKTGEGGEMLLFLLAERFLQLPQILCKMDLKTDSRMHYHGADGVYAGVTSSGILKLYWGESKVYKSADSAIHDCLASLAPFLIEPEHEGAGRERDLMLLSDKADLTDPVLTDALRRYFDRSSVLSTRVQYCGIALVGFDAPFYPADNVQAVADEIVAASLDALTGWRAKIGARLLAEKLSDMEIQLFCIPLPSAEGFRSAFLKSMGLKSE

SEQ ID NO: 56085 - protein, 869 aa, Sphingopyxis granuli
MSLAELQSWLRDEGIRDDLDAITWMTVRTELDNLLPEANDVVIDWPRLLLAGSILARSAERFDQETALRIATAALSLSKDQAIRDAGAVLLGKLSNFRAVTLARQRDMLAEDLEGRLGVALRLEAQRREMERSILVESSGAWLQVNEFQQRFWNNAKGQNWLSASAPTASGKTFLVLQWLIDQMAVGSADIAIYLAPTRALVSEIESNIAKILGKNDSIEVSSLPLREKFDSARGGDRRLILVFTQERLHLLANILGDDFKVDLVIVDEAHKIGDNQRGVILQDAIERATRANPKLKIVFISPATQNPEELLTDAPPEIETVAVDSDAPTVLQNVIVADQVPRKPKLWQLAARQGEALLPIGTLELPSKPDGLRKRLAFIAAAIGQRGGTLVYANGAGESEEVADLISQLLPAMVDIDPELAALADLARKGVHPNFRLAPLVERGVAFHFGNMPSLIRLEIERLFRAGKIRFLVCTSTLIEGVNLSCRTIVLRGPRKGMGHPMEPHDFWNLAGRAGRWGDEFQGNIICINPQDKAAWPTGVPQRARYPIKRETDAVLEFGDELVNYLDHRDTLDLASLGPSDQFEQVGAYLLTTYMRLGSISGASFAKRHDAASLARLDRVLGDLASKIDIDATLAARHPGVSAMGLQRLLEAFRSYSGDVENLLPADVASVDSFDRFVAIMGRIHTHLFPAFGPENVNRRYAVIVVNWLRGLSLATMIRRNIEWHQSVGRSYRLPALIRDTMDLVEQIARFKAPKFFSAYMDVLHMHLREIGRDDLIEHDLDIGTQLEFGVSSRTLLSLMELGLSRMSAVALYEKIARDDLSKNDCLAWVAERRDQLEAMDIPLIIVRELRERLLPLDDNGAAVGEQI

SEQ ID NO: 56086 - protein, 312 aa, Microbacterium hydrocarbonoxydans
MVDEATIVEEFVALARGKASALIDFLPAFEEAVTVPDTSTLVRTHFIAHDANGVPAVEKLAGAMAAATLDFCIPRSKIQRAVAELEETGSTAAIVSLQEQARDLFVKSESSGEGGELLLFLLMERVLQRPQLISKMALKTNTAMHVHGSDGIHASLADDGTLDVYWGESKLYKSSSDAFKECFDSIAPYLRPSGDSKRKQDLLLVRDHLNVTQIELAAHLLEYFDETNPKSLKARWNGVCLVGFDHDNYPNIAILDDAQRQAVSKAVGRWHKTVGSRLKEFDIVGVNIDLFCIPMPDVADLRARVLKRMGAK

SEQ ID NO: 56087 - protein, 854 aa, Microbacterium hydrocarbonoxydans
MTSINALEDIVFASHKFRDVLESARRLTVRSEFPTVEWYEELPPIDWGFALLYASAITSAQSERAQSAVLRIATACMLSSDAEAAHHAAAAALLERSGNHMAVELAESRERLPADAWQQLPGALRLEVVRSRIENSVRLSDGRVLPVNPFQGKFWDAVETNDWLSVSAPTSAGKSRIIREHFLEIARRAGSFTLVYLVPTRALIEEVSRDLRREVPPDVGVFTMPWDPDLADSSRTVLVVTQERLHLVLELLQSLTVDLLFVDEAQSLAGDARGVLLQHAIERTIRRSPDAQVLFASPLSSNPELLVEDAPPSRRSSSFVSETVTVNQNLIWVEHIDRKPQRRAVSLVADGNRHRLGDLVLAQRATSVPMRVALVAHALAGSSPGNVIYVNGPGEAEKVAKAVYEQLPALKEPDTELDNLRDLIKTAVHNKYLLADVLARRVAFHYGNMPLVIRTEIERLFGEGKIHYLVCTSTLLEGVNLPCRTIFMRNPQKGTGRPLKEGDFWNLAGRAGRWGKEFEGNVVCIDTDVDGLWPNLPRVRKRSQISRAVSTGLDDASGLLAFVRSADEVHDDSTAESLFAYLFSKHLGGESVERLLERIPLESERSEIASAITNTALDLTIPVEVVTRHTGIAPVSMERLLDSFRRSGKPPSDLELPLPEEPDSKARFQEALVRIGATMTSVFGAPRSGEDRRKWQLANLIVNWMKGMPLARLIDQRLAFNASLTSAVAIRDVMRDIESIARFHAPKYLACYADVLAVYSTELGLEATDRPDYAMMLELGVSRTSEVVLMSLGLSRTATVALAGFIGVDEWSRAEALEWLAAQNLDGLGVPVLLQREVADVLEIASRRAESSSA

SEQ ID NO: 56088 - protein, 281 aa, Alteromonas mediterranea MED64
MQAPAPFFEVRVSNLDWDPTLIGLCVGYELGLWREDALVDHLMEWLPEFCLTFEEISNLDASNMVSMMREAVRKLYISGKFERRGEFGEVLLHAAVRQAFSSIPAISKIYYKSALNETVKGFDAVHVVPNADELELWLGEVKFYKNLDSAIRDVVEELHAHLEKDYLRDEFLLIKGKIDDNWPYAEKLKKILHHNTSLDEVFSKAVIPVLLTYESQTVLSHTQCSEDYKKAFQEELIASYKKFTNKDLPKNIAIHLFLVPIKDKADLIKKLDQKLKIWQAI

SEQ ID NO: 56089 - protein, 368 aa, Alteromonas mediterranea MED64
MNVSETIASIKNLNDESTEKFNLLKKVSDAVNSDSNHPSSRELVLRLLDKRHYFNEYVDILDSLAREVGLMPYVDESRLGLKDSVAYEFFKPLNDDGEIVFHRAQAEVYHKLIAGQSVILSAPTSFGKSKLVDSIIELNRYKNIAIIVPTIALIDETRRRLSRFSGLYKLITQVSQEPSNRNIFILTAERLIAFDDLPNIDFFVIDEFYKIGALDRDEERTVALNQAFYKLHKMGGQFYLLGPNIQHIPDNLDRDLKCVFYNTQFSTVVSEVEFIQAEDNEYEALLNLVSRLEGQTLVYCRSPKRVNDVAEQLLALDLNLTDSGLEDASDWIGNHFHENWIFPKTLKEGIALHHGRLPRALSQLSIKL

SEQ ID NO: 56090 - protein, 317 aa, Enterococcus caccae ATCC BAA-1240
MSKKNKIQKVLSCKISEANFYSYHVDFDICEKDSVQQRIDDFVQIMCEEIPSFAFGFHRGENVPQDEILNTLVEAARSIYKITEYREVAEMYKKGESIDDKIDNKYLRRGEFGELFLHSILKYLFNTNPLIAKIHFKDSFGHAVHGFDSIHINTESMTLWLGESKIYTSGINGVDALAQDLFEHFNTDYFNSEFNIISKRITDSYEMLDSMGFDSEHWIELLNRYTSLSEQLNNIVIPMFCAYETSTLDSYELDFEKFSKDFEDEVYKLKKRFDEKSKEHPLINKLNIIVILMPLKSKKEIISKLHSKLTLIQALGG

SEQ ID NO: 56091 - protein, 716 aa, Enterococcus caccae ATCC BAA-1240
MNWDIVNIYEVNKLDFNESFSLAKYVSNLSLSNRNSYARKIIIHIYEIWDNVDDNTKEIWSDLAESQGFYPYIKDRMDNTSEIRRSFHQSEYIDNIVFHKEQKTLSYLIKKKQNLIVSAPTSFGKSLLIEEIVACSKHNNILIIQPTLALINETRLKLKKYKKYNMIVNTSQQVEEKNIFILTAERVIEFPNLPKIDYCVLDEFYKISSDRDDERSDVLNIAIKKILDRRDTAFYFIGPNIDKISNGFEKKYNAKFIKTDYSLVDAQVELVNINYKNDGKRKQEMEREEKLFELLYCKKNEQSIVYTSSPDRAFRLATKYYEFLKLNNYLEKEELLPINEWISENINSNWSYNRLLLQKIGVHSGTIPKHLTHSIIQYFNYKKLNVLFCTSTIIEGVNTSAKNVFIFDKKKGPNEIDYFDFSNIKGRAGRLLEHYTGKVYVFHKIPPKTEIELDMPFYDQEKISDEILINFDKEELFPENIKRYEELIEYDKEFLPIIKKNAVSVEGQKRIINDLYEKIRTQPELVLWTGKPSFKAIKYILGICWDNLLKETETTRPMTRNKLPVVVFKYLNSSSFNEILRQEYIYIKEQNPNWQTQKILDQTISNCYREQRHWISYKVPKWLDVVNSLQKEICKINNISNVGDYSYTSSQLENEGVDGNFSILLDMGVPASAIKKIVPMLSEELSLKEVVNISKKIANSSNSNLLQYEKEKLRNL

SEQ ID NO: 56092 - protein, 317 aa, Enterococcus caccae ATCC BAA-1240; identical to SEQ ID NO: 56090

SEQ ID NO: 56093 - protein, 716 aa, Enterococcus caccae ATCC BAA-1240; identical to SEQ ID NO: 56091

SEQ ID NO: 56094 - protein, 302 aa, Clostridium asparagiforme DSM 15981
MELSLRGTDFLGSFDLIWSKDLDEYKKNKLNLFVLKINSNEFDYDLLVDMLIDPVIDYSISRQVKEKYKDRAGTLSKKAREKFVEYTRNNGELGELLLFCFLESHLGAPKILTKLELKTSTSHYVNGADGVHFLKLENGNYQLIFGESKTYEDMSRAISDAFESIYNFKNGKNEKGNSKSGMHYEKSLISDNLFKESFSDEEREFLESLIYPTKERKFDVDDAFGIFIGFEVNIEKKDKAMPAPDFRNKIKALIIDEVTKRIKYIQKKIIDFDLQGHNFYIYVLPFTDIDSKRKIIMEAITK

SEQ ID NO: 56095 - protein, 848 aa, Clostridium asparagiforme DSM 15981
MTWLESLVSRALNDPYLSDLTRKLELKYAYIFLYQRDDIDLTDKEFNDVLRFADILSRSNEAVGRNKAYKIISLLYDSYKDDPQYQYLANSILTKLGNFASLNIAVKNNMDVDTVESMLEKEIKKIYQKVPYSDYVFTDPQYRLFEAMKDSNHFSFSGPTSFGKSFIMDAFIQYIINEKHGGENIVILVPTRALINQVTARLKKSINRERYRVLAHPIVPAIYKDRGLKYVFVFTPERLISYLGEKENPVINYMFVDEAQKIIAEKDSRAPLYYHAILLAERKSIKLYFASPNIPNADIFLQLFEKSLDEKMVIKESPVAQNRFYIDFVKHEGRMFTETGDDIIFKDLGKKEERYATKMLVKLGHNCKNIIYCNTVADTIDFARGFSSQLPDKQDERINSLIELIKTYIHRDYFLIDCLQKGVAFHFGRLPQRIRERIEKLFEEKVIDYIFCTSTLLEGVNLPAKNIFIFSNAIGNTKFSDIDFWNLAGRAGRLSKELSGNIICVRLEDKRNRWDNPTKDLRVVRTREIDAVHPLVIKGQKNFYKNLEKSLEFKDFTKTNYSNSEKEVWDHYANIVFTHQATKTDSILMSNFLKKNENGKRILDKIERDNHIPTYIMEQCSNIKIAYQNDIWNSVKEGEKAFPNEVNVDTCYEVLEKMYNFYNWGDEESKGRKPMVRQKSRLHYFAVLMYTWMKSTPLNMMITNVINYYKRKGEIWDQNGYIPFDSHNKVHINMVINDLISDIDNILRFKIKNYILNFYLIVAEKNGKKAAGPNWAEYLEYGTMDKDTIELQNIGLPRHLAVLIKNEYMEYLMFEDEALVEINMEELLSHIDDEKYKEELTELKEILE

SEQ ID NO: 56096 - protein, 491 aa, Peptostreptococcus stomatis DSM 17678
MKRICLGTIITLIHQSRTRSADTIKSVCGGIFATFGLDINNYNKELPSHLKSGHDPVPGDLFAKARTIDINEVASGVERYILPLIHPDKHKCLFCAIKDVIRDDTYITDSTIIGTMPGYEKENILKYDSFYESITLANILIFAITQVENDKLKTNIREIGKDYVDSFLTLKESLFFLSPTVENDQVFPLKRTLKDPMFDRVFLKATDITVSALANPTQASVFYIDPTNCKFRFSGLKDFIINNVGSYVFSRAQIKRIIDRTKNPAAVGANAMLKFMTAYGTKAETVLGEILLYTFMEQELDAPKIMSKIEIDESNRNIVSKSDGVHLLSINKSGQPFHQLVFGASDIIGDLGMSIDRAFEKILSIEANQDIELRMVDNTTQWTIYDPEATKYMVELMTPQRNGSYKPDMAFGAFLGYTINLDQPETDSQKYRTAVKEQLKKDIDRVQPYIIKKIQDNGLSGYSFYFYILPFNDAPHEKTSIIKELLTGGGI

SEQ ID NO: 56097 - protein, 872 aa, Peptostreptococcus stomatis DSM 17678
MNLVPRNTTLAEALYRDIEKNEYLQEIYGDLLYNYSINLFHSDRRQRDIPIADALRFADLLAKSTYPMTADRDHLWGQEIAILLRLLYPEDEAVKYYLGSVLSSVGNYRGLMSKTMEGFHSEDFFDSVYYEYDKEEHRIPGKEKEYFFNDQMMVYKGLKEKFFSYSGPTSMGKSFVVQTYIQQQIENGSTENFAILVPTKALINEVKSNMIGVLQGKLKDLNYRVVTASGDLVLQQDHHFIFIMTPERLLHMLIERENICIDFLFIDEAHKISSRGGRSSYYYKVLTQIGKMQQLPTVIFASPNIPNPEIYMKAIPGIEKTQMKKLKSKFAPVCQFKYFLNVPERGGYYYNDYSKKLERCYTLPEGQELCDIVAMVGYDKQNVVYCSSRKSVLEQAVKYAQNITPKDDSELISLAAEIRKEVHDDCYLADLILRGVAYHVGYLPANIRLRIEKSFEKGVLRTIFCTSTLVEGVNLPADNLFITSYRNGLSNMDEVDFRNLIGRVGRIKYNLYGNVVLLRLDDKLKTERYKELLTNDVPLQELSIEIKNNTDCMSALIKDLTDGDIEMSTCHEKATETDFEALRKFGLILIRDLANGDRTPVSQKFEEYLTDKQKRRIIENFPIESTSDDITISHDQADKLHDAIIQGLHYPEINGENDEVDFEELVDFMMKLRRIFKWDIYEKETLGRPGTNKFDSVMRWYSTILLRWIRGNGLQVLVSSAISFKEKNPNTGVWSGKYRVDEIYNPNSKYHKNLVIAESLSVIESVLLFSIANYFRKFSLEYKSVHQVDNFDNDWYEFVEYGTINPDTIFLQQNGFSREASLFIQKPSNYSKYMVVVESVKKIKLSILECGNIGVETEAADIQYNVPELFIE

SEQ ID NO: 56098 - protein, 501 aa, Psychromonas ingrahamii 37
MTYQNNIVSIKVGAPESTGFAFKSACGKSKYVITSKHSICIDKPSCKLISSGVNACRSCPANIDNSQITIKFQDREPVKAIASFKSDKSDVALLELESEQPGLELLKCSFDDANDYLMWKHDKACILLDNKRVKEQSYVLYNLKSSTFSDFLPKSQVIPGYSGTPIFSIDTNNTPTIHAILTDNEENNDIGAELITRELLHELSLKSSITINYNFSLLSKNISTSFIDTCFDFYYEHNLENNNKIKVYSLPFSDSNKFDLSKIVDYLTENMSRSVFPPREVELSQGDQMKVFEAFNKFLSEPQDIYSKPALLQNLVESDLLAPTLYKSTKQNEFSSIHIREFLPEKFEFVMTKFFSDSDLVEAVDKCANSLIDANNNASGSSLLLEQSFVQQSVSIKYADLISKLILPENEMHVEYNFGLLSTYRLDIDSDVYSVRNLNDKKQAIKDNIMVHLKDKHAMISSIFDEHLFMGKTCYLYLIPINEVGELNKLMHAKINSNING

SEQ ID NO: 56099 - protein, 828 aa, Psychromonas ingrahamii 37
MSANITLIDKLTTDSIKSVHFNALYQTLSIAYADSKLKIPSFITSKKTDDLCRYADIFSLSEESEYRVLAYRIIVKLLGVSEKKPALGSMARSIFTKLGLFFSESRFDKDEHPLPYEREVSNILKRDRQKLPFGNEVFTDSQYEVFTSLTELDNFSFSGPTSFGKSFIIRSYIFDCISNKKNVVILVPTKVLIEEYIREIRKTIKVEGWGNVNLSKNAQSYIEDKINILILTPERFNNLIYTDLELSIDVLVVDEAHKLGDDDERSMTSFKVIQETRKRLPTCKVIFSSPVISNPSVFLESFGLDGRNSIEAIEGPVTQNLFFIDLLNNSSQFYNEVSKEFYTHTKELKIEDMFSFIRSVTSKSSLIYCTSKSGSVSDAVLFAEDLPLLTNPKLVAASKNIKELIHEEYFLSDLLLKGVAFHNADLPKNVRSIIESLYQSREIAYLFCTSTLLEGVNLPTGNLFLRSFKTRGKITNKTKLDFWNLAGRAGRYTKELDGNIFCMRDTSSSWGNISTLVEKKNEVKADTSALKRLMRGRKIINVLKDGPLNEEKQERIMDQISNMILSDYMENKQKNHPSSLMNLVPKKFHSGLFKVLEDKLRDSGINEVPRQLFAIGHNISIERHINVLSDIKEQPVILSSLNGSDTYPLFERVCKVYKLKFSTAQINRLYRIAQQWIHGFSLKDIINNSLDNCSTVVIYRGGPIENFDRTNKAHVNAIINGVISSIEHDIGYELELYINHYYQHLVNSLGSEGAGINLSTYLELGTNDKFEISLQNYGFSRSVASELIKFYKEFIKFDDENVVVSIDTVNLLARLGKNSIAFTEVGNV

SEQ ID NO: 56100 - protein, 300 aa, Erwinia typographi
MLLPIRVDKRFLNLFKTVQIDTCPQQSTLNLHILNIESNQFIYSKLVEELRELIISYVHSNRRIEEFKQNYPAYSPKPFFEAIQKFRSYTSNEGELGELLLYAFLEAGLNAPKLLSKMELKTDSNDYIKGSDGVHLLETGDSFQLIFGESKLYADLLDGAREAFDSIVDFKANGMGFERGLIDTHVINEMVSEAGYEKIKEVLLPSGNNGPDLDLSFGIFLGFELPVDNSILALKTKEFREWVNESVKEHASRVVKTIQKKIINHGLFGHEFHIYIVPFTNIDITRKQLIKDMLTIEGDS

SEQ ID NO: 56101 - protein, 856 aa, Erwinia typographi
MSELSSNNIHLAARLAEDAFASPYFKEIYKYISELYDKFLFDRGAIKILELSETNKISHALRFADILSHSDVEVYRTRAFEIISKIAAFKNDDPYFKFIGSAVINRIGVYAAGKLISDGVSLPLDREIDSIIKKSVQKTDDDGIYFTDRQYELYQLLKNSSTISFAGPTSMGKSFVINAYIKEITSKYNDKNIVLIVPTRALISQNALKLKNEMANSACSNSYTIVTTSYMIDSEVDSGYIFILTPERLVSLISTIPELKIDYLFVDEAQKLTTKNDSRSLVTYSAIEQTLNNNPGAKLFFSSPNLSNPDVFNSLFNRSKSKVYRSTEGATALNMYFIDLLNDSFSVVNTHDRNLEKIERDFNKYKSANDLIYKLNHKKSKIIYCGGVESTLVRTRDFIKYLKINNRAIKPKNIEISAQIREFVHDNYELAEAINYGVAFHFGNLPQSIRDLIEHNFKIGNIEYLFCTSTLLEGVNLPARSVFILTHKKGLSPLEPVDFWNLAGRAGRLAMELSGDIFCIRDEVKIWDNKAINNILLSDRNDISLTPSFYIEDKKRLNELHEIIATGETGKIKNSEFLRTLGDMIRIDTMRDEKHLPLINYFQHSGKPEIVLSAKNSTKDINLPLNILLANSHIPVDSQYNAFNKIKSLSVNEIKLSWQLSYDEIKSKLSLIFELYQIDKFATGQNRLYSNSIPYYALILSQWMYGNSLQEIISGAIIYKKNKTIYIKNAPIPFDSNNSSHITALVNDTIKDIELRVGYLLQNYISHYCQLLTYIHHGNPGANWSQFIEFGSNDPIVWHLQMMGFSRDCAVYLKRNFSKHLKMNVESNKLVIKNKSTIKESVKKNKLYSLEIHSLL

SEQ ID NO: 56102 - protein, 239 aa, Pseudomonas protegens Cab57
MKVWNLSSLTETVYDWIIDYCLSHKEKANFSGPERGLFKHARANYPANDMNALGDLFLHIAIRDSYKTIPIMNKVFDINNKTFSCTHVVLNLDDIELWIGASSVSTNIEDAVSSAIRNIEHIINLTTLKQRLFMLTSEIDESWPHTDKLRRLANSSLTIDERFDKIIIPVFLMHDSSIITNYDKNSFIELFNERVRECRNILVSGIRPDLIDLINLRIFYFPVSDISIVNEALVKELNS

SEQ ID NO: 56103 - protein, 720 aa, Pseudomonas protegens Cab57
MISWYEESKANISNPEFDQWDDFLLSLVNEYNRHEQQHLIQDIVIRSLERKGEIENSFILDHLLGELGLYPYVENTDNTSKDLFRRSIFTTPQDENKIFHIRQAEVFHRIINGENIILSAPTSFGKSLIIEALIATREFANIAIVVPTIALMDELKKKLYKYSDTYKIITQITQKSDQNNIYILTQERVLEHIDLGIIDFFIIDEFYKLAPTIKNDERCDRLNLAFKKLYAKCKRFYMLGPRINGLAAGIEDELRCTFLKFDSYATVATNEFFYPIVSKGRDADKDLERDAILLNILKSFGNDEQTVIYCKSPKRASSLMVKLLNSGLLNQKIRNEDFSIWLGENFHFDWSLVEGLKHGIAYHHSQLPRAVASLIVDYFNTSDINIIICTSTLIEGVNTNAKNIIIYDDCITRRTKLDMFTFNNIAGRSGRMFEHFVGNVYILGEKPQNELPFIDMPIVTQSENASDSLLLHMGTEVSGPNREKIKGYYEQEVIPISLILKHQGVHPSKLIEFASALIEKCNTWNVLMRWDSIYPTSSQLMHLSKILFKYFNVSSMGGGAVRSDTQLHKKIIDIINKVDDRVLIIQDQKFWASRSSNYNIDDAIQAVFNFKKNLVNYNLPKIIYAISDIQELIFKRFSYPFGDYKPFASTLENFYFPPAVNSLEEFGIPIQITKKILANHNFDDMNIDQYIIKLKAISMKNLTYLTEFETRILKHALSYT

SEQ ID NO: 56104 - protein, 281 aa, Cycloclasticus sp. P1
MHKPTDFFEVRVHDLSLDPGLTGLCVGYELGEWRYDGLVDHLMEWMPEFCLTYEEITTLDSGNMISLMREAFRKLYTSGKFKNRGEFGELMLHAAIRQVFGSLPAISKIYYKSAANNTVKGFDAVHVVPNGQNLELWLGEVKFYKDLNGAIRDVVEELDDHTNKDYLRDEFLLIKGKIDSSWPHAQELERLLDPNVSLDTVFQQVVIPVLLTYESNAVDSFSNCSDEYKAVFEEEIVKNHGKFAGKALPKNVVIQLFLVPLKNKEELVTKLDEKLKTWQAL

SEQ ID NO: 56105 - protein, 701 aa, Cycloclasticus sp. P1
MEDLIAEISSLGSDSTNQFEILRIVSTVINEDENQSFSRELVLRVLDQRKHFEEFNEIVDALVREVGLLPYIDEDTLGLRDSLAYEFFKPINDDGSIVFHRAQADVYHKLLSGESVILSAPTSFGKSKIVDSIIELNRYKNIAVVVPTIALIDETRRRLSRFSGLYKIVTQITQEPADRNIFILTAERLNAYEKLPKIDFFAVDEFYKIGALDRDEERTISLNQAFYKLFKMSGQFYLLGPNIQQIPDNLDRDLKCYFYNTSFSTVVSEVHYIQPGEDELDSLMHLLAELDGQTLVYCKSPNRVNTVAHKLLERLDVIEDVGVNEAAEWIEGEFHEEWVFPRSLRHGIALHHGRLPRSLAQVSVKLFNDCKVKFLLCTSTLIEGVNTSAKNIVIFDHKIGNSKYDFFTFNNIKGRGGRMFQHFIGHVYIFNAPPQEELPFVDFPFYSQGENVPDSLLIQLDKADLKETSKQRLSEYFDQNTLPIELIRFNSAVNPLDQINLAKKIDELGSEDISKLIWDACPNYKQLEFCCDLIWEHLVSRGKAGVVSPKQLTLKVFSLYKDRNLKNRIAAELEPGRFQAKDADEAVEKILDFDRNWAGYTFPRLLMILDSIQRYILGPKFGAVGDYSFFAANVESFFGKSSLIALEEFGLPIQIGEKVDAQITISENIDLAISQLRGYEYDQGIYTHFEKHIIDDVKEHI

SEQ ID NO: 56106 - protein, 314 aa, Pedobacter sp. BAL39
MAESTKSNPDVLSGELDVSPDHYASIVDHIQENCNINDRLQASFHFIKYHDCVNRDNDFLKTLSGYLVQYCFSKQRYKSANVFEVQQLFIEARDKFFNPKDSANGRSGASRSGELGEIALYFLLESYLKSPQIVSKMALKTTGGENYKGSDGIHVGIVNDKKCFFYCESKLNKVKDNAFSSCITSVIDFHLHKKDFEISVVNNHIEIEDVNLRQAVLDFLNPSKPKGDDWLEVNACFIGFDWANFIDIEKCQPNEALMKKLTDDLKLEIETIKKHITDTIIFPTIKHRFFFFVMPFKDVENMRKNFMKLLYGGK

SEQ ID NO: 56107 - protein, 863 aa, Pedobacter sp. BAL39
MEGNNKISIYDELAVSIVVSERFKIYLSLIRNELLNTFEPARQQNDITREDLKFLLESASILACATSDAHKQLAYAIAVNVYNQFKSEYEDIDRIASFLLLRLGNFPGFQLLKNRAVERALEKEMADININQQYEVISKSIDNKVSVNGTDLYLTDFQRDAYHSLSIGQDYSFSAPTSAGKSFLMILFIIEQLQQSTELNIVYVVPTKALINQVKNDIRSAFNRYDIQGVGVHSSTTSFELTELQSTPTDKIKHIYILTQERLSHLLSRRDIPFVINILIVDEAQKVGDGYRGVLLERVITQTARTYPKARIVFSSPLASNPEFFKKFKPELQESRTNNSPVHQNVLFLNSKKKDTFLSVLHDKVEALIEDNDLQKGCPIAKRAKMAYWAFHLGKGQSNILYGNGASETEELAKHLSDLLPDVQDERIEEFVNFIRDNIHGEYTLISCLRKGVAFHYSTMPRELKEKIELLFSDETVPVNYLCCTSTLLEGMNLPAKNVFIIDPTKGQGNHMGKFDFWNLAGRAGRLLKDFYGNIYCIDPDSWNDESYIPERSIENYTIESSTDNVLVDRAVDLTSYLQDVDQTFPGKDKELLEQTSSTFLINSLNDPADTIGKYLNDHKITMESQQVTTIETAITGIINENVLPDYVIRKNPGIDMRLQNRLFAYFSTVPTSVSVPVYPAAFEFYNSIVSVYDAINTIFLASADTRMIRRYAFVSSVWIKENPLGYLIQEQVKYEQKENKFSSVNKCVRTVVDLIDGILTYKYAKYTKCYNDILEHYIQTIKADVKLINLSAYLELGACNPTTISLISLGLSRTTAIRLRILIGRNDLDRTACVNWLSQNYTRYKNRLPVVCQDDYDNNFNE

SEQ ID NO: 56108 - protein, 239 aa, Stenotrophomonas sp. SKA14
MESLPDFCLTYSEYSQIGHESAVRMIRKAAKSVYSTGKFKNRGEFGELLLHVILKTTMGTLPAVSKIYYKDSANDTVKGFDAVHVVPSETGLELWLGEVKFYEEIGSAIRDVTKELEQHLMADYLRSEFVAILNKVDRDWPHGRQLLALLDEGTSLDQVFEAFCIPVLLTYDGKTTADHDASSEAYRQALASEMRAIKEKFDRRVASVPHRIHLFLMPLKTKKILVEALHLKLEAMKAL

SEQ ID NO: 56109 - protein, 706 aa, Stenotrophomonas sp. SKA14
MTSDVFHFSDAASIQADPFRATQHLASLVSRAELGEFEDTSVQRAVLYALENKASFGPCSVIVESLARARGLFPYIASDEMSVRDELALEAHRPIGMEDVVLHRKQAEVYQRLIDGQSIVLSAPTSFGKSLLIDALVASGRYRNIAVVVPTIALIDETRRRLAERFGREFKLITHPTQEVSTKNIFVMTQERVLDVDELPLIDLFVIDEFYKLDPRQDSDRALLLNQALHRLLKTGAQFYMLGPSIKEVSAQLSNVTGSSFVDTDYATVVTEQINVSPKDGDNIKALVELCRELHDSTLIYCASPASARRVATALAAAGLGARDPRLQGAYDWLAKHYHPDWAVARGFLTGVGVHHGKVPRAVAQYAVRQFNRGTLPFLVCTSTLIEGVNTKAKNVVIFDNRVAQKKFDFFTFNNIRGRSGRMLRHFVGRVYLFNVPPQEDLPLVDIPLVNQDDQTPDSLLIQLDQAFLSPESQARVKALQAASVLPLEVLRSNSGIDPGAQNALAKHLQSAGSYGFKMLRWQAFPDYEQLKYACELMWKFFVGKKRLGGGVVSGSQLAWKVKNLATARNVKSLILRELAEQESPDADRAVEDVLDFVRTWAGFHFPRLLMALDRIQRTVYLNWPGSTGDYSLYAAKVENMFSTSGLVALDEYGIPLQIAEKLRPHFGEHDTVDQAIGQLRQLDVASVALLSDFERELVRDAQAGL

SEQ ID NO: 56110 - protein, 300 aa, Lysobacter defluvii IMMIB APB-9 = DSM 18482
MVDRCFLDFNTKSGLTPIDRKFLLSFLNDFEDGKWRDSAFDDFLWDNVAQTALTQAERENAMLGDRSRLREAAKNLRLIDKEPESSKGSEIAEIILYGLMRLHFGALPVVPKIFYKQNVNDFAKGADSVHISIDGDAFLLYFGEAKFYSSIENARLDSVVDSVRKSLETDKLKKENAIVTSLRELDTLDLPGGMAERIRAALSNRASIDDIKPLIHVPILLLHECSVTAAATLKDQAYLDAITDVHQERAQSYFERQVAALAPSVARYGEITFHLILLPVPCKKKVVDRFLTEAALLKGA

SEQ ID NO: 56111 - protein, 700 aa, Lysobacter defluvii IMMIB APB-9 = DSM 18482
MDDLLFARCALINRHLELGDEQEARDGVIQLLDYCQSQDIAPPPVLNALTRMVGLYPYLRTGLSWDERYLLSAFSADAGSGEVVLHREQATVLRMLLDGANLALSAPTSFGKSFIVDAFISIKRPRNVLIIVPTLALADETRRRLHVKFGRRLKVITATEEEPCEAGNIFIFPQERAISYSAKMPDLDLLIVDEFYKASREFDRDRSAPLIRAILKFGAKSKQRYYLAPNIASLRESPFTEGMVFHRVDFNTVFLRKHEVYHAIQGAQAKTSALMEILQNAGGKTLVYAGTYAAIKEVATALLDQFEGQGSELLEEFHQWLVESYGPNWLLPRLMRRGVGVHNGQLHRSIGQIQIKLYEDPDGIQVLLSTSSIIEGVNTSAQNVVLWKNRNGASRLTDFEYRNIIGRSGRMFRHFVGHVFILEAPPAEQVNQLVLELPEELLGLPDVEEDYSLNVAQKGRADDFRREVSQLLGGRDADEVLRDHNVQTSDASVIKRILTDLRQNPRSWSGLSYLNSEDPKEWRFTLFRVLYLDPGAWDTTYTKFVAFTQVIAKNWVSTIPELLEELAGLDIDLDLFFKLERNVSYKLAALVGDVNTLQQAVNPGRHVDVSAFVVRAAHAFLPPTVFELEEYGLPRMISRKLQDAGVVDFEAADCRLSSAIQEIVDQRSLVREILEGFECYIFDYFLSGVMPESDANDAEH

SEQ ID NO: 56112 - protein, 539 aa, Pseudomonas tuomuerensis
MVTTPRPSNKGGPAARQGFKYQDHVAVSFILKMLADSSYVQIECETADDIVAVKQSAGSTMNEYIQVKTTEKDGKWNLKECTQLENRKPDSSLIQKSLKCDVRPGPACFRIVSKRDVAKVLEDFTEELHKRVTPDGATAQGIKLAKRFPKSISAMGRNLSYWADHFVWQVCGKVNALESINLRLLSELIEFYGENPSHRQLKEIYADFLGWADDAATADVKIAPQDKIIPRADALARLKALLDSASKQANTFAKPYKSKPDPFLVEFHTATETGLLRSISGFDVEYDFEEWRSDQFAEHLVQWLPEFCLRASEIANFQIHQLSSALAKSISMLDQTPGSRDRLIAELILHAILRHRENSEPIACKAFYTVNGKLSEFGNAHVVQSEGEADQLWLGISRMIYTGTMDQTLKDICNVLDATISRAALTEEREIIVTLREPQHHRPNAEAFNKALHKNAPTQDMLKVLCFPVLLAYDSEVLAGGFLADYAANLKTEVTQHYKTLLSTLPSKIQQVRVVVFLVPMESIRQLVQKFNSLCRAAS

SEQ ID NO: 56113 - protein, 714 aa, Pseudomonas tuomuerensis
MKYEIIKQQLESLGGKDSDKTGLLAGVTQIVNRGKPEWEGRDLVIRLLDKFAFLDEIEQSLLLSLVRTVGLFPYITEHVEQVSDADRLAYEIHRVEGVEKGLVFHRLQANVFHLLMQGRNVVLSASTSVGKSLVIDAVLAQGKFRKVVVIVPTIALIDETRRRLVKRFRSVCNVITHPSQEAKTGLINVYLLTQERVLQRDDLDDVDFFVIDEFYKLDLASDSEEKNRSVDLSLAFHKLANLGAQFYLLGPHIHNIQGLDGYEYNFIPSNFSTVAVDVTYFNLRTRGDERKEKLLELCEQLTSPTLIYCQSPASANRVAQLLIDRGNFPLLPETKDVSDWISSNYHPDWNVAKAISLGIGIHHGGVPRAIQQYFVKLFNERTIRYIICTSTMIEGVNTSAENVIIYDRRINKNTFDFFTFKNISGRAGRMNQYFIGKVFMLEEPPEEENLTVEYPIGLQDSTSPIGLLMKLEPEYLTDQSRQRLEVVYSTPQLSSSTLIENRHIPVDRQIEVADRIRRELAISHIWLTWKGNPEQKQLEYLCTLIYDHLPHKLQEFNIHSGLQLAWHINALRAQKDFQVYLQQAIDEDPTDRTPSESIGQRLKFIRNVISYRLPRDIMALSKIQADVFTRIGIEPGDFGFLAEQLENLFNDPLLTALDEYGIPTQISTKFKSAILPAEGMTQLMVKLKQWAPRLEYSHLSRFEKSIVKWAIEDM

SEQ ID NO: 56114 - protein, 501 aa, Syntrophomonas zehnderi OL-4
MSLFISYNREQKDFADKIESSVRTVCPILRDTNDIAPWGSIEEFMNRIRQAEYAVLLISDEYLKSINCMYEACQLYKDVNWKARTMYVVLGNADLNVYTVANHERYIRYWNDKKATLEEQIKSLPAESIDSITAEIKRVSEILLMIGDFLKVIRDTNNMQPENTIDAIISFITTKSVSKESHLREQTHDASSSVLKKTLKDAGFDGVFTEVSHDEKLGLINPYQLRLFQLSVVDNAFSFDALKKFLLKNIGQYIYSRERIKKFMNDDEITLIGLKAVELLHDRCNGDLTWLGDELGDLMLYVFLEQILDAPKVFSKFDTPSDELLTTGTSCVHLLQTSAGMPSFQMVFGKSRIAGDPRDAIDDAFITLEAIKNDTSREIRLVESTAFDKEFTPEVAKQLKNIIIPSKGQTIAHDTAFGVFLGYSLGIEKNRPSAEFRELVAKKMRKDIQAHVSYIIDKIKTAGMEHYSFYFYFLPFNEADEDKQEIMKSLLGFKGGVQSGG

SEQ ID NO: 56115 - protein, 870 aa, Syntrophomonas zehnderi OL-4
MADRNIVSLGDVIFDDIDKNPYLNELYENILYNYSLRLFQIKSENKPVNISDALRFADILSKSPADSHMTWAQEMVALLKEIEPNNPEIDIYLNSVLSNTGNYQGLETAENKKVAPISVRRNLLERFHEEYSKELVSIPAEPDKLFFRPQRQIYDRLTEPYFSYSGPTSMGKSFIMRMFIKKQVQDGMKFNYALIVPTKALINEVSSKIISDLGALLKEMNYRVVTSAGALALEEEHNFIYVLTPERLLYLLIRHKDKDIDYLFIDEAHKITSKDKRSTFYYKNIDMLAQRERKPHIIFASPNIPNPEVYLKLVPEAFEATDLDCNKLATSFSPVSQVKYLIDCVDGGIHLFNDRSSQLMEISKAAIKVPFSNIVSHLGKGVQTIIYFNSKDKAIQAAIDYAKYEQDKNDSELDAVAREIANQVHKDYFLAKLIKKGIAYHIGYLPASIRMKIEKLFRDRKIVAMFCTSTLVEGVNLPADNLFITTYRKGRGQTKMTAVDFRNLVGRVGRINYNLYGNVFLVRLEENLQVKDFVELLEKKVPEQKLSLVTELKPKQKKQIVTCLLQGHTNLVKDQGQSQDSFDLTRKFCLILLRDIMKGRNSIVRREFSEFLTPEDESKIKAIFERDEIKPDDDINTSVDQTKSLSANIAWGLEYPTIDGDGRTEHGEPQAFLEKLYDIFGWGKCESSETIGNKKRLSWYAVILRHWVSGNGLGMIIDKSLTYAQNSPNYKVRIGGQLIPYNHQSMMHRNIVMSETLQAIESVVLFSFANYFLRFSEAYKRIHGIEDDMSNDWYEFVEYGTTNKLTIFLQRNGFSRETALFIRKNRSKYVIGLDDSRPVKIKKDILNCGNFSVISEVENMSINNPDLFVD

SEQ ID NO: 56116 - protein, 501 aa, Syntrophomonas zehnderi OL-4; identical to SEQ ID NO: 56114

SEQ ID NO: 56117 - protein, 870 aa, Syntrophomonas zehnderi OL-4; identical to SEQ ID NO: 56115

SEQ ID NO: 56118 - protein, 306 aa, Chryseobacterium oranimense G311
MKFEILLNEIFDDVKLDDTLKITNNKSVLGIINDFENGEWRYDKFQKFIWNNIKETALSHSERKALLDDGEGSILTESAKKLRLIESVDAIGRGSEIAEIVLYGIMKNHYSALPIVPKIFYKQNLKDEAKGSDSVHIVVESEDSFSLWFGESKFYNSIENARLDTIVASVKDSISLDKIKKENSIITNLSDINDFDEISEDLRIKIKASLSQEESIDNIKPILNIPILLLYECEQTKLGTSLTAEYKQGIIDYHKDRATQYFKKQIQKCADVHLYEKINFHIILFPIADKEKVVDKFIQIAKAYRD

SEQ ID NO: 56119 - protein, 700 aa, Chryseobacterium oranimense G311
MQEQVFDRCHIINGLLIDNQENEARQELIKLLDFHNTNQLAYNPLVNHLIRETGLFPYLELETSNWEERFIYNAFKVDVGEENPLTLHREQSFLLKKLLEGKNIAVSAPTSFGKSFVIDAYIKIKKPNNVLIIVPTLALTDETRRRLYKKFAHEYKIITTSDVELSDKNIFIFPQERAMNYINIVESFDIMIVDEFYKASSKFDKERSPSLIRAMIKLGAKSNQKYYLAPNITSLENNPFTDDMEFIRLDFNTVFLEKHELYNQIKNNDEKSEVLLEILSKNKGKSLIYAGTYSNIDSLTILFLATYEPVKNELLEMFANWLSKNYDFNWSLTKLVSREIGVHNGRLHRSLSQIQVKLFEEGEGIRNLISTSSIIEGVNTSAENVIIWRNRKGSAKLDDFTYKNIIGRGGRMFKHFIGKIYILEQPPEEGLTQLSIPFPDEILGDLEESKYDGLLTKEQVAKLKFYNDEMAELVGAKVYEELKSESIFQSSNSDLIKAIAIDLTKNPDEWNGLYYLNEFKPENWDRLLYKVIKLQPGNWDCSYKTFVEFIKIMAYNWTKSIPELLKELEDYDVGIDTFFLLERNVTYKFSALLNDLNTLQKRILKNKQYDISKFIKWCSNAFLPKVVFQLEEYGLPRMISKKIHESKVIDFYDSDLTIHKVVEKFNEIGKEMTIEKTNNLDEFDKYILNYFFDGIKIMNA

SEQ ID NO: 56120 - protein, 306 aa, Epilithonimonas lactis; identical to SEQ ID NO: 56118

SEQ ID NO: 56121 - protein, 700 aa, Epilithonimonas lactis; identical to SEQ ID NO: 56119

SEQ ID NO: 56122 - protein, 301 aa, Bacillus butanolivorans
MELSLASSDFLKVFKHLDTHEFSKTGNKIDLFLFPINSNKFDYNRIINELMEPVADFAISRKVKNSYANKPMTLSKVAREKFLEYKKNTGELGEFLLYCFLEGHLNAPKIFSKLEMKTSTSMYVNGSDGVHFLKLADGNFQLVFGESKTIKELGGAMYDAFKSIYQFKNEINDKGDTKSGINFEKRLISDNLDHETWTEKEKEFLTKLIYPTSDEDFEVDDAFGIFIGFQITPTDEQKRSSNSDYRKAIEANVKLQLTKELKHIEKLIERYDLFGHSFYIYALPFIELDKAREDIMKGITT

SEQ ID NO: 56123 - protein, 854 aa, Bacillus butanolivorans
MSLLKELAKKALNDSYLETLVHKLEKTYGYHFVGNSINNPLTEKEYTDLLRFGDILCRSDLTEARNLAYKIISLLYNFYSEDKFFKMQAATVLVKLGNFPSLQLAINSEEIDLDEVMVESIIKKTYQIAPDSKNIFTDAQYQVFEELKDSNHFSFSGPTSFGKSFIIESFIKFLIKERNASDNIVILVPTRALINQVTTKLKKEISEPKYKILSHPTVPLLYKSKGNKYIFVFTPERLISYLSNDNPAINYVFVDEAQKLITQDDSRAPLFYHALMLAKRKSVNLYFSSPNIINSEIFLQLFGNSTEETLSVTENSVAQNRFFIDCIEKRVIMFAENGEEIDLPYDSYSTNEHNNLKNAITLIGNNVQNIIYCNTVDDTINYALQYAKNLNDKKNTNLSSLIELVQTTMHEEYYLVDCLKKGIAFHFGGLPQRIREKIELLFRDKIIDNIFCTSTLLEGVNLPAKNIFILSNAIGLRKFSDVDFWNLAGRAGRLTKDLSGNIVCLRIVDKRNRWDSPKKDLKVIKEKKIGKVESILMTNRGRFYTNIGNSIVGKPFTRKNVSENEKKMLDSYGNILAYHDLSKTDSILRSMFIDNNNDGASILNKIDSRNQVPNDILAQSMTIKLQYQNDIVAFGKLLPQIPLEVNYQNCLEILNILYNFYNWKGEESGGTKPLAKNKNILTYYAVLMNSWINSKPLNIIIKDVIKDFVSNNKEIFLNNNQSELFDSKNRIHINKIVNNVVSDIENVLRFKIKYYLSNYILLINNINKGEGLPMSKDWSEYLEYGTTDKIIIELQNLGFPRHLATILKKNYIDSFIIQDYNIIDFSENELKNAIDKEKYYEEYIELSEILDWEK

SEQ ID NO: 56124 - protein, 325 aa, Geobacter sp. M21
MKSLWGECAFIVVNFCGIQWRCVIYDNSLYEILSMNTELLLSKTTDIVDKIHYVRHDFSLLPNKDHLGICIKHVDINELRHQFVSSLCASIIKFIYCDDGYEKLKKEFGSCDEQTISGKIYQKAKQKFRPYSKRGQFSELLVFTLLQHFFKAVPFLRKGSITTNPEMERNGADALHIKYNPITKKYELYIAECKTKNAFSGAFHECLDDAIVHYKRMFTELELYIYEDFISPELEPVVADFLNGKLENLETNLVCLMTYENEHPLTGGVGTLNDEMMESLLTSAKKISHTAVTKKVDPYILNRIHYIMFPVNDLEALIETFEDMI

SEQ ID NO: 56125 - protein, 430 aa, Geobacter sp. M21
MKSISDVVETAVERSLKGFAFQIAAIEDSPVGLDKSEALRIIRWIEVRFSQKPGEDVKNEILFLAQHLLEGYKQNPELNGIPNYVGTVFRRLGNVPALTMIPSCYNSESQQFESSGSIFSDISTIKTLLSNTIRVANAEYTLTADQFNIWNTLNNSTRCCGISAPTSAGKSFVISLYVASVCSRKKINVVYLVPTNTLIDQVSKDLKALIRLHNIVGYNVKTHISEDISLESQSVIFVMTQERFAVGQSYLKKNRISIEIVIVDEVQNIEKVEEESDDRSHVLYEVIRNLYDDFAPSKFVLSGPRIGNIKEINEFLFFEQAASFTTSSSPVVSLSYSFKLDGLKLFLRAHTSFLAKHIQIEINNKYVPYNVFGSTTYDTDAYSVIDRIVNSLESNSGVLIFSPTKKQAESTSSNISDRRPPSHSNETIES

SEQ ID NO: 56126 - protein, 334 aa, Chryseobacterium aquaticum
MAIDFSKLITIDKNWVTNELNHHYTEKINDKLNVRLYSIKPSGTTINSISLASSLLDILPYYFKSKFEIDRIIKREVSKTITAYTTASEIDHQLEVSKKIHTRTYREAKSFFKKKSSDSKSGKYGELLLFGLVESILDCKMIAHKITNLTNYHDEIKGGDGIFMGNYKLSNGNIETAYLIGESKIWQDYSGAKKDALESINRFYDSKVQADFKTLEFFIAQKDIEKVVDEQTDIDELYERLDQKSDLFKSQIAVHPILIMYETKSYNTLMKKALNNSELNTLINTQVQSKLKVTLDSITKKVKEFPELEKVFLDFILIPTNSVSDFNDTMDNLI

SEQ ID NO: 56127 - protein, 886 aa, Chryseobacterium aquaticum
MSDNNSLIFQAFEHETLNKVIYDYTLKLLSSTFDSIKSIEINDDELKKTIWLVSILANSDNDIHKRKAQLFTSLLFLNNKDNIEILKVCYVLFSRLGNLTATKFLKNLYSNHDENPVDLKSEYNFGDFLSYELLFERENKIISLESNSFLVTDFQKDLWEGLNNISEIAISAPTSSGKSFIIKQYLINEFFYKNEFRALYIVPSRALINQVSEEFKSELNNDVRVKSSVTDENEVFDKEIYILTPERCIKILDINIKIDFIFIDEVQGIEDTLGRGLTFEYVFNEISLKFPSAKFISAGPNIINPNKTFTEIFERDCSAIQTKLSPVFQLKITLKNNQGSKFDIVIQTERGTYQKFTQDFKYNFKNKNKGETVAQLVKYIAPKDSNIVFVHDGYYAQQWAVLYANIIEKEDDLDEEVKELIDFLTEDIHKKYYLIECLKKKVAYHHSTLPDIVRKEIEELYTNEKLSTIYCTSTLLEGINLPANNLFTFQPKKKNIPLTKFEFGNLIGRAGRIKSSLYGSIYYIQNDNDNQLASDYYDAEYDKEIEVFSSNAINSLDVDDLNIPTNQIDKGQDIETKKAQQISIFLKHKYLKGEDYALKYLKNKKLTENEISIAMGYLQITLNTIVIPRNVLMKNPSIDPILQNQLYTRIKKEDLREWVINKNSNFTNYIESEKIESLPIHKRPFYWQLVNIVSKLNEIFNLFDEGFKKHSQKWLSAKSVSLQAKKWLSGAPIGQIIKQNINYLSGLENDYKIDSENLEDVNKVINDTIRYNSNITTYLLPKYVKVLVDILDEILTDEQKEEYKLTLSLPTMLELGTQEPLIIQLISSGITRSVAIQIFDLYNKNTTKDFREKNDILKWLSNQNEIKGLKPIYNRYLKRIKVLNKI

SEQ ID NO: 56128 - protein, 305 aa, Synergistes sp. 3_1_syn1
MSEELQKTIKSGKFDSVFTEVPHAEKLGLRNPEQLRLFHLNVQDNKFSSDGLIDFLRRNIGQYVFSRAKIEEFRVDDNLESIVSEAIRVIKKNGTFDEHSVGSFGGIMLYVFLEQILGAPKIMSKVELATNAKQYESKCDGIHLLSFGEKYDTPYYHMVFGTSSVTGDMRDAIDSAFEAIIKIEAQGSTERTLAENTVFAKSFDEGTIKHIKDLLIPTKGRQAAYDTAYGVFLGYSIGLDGSKYPAVEYRKILAAKMKVDIQNHAAYIAEKIHKLNLSNHSFYFYVLPLNNADTDRVEMMKQIVE

SEQ ID NO: 56129 - protein, 886 aa, Synergistes sp. 3_1_syn1
MSDQLLHNLGDAIFGDIDENPFLNELYENILYNYAITKFELTETKSLKEVDVSAALRFADLLSKSTHAEHKDQHKMWAQEIIVLLNALYPDDPNVRWYAGSVFSNTGNYQAQQLMQSDFDEASALDGIFTKFRNDYLTIPAAPEMRFFHAQKVAYDHLADPYFSYSGPTSMGKSFIMRMFIKEQIERGVRCNFALVVPTKALINEMRSQTIDDLKGLLKEHNYKVVTAAGDIALEGKHNFILVLTPERLLYLLISKPELNIDYLFIDEAHKLSGQNSRGPFYYKAVDMLLNRPKEPHFIFASPNIPNPEVYLRLLSDEIEFKENRLHSTFSPVAQIKFIIDLNGHAVSVYNDHTEELSTICSIKKQDATLTDFLYMFEHYNLEKPPEKRQQTIVYCNGRTKAIENALEFAKHLPNLNDDDLIALSKDISGEVHSDYFLAEIIKRGVAYHIGYLPSAIRMRLEDMFRKGKITTMFCTSTLLEGVNLPADNLFITDTKIFRRTMSPVDFRNLIGRVGRIRFNLYGNVFFVPQGDQVKEQDFVNLLKEEVPEQSLSIEAGPKGLTKAEKKHVVAALLEGNIEFEKRNNQSEESYVMMRKFALILIRDIMRDNDSLVRREFSSLLSSEDEAHIRQTFTDPIAEPDDDINVSVDQTKNLTAAIAYGLKYPDRVNGHFVYDDVVMFLEKLAKVFKWKQYEYTSLGKTGPDGQLSLLRWYAVILVQWMEGTGLSSIMKKAIEYRQQHPDNFWINKYQKTIYNDTIEHRNIVFADTLEVIDNIVLFSISNYFLRFSNEYKRIHQITEFENNWYEYVEYGTTNPLTILLQRNGFSRENSTYIKAHHEDYIVEFPDGTLRLNRSILQCSNLNVREEALSIQYNMPELFVQNDNEVY

SEQ ID NO: 56130 - protein, 261 aa, Actinomyces massiliensis F0489
MGTPRLKTLAQQLANQIVNYCIPRTEIEKVGLLSPDRQIPEITRLANEAARLFTQTQVKTGEGAELLLYALLEKGLQIPQVLTKMSLKTSTEMQYHGADGVHAKILDNGDLVVYWGEAKLYESVAKAMTDCMDSIEPYLTGAAHEQDVFLIRHYVDAGNAEVTARLLEYFNDKSILSANVEMRGACLIGFVHENYPSLPREEASVKAELDEVLSSWVKSTKMRLENRSLTKHAIEMFFFPMPSVEEFRKAIKAELRIEVKS

SEQ ID NO: 56131 - protein, 693 aa, Actinomyces massiliensis F0489
MSVSAPTSAGKSYIIREWMFSELRGSTPVRLVYIAPTRALVEEVSQVFRSKLDDSVGVHTLPWDPEITGFERQVFVLTQECLHLLHQRLSQFAPSVIFVDEAQKIADGTCGILLTQVLDEALRRDPTVRLVFASPLSANPGVLLDPASSQERKAALVGETVTVNQNLVFVNQVRRKPRRYALSLVYEGEEREVGQIELPLAPDGVGQKVPLIAATIGDGSTGNLVFANGPAEAEKFARTIFDALGEDLAIESDAVQELVDFSKGVVHERFQLSEFARRGVTFHYGDMPLVLKAKVEELFKRGELRYLVCTSALLEGVNLPCRNLFLRAPHKGNRMHMPMPDFWNLAGRAGRWGAEFQGNIFCVDTSDTKAWPEKPGRRERSLIVPAATTTLSNVASVIEYIDRGAHKADRETPPELESAFNWLAGRFIFDGNLLGLHGVALRAEETDRIAEALGRVMRTLRLRPDLVKKHAGISPTSMQRLLDAVLANGHPEELALVPPTSDDAFDEYKIALDYVAEYLGGSFEPESRRLSLARLIVHWMRGVPLSVIIDNRARWRRDQGQEVSYPRLIRKVMADVEDIARFEAPRYLSCYADVVAQAAGELGRQIDADAVDIEMMLELGVPRPTDLSFISVGLSRATTRAIAEFVLEPSLSPAQCTAWIENVDVEQLELPAFAAREIMAQRQLFSERRWRAG

SEQ ID NO: 56132 - protein, 313 aa, Bacteroides sp. 1_1_6; identical to SEQ ID NO: 55468

SEQ ID NO: 56133 - protein, 706 aa, Bacteroides sp. 1_1_6; identical to SEQ ID NO: 55479

SEQ ID NO: 56134 - protein, 309 aa, Myroides profundi
MLEFDILIDDFLYKYDPKEELDLCKTEKILSLTNDFENGNWRYTKFQNFIWDNIAETALSYRERESLINKNQSILVESAKKLRLTDLTKDQTGQGSELAEIILYGIMKHYYKALPVVPKIFYKQNAQDNAKGSDSVHIVIENGNDFSLWLGEAKFYNSIEDDRLSSIITSIENSLELEKLKKENSIITNLSDLDELFEKESDVYNGIMKLLAKEATIDDLKPKLHVPILLLYECPITIKFNELSDECKKEISDYHLNRVKSYFSKQLKKLKEKVHKYNSIHFHTILLPVPSKDTIIQSFVENVVHYKKQ

SEQ ID NO: 56135 - protein, 699 aa, Myroides profundi
MDIFSTCHQINDLLIANQENEARNELIKLLDFHEKENIKYSELVNHLIRESGLYPYIDLETASWQDKYIYEVFKADVGEYEELTLHREQSALLKNLINGKNLAVSAPTSFGKSFVIDAYISIKKPQNVVIIVPTIALTDETRRRLYKKFANKYKIITTTEVELGERNIFIFPQERAINYVNKIENLDILIIDEFYKASSNFDKERSPTLVKAILKLGKVAKQKYFLAPNISSLEENPFTQDMEFYPLDFNTVFLEQQKLYESIRGDEELKSAYLLDIISNINKKTLIYAGTYVNIDKLSNLLLANFQTKETKLLSDFSDWLSKNYNYNWNLTNLVKRGIGIHNGRLHRSLSQIQVKVFEESEGIDNLLSTSSIIEGVNTSAENVVIWSNKNGQVKINDFTYKNIMGRGGRMFRHFIGKIYILEQPPMETETQLGIPFPEEILGDLDEVKYENELTKEQIAKIIMYKEEMVNVLGLETFKKLQSENIFQTSDSELIKKIAIDMISNPDDWNGLGFLNNPYPKYWDRFLYKIINIVPSGWDTKHRTFVEFVKILRNNWFKSIPELLIELDKFEIGIDDFFKLERKVTFKLASLVSDINILQKEILKDKNYDISRFINWSSHAFLPKTVYQLEEFGLPRMISKKIQKSGLYSFIAPELTIHKVIDDLNSIGLEVISSIDTLMDFDKYILIYFFDGIRVNKNS

SEQ ID NO: 56136 - protein, 318 aa, Burkholderia lata
MEEKDSRSTGMERFFAPLIGPSFIDARVRRLTRHTEDLPEVSAHFLYPAFQNDRPAIEALVDALKYCILPFCTTKEELAKAKRADAAFPYGSPEIQRLLETAKRRFMRATKSGEGGELLLFAFIEHFLQAPIILSKMRLKTSTRMPVHGADGVHARWDSKNNRLVIIFGESKVHASCSSAIKAAAKSVGDFANNVDDRKTYELQLTTDHIDLDGFPEGARTELLRYLHPFATHEANRREDRFAILLAYESAAYGELEDVDSAELAFAERYREDLEHVLRHARSHLKEHKVSLRHVDLFVFPLPNVGQFRKQFEDALRV

SEQ ID NO: 56137 - protein, 851 aa, Burkholderia lata
MHFVSDFRLQLAREVAGHPDFKVAYQELQWHSLVSLLGRKAKLDAEKSRKLVQSALIFAQSTDTDLHIVAQDIAYCLAALQISAEAKAICAHILATLGNFPAGDFVSGVAAAVEFLPWQLAASETVRRDANSVVVRGETVLLTDFQLSVWRELHEQQYVSVSAPTSSGKSFVIQTFLKDFISTSDRNLDVVYVVPSRSLIHEVQANMAQELPDVVVQSTPRAPIEHAVSQSRVFVFTQERLRTALEQEDFGLDILIVDEAQQIGDGARGILLHSCLEEVIRRFPATQILLITPGAQSGAPIGRLLQLSGMTDLQTHLRPVRQNLIYADFEEARNGDYLSLSLQQKEGGRLLIGRLTANACHSDFERLIETIRLVRDRGQSLVYASSKAPAEATAIALATLSETTEEMDARLGELAAFIRRHVHPEFVLADCVERGVGFHYGNMPTNITKALEDYFSNGLLNTLVCTSTLLQGVNLPARNIFICNPYKGHGVPMSVDDFWNLAGRAGRLQKDTHGNVFLVSYDKWKSKPADEKPASNVVPALSKALTTDRRPVVTYAENPDHTSGSKKTAFAESVFSRLLVDAKSGVLMETIKHAAPDVAHGSVARLINAVERYVDKVTLPVSLLKRHGMISPVRQQQMFNVLRAAVADGRKDELVPLHPMGGSEARERLEVILQHIHKYFEGRDNNAHRFYGWFSLSWMEGRSLRDIIENQLRYARDKAQKNGQRREVPAGDIIKYVLREIEETLRFKYVKFLSCYLDLLRHALLVEGEDEIDFLPIPLFLELGACSKTMVSCMDLGLSRIAAREVMDLLKSKDLNTVIVRRRLSLMPTRARNELSPLVVREIQRLKLWQR

SEQ ID NO: 56138 - protein, 322 aa, Thalassospira profundimaris WP0211
MTEEIQKDEDSGDVFNLLSGTIRKGKKVTDVHLREFGVPTGIKDTKTRLHCYRLQIDANGKVRYKPLAEFLRDRVVDYAIPRKRIDEAKKYLEETNSTALLSKLEREARGLFTSLAKSGEGGELLLFAFAEAVFGLSQIICKMSLKTSTEMHYHGADGVYAQGIDGVGLGIYWGESKLYGDSSAAVRDCLKSLAPFLLEPDGSDAARSQDVFLINEFSSFDDPKITEGLKKYFDLDDNHSLQVKHCGIALIGFDSAAYLEDGKNTDNEKLEAELKAQLPNWMKQIKKRIGEENIASYELIFICVPMRTVEEFRTYFLNLLES

SEQ ID NO: 56139 - protein, 803 aa, Thalassospira profundimaris WP0211
MVAEAAVCFSGEPIYQDAGGLILARLSNHRAVQLAQDRELLRPELEHRIGKMEQLLLTRRRLHSEIFLNEKKSILGNRFQTELWAKLASSRWLSATAPTAAGKTYAVLNWLLLQHASGNAKSSVFIAPTRALVSEVERQLNQLKLNHGLNSLKVTSLPINDEGFHSEPFIAVFTQERLHIFLNAGKEPHSFDYAIVDEAQKLSDERRGVILQDSIERVVRANSTCRLVFLSPHSDNPEVLLEEAPDGVATSVVPSNTATVMQNLLVAEQVSGKTKEWTLSLATEEGKRPLGSFSLYDRPTCVRKRIAFVALALGKKTVGTLVYVNTADSAERVAALIYDGLSNDVFEEDQELADLSEFCEKVIHPKFQLVHLVKRGVAFHYGNMPSLLREEIERLFTSGKIRFLVSTSTLIEGVNLACRTIIIRGPKKGLRQDMSPQDFWNLAGRAGRWGADFYGNIVCVDVSKREVWPRGLPKKTAYPIKRETDQVLEQFNDLSEYLSKRVDMETASVNGKLEHVAAYLMSWQYREGSLRDAPPIKKLTKKMAGELEELIKPSLEAIDVSQAIVDANPGISIVALQRLMNFFRNDGRDATLFLPIPPEDSDSVDRFVVIFDIINLCLAPVFAPEKRVLPCALTTWDWMRGRTLGQMIAARLKRERAKPKYQSDEELPYARFIRETMASVEEIARFLAPKYLGAYLSVLRQHFQEKGISKEFPDEFPYDLFLEFGVSTRTLISLIGMGLSRTSSIELSNYIVRSDLGEMEVLNILVGGEWEGLDLPALVKREIRRVTEQKRLENSFDLNAENS

SEQ ID NO: 56140 - protein, 343 aa, Flavobacterium cauense R2A-7
MLKSITGCNMAIDFDSLISIDKKWVDRELTHHYDKYINDKLKVRLYTIIPSGTTVDCISLANALLDLLPNYFKTKSNINKEIQREVDKTINEGTTASDIELKEKAISLISGRNYREAARFFKKKNPDSKSGKYGELMLFGLVESIFNCKMIAHKISNLTNYHDEVKGGDGIFLGDYKIRSGIEKPAYLIGESKVWKTYSSAKTDALDSINRFYDPKVQATFKSLEFFIAEKDIDKFSDDEIDIDELYDRVNPNSKLFKSQVAVHPILIMYETKAYNDLMIKASDNVELEKMISENIQKRIDSTLEKISEKVKEYPFLERVYLDFILVPTDSIENFNNTMDNLI

SEQ ID NO: 56141 - protein, 880 aa, Flavobacterium cauense R2A-7
MRKLSVQAYNHNVLNELIFNLSLIILSEKFNSIPKIKIEEEDLKKGIWIASILCTSNEESHRRKGQLFSSLLFLNFKDNIEILKTCYILFSRLGNLTATKFLDGLYEQKEKNPINLRSKYEFGSFITNELIHERESRIIEASSNSYLITDFQKELWKALEKHSEISISAPTSSGKSFIIKQFILNQFSKTQSFRVLYIVPSRALINQVGEEFKAEIGNDVHIKTSYVEENEISDKEIYVLTPERCVKFLNSKLKVDFIFVDEIQGVADIFGRGLTFEYVYNEIPHCFPSAKLITAGPNIDYPEKTFKEIFEKESFSVITKLSPVFQFKIIMKILQNFQFEVELKTESGKSQKFIQDLGFDSSKTSTLGSTIANLVKHIAPNDFNIIFVQDGNLAQNWALKYAQITEDVNDLDEEVKELIDFLKEDIHKKYFLIECLQKKIAYHHGSLPDIVRKEIEELFASEKITNIFCTSTLLEGVNLPANNLFTMQPKKDSEPLNKFEFGNLIGRAGRLQSSLYGTVYYLEKENDKIKASDYFDAEYNKEIEIFSSYALNELDINDLKLPINLIEKETATSTSTAKQLSVFLRHKFLKGENHALKYLKSKKLSINQVDLAMSYLRDTLRSISVPIIVLNNNPSIDPILQNELYDKVVKSNIRDWVINKNSNYNEFLTSDEIINISYHNRPFYWQFVDLIERLDSIFSIIEESKVKYKNWVSARSMCYQSKKWLSGEPIGKIINSNINYLESRDKIDSNSIDDINSVINNTIKFNSTITTYLLPKYIKVLVDILNVVLSDSQKEEYKLTLSLPTMLELGTQEGAIIRLISSGISRNVAIKIFDVYKKETTKEFRETYDILEWLSSKKEINGLKPIYNRYLNRLKVLKND

SEQ ID NO: 56142 - protein, 346 aa, Flavobacterium cauense R2A-7
MIFLLKSITGCNMAIDFDSLISIDKKWVDRELTHHYDKYINDKLKVRLYTIIPSGTTVDCISLANALLDLLPNYFKTKSNINKEIQREVDKTINEGTTASDIELKEKAISLISGRNYREAARFFKKKNPDSKSGKYGELMLFGLVESIFNCKMIAHKISNLTNYHDEVKGGDGIFLGDYKIRSGIEKPAYLIGESKVWKTYSSAKTDALDSINRFYDPKVQATFKSLEFFIAEKDIDKFSDDEIDIDELYDRVNPNSKLFKSQVAVHPILIMYETKAYNDLMIKASDNVELEKMISENIQKRIDSTLEKISEKVKEYPFLERVYLDFILVPTDSIENFNNTMDNLI

SEQ ID NO: 56143 - protein, 880 aa, Flavobacterium cauense R2A-7; identical to SEQ ID NO: 56141

SEQ ID NO: 56144 - protein, 315 aa, Rufibacter tibetensis
MTFINPVSIEKLLRAGSNMDAYLKEVKKEVSVAGTKAVVHFYLINFDGNQSPRVADLAEFLSFRLLDYCIPRDEIQRAKEEDLKNNSSVQITKLGKKAKLLLTDLEKTGEGGELMLYALAQEYLKMPQLLCKMPLKTSSQMHVHGVDGVHVKFDPGSGCLAIYWGESKMHQTFGSAVDDCFESVGKFLSNTGGSGTQFQRELQLMISNIDLLDNDLEEAILTYLDKDHVNYTKAKNCAVCLVAFDYKRYPLGPNQTQLQDLLAEAIKKVDKWIKRVGTSLVAKAPLHTYDIELFIVPFPSVDGFRQSFLEELGLK

SEQ ID NO: 56145 - protein, 848 aa, Rufibacter tibetensis
MASTLPNRIYQLPSFQRQLKSLLKESVIAQFDNLENTQQVGDEEIDWNNLISCASILAHADDQECLDAALRIAQHCLLRTNSSEMHKVSAGVILDVLTNKPALSLALKRQLIPSDYLEQVPFSLKLESAKRNFLNTYITHNDELLYFNKFQKAVYDATQESDIVSISAPTSSGKSFVLSRLILDALMDKGRRLNVVYLVPTRALVTQVENELRHLLIDNDVKDVFVSSVPKITFDVESYRSTIFVFTQERLHWFKVTSSSFRFDILIVDEAQKIGDGYRGILLQQKIEELVKESPELKVYFSSPFTSNPELLLDIIKTNNTKAPVKKDYVAVNQNLLFVSQKPGKPQKYDMALCIDDTPISLGEFNLPFKPSPVSKILPFVAYSLSNGLGGNLIYANGQADAEKYAVQLYGLCQDISTSEEINGLINLVIKVVHPRYKLAQTLRRRVAFHYGNMPLIVKQEIERLFGQGEIHFLVCTSTLLEGVNLPARSIYIKNPTRGSRQPMNENDFWNLAGRAGRLGKEFQGNIVCVDPYKWNNIPSTNRSKQTIYKAIDNVPLTELINYIEAGTPRKLNNTSQNLEYAFTYYFTKALDNELASTLNPDNPLSEALEFELGKVRGFVELPRSVIFRNPGVSPIAQQNLLNYFKLHSNKDELIPVAPDSYDAVDVSYERIVNLISMFLTGDSEKMSKTYAILVVNWMKGLPLPKMIDDSYKYWIKVQKPKPLDGVIRDTMDLIENYARFKFAKYSNCYLDILHFHLEQENNSDLIEELPDLSSWLEYGVSLKTQISLIDLGLSRPTTLALSEYIPDNNLTREDCILWIKSNDIDLLGLPTAMVNELNTLFSLISRE

SEQ ID NO: 56146 - protein, 315 aa, Marinobacter santoriniensis NKSG1
MDKLKAIDWASLVAGKHSWIDDYFKVHSVLEDKKTVCRFFSLDFSGTQQEIFSLTESLAASIEHYVFDEKQLASFHKEGKVPFQKAMKFFGKTNPDMDGKYGELLLYLLTEKFLQTPLVSHKLSLITNTNDQVKGGDGIFFGDYKDELAILIGESKIHQGAAGAMEDALESLNRFYDNYSSGQLGHEMFIARSNISENFSSLDDAESLYQAFSPGTDQYKGCVKAHPVLLVFESSKISTIEEKAKNKDEAEQMFNDWLTSRSKEIQKLLGEKLNNYSELRKVYIDAFLIPLTNVSKFKHALYREIHGIDYVSSEK

SEQ ID NO: 56147 - protein, 864 aa, Marinobacter santoriniensis NKSG1
MTQIYTQAAHHEDFVRVFDKLLEKLFLEDKVTDNVQVDLDKEEIKKATWLASIAALSDDDKERNMANAFGALLHLTDKENEIYKRACYILQSRTGNLITSSHIPKLFHKENTLSEYGTLLNFELAAHRALLEQEFSDDTKVFFTEFQKKLWDSLNSGENIAISAPTSAGKSFIIKKYILEIVEGGAKNIVFIVPTKALINQVSNVLKSQLHEKAHVYTTYITNEEDDLATIYVLTPERCLKLLQDKNVASPELIFMDEVHNIESGSRGVIFENILYRVTSAWSSTQLVVAGPFISSLSDSIKKICNISIIDHQTMSSPVFQVRSALTFFPSKKVARYKISSPTERTISGEIKLKKSLYSKIKTNKGEALEVIADMFSPEDHNIYYAPKKNLAEKWASKIAPVIASKNPRIIEAADSRVKDLIDFLSEEVHPDYSLIRTLRLGVAYHHAGLPDIARQEVEELYSESIIKNIICTSTLLQGVNLPADRLIVISPKVNSDDMPAFDFLNLLGRAGRANTKLYGEIYCIDIVDDEWGSRKLEAEVNKTVDTSSNLFLHENEERLSLIADMSGAEIRDLTGDKNIYSNLSYLRSIFKTDRNHFDRILSNSGIKSESVEQFSKKLESLYNNMSIPRELISKNPFIDPVLQNKLFEAIQSQGIGEWLISKKPLTKGGSDLDYVAFQEKSYYFQLWSVFERLDSIFNIEYELNSNGFSQDNYINIGRLVRDAHRWMSGKKHKFFIIDLIGEGNHGESEVDKAARRITGHISKNLTFIAVKYLLLWSDMISYFLSEEEIEKNSYILNLPSMLEMGSYDPVVLELMSCGISRSVALSISSKVKKMNTSAEKALAKINKEALPNIFRRHLIKAGY

SEQ ID NO: 56148 - protein, 309 aa, Erysipelotrichaceae bacterium 5_2_54FAA
MSEALSKTLHGDFDSVFHEVTQPEKVAWTTEGQLRLFHLNIRNNKFNPEEMKTLLYRNIGEYVFSRARIERFKVTGDAFAVGAQAIRVLNKNGGADVKGTGAELGEMLLYSFLEEKLNAPKLMSRVELSTDAKQYASTCDGIHLLTSKTSGLPYHQVVFGASSIVGDLTYAIDAAFDSILEIENNEDKELHMVDNVIFDRLLNEDEVELAKEIFLPSPNKTTSYNTSYGVFLGYTIGLDPTRYGVAEFPQIVEEKMQEDIRRNIDYILKKINNNFLGQHSFYFYVLPFNDAEDEKKAIMEAVMKGDVDL

SEQ ID NO: 56149 - protein, 881 aa, Erysipelotrichaceae bacterium 5_2_54FAA
MSEKKSLGEALFVDIESNAYLNELHEKILYNYALKLFQLEKKKSPKEFELKDALRFADLLSKSTHPTRSDIHKMWAQELIILLNEINSDNPLVKLYAGSVFSSTGNHQGLQLINSEYENINTFEKIFAQFRNDYLTIPAAPEMKFFNAQKEAYDHLSDPCFSYSGPTSMGKSFIMRMFIKNEIMHGSQKNYALIVPTKALINEVRAKVIKDLENNLENCNYRVVTAASDIALEEEHNFILVLTPERLLYLLISKPDLQVDYLFIDEAHKLSGKNSRGPFYYKVVDMLLQREQKPHFIFASPNIPNPQVYLRLMNDIIENDDESKLATTYSPVVQVKFLMDFIKGSIDIYNERTNKTIHIANVGKGIDKLNKMLLLFEGKNLRLPPEQRSQTIVYYNGRTKAIAAARDFADSPGVNDKNDPELDSLSRDIMQEVHGDYYLAGMIKKGVAYHIGYLPASIRTRIEELFQKGNITTMFCTSTLLEGVNLPADNLFITDNKIFRRKMNPVDFRNLIGRVGRISYNLYGNVFFVSEDKSVAAESFIDMLQAPVPEQELSITTNPDVLKKVEKKYIAEILKTGSSEIPRRRDDQSDESYVMMRKFGLILLRDIMEERDSLVHREFADFLTVEDEVSIREKFKESPTLPDDDINTSVDQTKKLIIAIKQGLTYPPCNGSFVYADVIEFFNKLSDIFDWPIYEKSTLGSESKRKWYAVILCQWMEGSGLSYIMKRAIEYHKNHPDNFRVSAYQPPTTYNDRSKEHRNVVFADTLEVIENVILFSISNYFLRFSNEYKKVHDVTEFDNNWYEYVEFGTTNPLTILLQRNGFSRESATYIRNHKEEYVVHDGSGGELKLKSSLLTCGNTSVMTEAANIKFNVPGLFLEEDA

SEQ ID NO: 56150 - protein, 217 aa, Elstera litoralis
MYIRLREAAIRIYTSNKYKRRGEVGEIALHAICREFFGTIPLAPRVFYLTSSNDVVKSFDLAHVRMVEGRSELWLGEAKFYEDSNAATKAAISSITEHIDLGFLRNQKLILGPQVSKSLPNYQEIRDILSIQTSLDELFDRAVFPVLVAGDSSATKKTKRVDDDYTAAIEAELAALYDLITKSGLMTKIRVMLIYLPLAEKSRLADAFDNRLKGLQP

SEQ ID NO: 56151 - protein, 631 aa, Elstera litoralis
MVNALARATGLWNYIDKEIADYADLLLAESVTSEELGGITFHREQIEALNTLLSGENLILSAPTSFGKSLLVDALLASGKYRRVAIILPTIALLDEFRRRLRRRFQDKFELVMHPEERAAGADVIFLGTQERLLNRDDIGTLDLTVVDEFYKLDPRRKDERNVALNAAVRRLLLKSRQFFFLGPNIDDVTVTVEGRWKFQFLKTRFSTVAVDIYDLGEVEDKEARLYEELRQERNWPSLVFVSSPDRANMLAGTAADKFKVSHTADEMATWMRENYGDKWPLIAVVNNGFAVHHARIPRSLASQMVRLFNAKTLPVLFCTSTLIEGVNTAAKTVMIYDKKISRANFDFFTFSNIKGRAGRLGEHRVGQVYLFNPPPPPQETEVAPTLFDDEENASDDYLVFLDEVDLSKDTNARISVISNELGLSRDELRIASSVGLETAARIRHQVLQSLHNSSLLIWSGYPDYNQIEEVVRVICQVKSARDFGAYSDKQLTFLISALRGAQKIKDFMLNYNSSYKGDPEAYDGIFKFLRACEYGLPQVISLVALFASKRDDSVNYDLFVRELSRWFRNEALRSLEEEGIPIQVAERFVKNNDSKKTLTKRLEQAVLGESGLLSDFERNWLAYALDLKLT

SEQ ID NO: 56152 - protein, 319 aa, Bacillus safensis FO-36b
MNKKNKVQKILSCKISEANFHSYYIDFDIGSSGELTQRIDEFVQIMCEELPNFAFGFHKGESISVDEILPVLIEAAASIYRVTNFKQVAEIYKRGEIIEDEIDDKYLRRGEFGELFLHSILKYLFGTYPLIAKIYFKDSYGHAVHGFDSIHIQPDTKTLWLGESKLYTDGKSGIDALVKDLFDHFNSNYFESEFNIISKRIEDSRDTIDSKGFNSEYWIELLNKYTSLSEKLENIVIPMFCAYETSTLDSYENDYDTFETRFDEEVRNLNKRFMEKGNKHPLYSKLNIIVILMPVKSKKELVSKLHNKLSIIQSLGIGG

SEQ ID NO: 56153 - protein, 716 aa, Bacillus safensis FO-36b
MNWEDINIYNINNLNFQDSFSLAKYVSNLSLSDKKNEARKILIHILEIWDYVNNDTKDIWLDIAESQGFYPYIKDRLDITSEIRQAYHYSENIENIVFHKEQKILSNYLKRKENIVVSAPTSFGKSLLIEEIVASNKHRNILIIQPTLALINETRLKLKKYKNYNMIVNTSQKIEGKNLFILTAERVLEFKNFPKIDYCILDEFYKISSTRDDERSDVLNIALKKILSNKETAFYFIGPNIDSISSGFEENYNAKFVKTDYSLVDTRVELVKVDFKSNKPRLKEKDRKIKLFEMLFRKKKEQSIVYVSSPDRAIKIAMEYYDYLEEKKLLEKQSVLPINEWISENINPSWSYNKLLLQRIGVHSGTIPKHLTHSIIEYFNKKNLDVLFCTSTIIEGVNTSAKNVFIFDNRKGSNEIDYFDFSNIRGRAGRLLKHYSGNVYVFHSIPKKAKVELDMPFYDQEKISDEILINFNKSEVKAKNLERYEELTSYDERLLSIIKKNAVSVSGQKKIIESILTTLRSNPELILWTGEPSFKAVKYITDICWDNLLKETETTRPMTKKKLPVVVYNSLRSKSVKESLNKEYKYLKDQFTKLTKQQLIDKAISNYFREQRHWISYKVPKWLEVVDSLQKEICKINGVSKSGDYSYVASQLENEGVEGDFSVLLDMGVPSSAINKIKNQFSKGIDIKELISEAKNIADSSNTNLIEYEKEKLNEL

SEQ ID NO: 56154 - protein, 309 aa, Prevotella sp. C561
MSNKIWNFDILVDDCFVNFNTKKQEINPDHNDRLLSVANGFEDGSWRYRQFKEFVFSNIAETALSAQEREKLIDNDYGRLIEAAKHLRLVDKEQNGKGSEIAEIILYGIMKNHYKALSAIPKIFYKQNDNDNAKGSDSVHIVIDPNGGFQLWLGEAKFYNSLEDARLYEPINSVEQMLRKPIMKKECGIMTNLNELDKQIENQTLLKKIKECFDENTSIDEIKPKLHIPILLLHECQITASTTEMSDEYKNSIISFHRDRAHSFFKKQINKLSSVHKYSEINFHLILFPVPDKTKIVNWFISQAKKSQK

SEQ ID NO: 56155 - protein, 707 aa, Prevotella sp. C561; identical to SEQ ID NO: 55471

SEQ ID NO: 56156 - protein, 313 aa, Neisseria sp. oral taxon 014 str. F0314
MFKSDEVIAEVKLHDSVYAYFVGYDIDKKYRWKDLTNVIINVLPEFAYGFHTGTNTDNSKLIAKVIDAAKSLYKIEGFLKVSQMIQKGQKGLDDEIEDKYLKRGEFGELILHLLLRDRFNTIPLISKIYFKDSIGHTVHGFDCVHIEKESKTLWLGESKLYINPMRGLSALIKDLDEHFNCKFLEDEFSLISKKVHGIGEYSDQYDELIEDRNYWINLLNSSNYKNTFTKIKIPLICTYSSNIFQKYNDEEDSSFKEEYNNEINELQEYFYKKLNHKWKDKLKIILILFPVMDKNELVKKLHEKITYLQKLND

SEQ ID NO: 56157 - protein, 733 aa, Neisseria sp. oral taxon 014 str. F0314
MNANELINLLKIKDNFSFNETFSIYKECARLLNEDEPTGQNLLIYILNYKEKFSLSCQDILTELIESIGFYPYLQKENLISKSTTSNIRMFTNKSDYLENKIFHDDQKQILDLIYERKNLVISAPTSFGKSILIQEIVASEKFKNLLIIQPTLALLDETRRNLKSYRSIYNLITKTTQEPKDKNIFLFTAERTNEYLLFPSLDILIIDEFYKLSAKRDDGRSYSLNNAFLSILKNYPKCQFYLLGPNIEGISNGFEEKYRAKFIAINTKLVSSEIHNVFEEYPNQFGDRGIKRQKKEEVLFELLSSELKNENTLVYCASPRKAHELSRKYTEYIKQKKVEISHITENETLIEWLNKYVSESWSLSNSLRYGVAVHDGTMPKHLLSSILELFNNDSIKCIFCTSTIIEGVNTNAKNVIYFDGYKGKQNNKIDYFDYSNIRGRAGRLMKHYIGHIYNFVEPPKYNKLIIDIPFHEQNPIQDEVLINLEDDDIISKNTDQYHFINSLGSEQKALFSKNGTPIKAQKNLFDYFSINYKNKYSLLNWVTYPTKEQKDFCLQLIWDFLTEKVDKQFFYNKFLNFNIPLSRYLYSKDINSLIKDDVQYWEGRESYKDYTKGQLYDYFIQHNFKLLRLYIQFKIPKWLNVLNNIQKFFAYKENLLPGNYSQYIKLFENNFIQDNIFILEEYGVPNTALYKLSKFIPENLSSEQAINLIKEKKLYESENLLEYEKQRLINSL

SEQ ID NO: 56158 - protein, 313 aa, Parabacteroides sp. D26; identical to SEQ ID NO: 55468

SEQ ID NO: 56159 - protein, 706 aa, Parabacteroides sp. D26; identical to SEQ ID NO: 55479

SEQ ID NO: 56160 - protein, 292 aa, Paenibacillus sp. D9
MLEVLKHSKTYKVNNQQNNLELFICPINANQFDYARMVESLIESVADFSVSRKTKEKYQGSPMTLSQKAREKFRNYKENKGELGEFLLFCFLEGHLNAPKILSKLELKTSTNMYVNGSDGIHFLKLPSGNYQLIFGESKLYDDLTTGLRDAFQSINDFVKEENQKGEGKSGITYEKSLLSASVFKETWSTEEEQFIEQLIYPTNDNSFEVDDAFGIFVGFEVVLNADQRKLPNDKFRTVIEDHINEVVTKKIANIEKYIEEHGLFGYNFYVYTMPFLDIELSRIKILENLIK

SEQ ID NO: 56161 - protein, 855 aa, Paenibacillus sp. D9
MTFLNKLVDRALIDPYMSTLIKKLEKQYAIHFMGSNTVMQSLTNKEYLDLLRFADILCRSEKYEARNKAYKIISLLHVFYSDDQMFKLQAYNVLVKLGNFPSIKIVLGETEVKADEIVIDHIVKETYQAAPGSSNIFTDTQYKLFEKMKDSNHFSFSGPTSFGKSFIFESFIKYLIEKKNGSDNIALLVPTRALINQVSTKLKTVIDNRKYKILTKPIVPLLYKQGDSRFIFVFTPERLISYLSENNPVINYLLVDEAHKLLSDTDTRAPLFYHALMIAKRKSINLYFSSPNVPNTEIFLQLVGNSVEETLAIKENSVAQNRFFIDCIEKQALYFSEYGEELALDYSGYASDPHINLKNAVDLLGRNNPNIIYCNTKDDTIQYALEYARTLPLINNYELEQLTNLVQETMHEEYYLVDCLKKGVAYHFGGLPQRVREKIEFLFQKRVIKNIFCTSTLLEGVNLPAKNIFILSNAIGLTKLSKIDFWNLAGRAGRLTEDLSGNIICLRIVDKRNRWEEPSKDLQIVKDKSVEKVSSVLMTSQGKFYINIGHSIKNEPFTRKNVTDNEKRMLDSYGNILAYHALSKTDSILRSKFIDGNTQSKEIITYLEKLNKVPEKILSQSSTIKLLYQNKVLSSSINPMDIPRETGYGECLNLLNKLYDLYNWQREESGGRNPLARNKHVLEYYAVLMSSWINSQPVNLIIKRTINYFDENNKEISINNGEFVAFQKDNRAHINHIVNNVISDIENVLRFKIKIYVKNYVDLLRIKHQDNEEAVVIPNWDNYLEYGTTDNIIIELQNIGFQRHIATFLKNKYLELFVLENGVISDFQENELKEKLQRSNYTQEYEEISNTLGWG

SEQ ID NO: 56162 - protein, 299 aa, Bacteroides sp. 2_1_56FAA
MLIKTDISSDFLNLFTKIFENEVLEGGNRLNVFMLKISNNQFNYGNLSEELENALITYALSRHTCNELIEQKKFGNLASQAREKLRRAKSNTGELGELLLYCLLESHLHAPKLLTKLELKTASNEYVKGADGVHLLKIDDASYQMVFGESKLHGDLKSGIISAFESIKTMLDNDLDKMRYEVHLVNTNLLKETVSEDSYEILKKILIPSENDENLNLDNSFGVFLGFDISMSDDERRVNNAEFRTNISEKVKSSINKIVPTINELLKKNEFIGYNFYFYILPFSDLDKTRSEIINRLKK

SEQ ID NO: 56163 - protein, 852 aa, Bacteroides sp. 2_1_56FAA
MILADKIAQEIMGSEYFQSLFVICMERSYYQILNLCKSIQYKEKEYKDLLRFADLLSASSFSEARSYAYHIITFLNSSYKNEPYYRMVSKSVYYNLGNFPAVNYLTKEDCNEAVLPLDKMIQIDAKKALQEVPNSDGIYFTDTQYDLYSGLSESREFSFSGPTSMGKSFIIKAFISRIIHNRPPENLAVIVPTRALISQFTLEIKKDLGIQLERNKYKVVTNSNISELILENNTNLILVLTPERLISFLSQNENPSIGFLFVDEAHKIAQDDTRSITTYIAIEKTLKKYPTTKLYFSSPNVSNPDILLKLFRKDEQNSFKTEETTVAQNLFFSDLSERKFSYFYGNEFLPISTKIPESARTVNGFLVTYGRDSNLVYCNSVRRTIAYATQFANTISIDDATRTNNKLKKASKIIGDYIHPDYYLASIIKKGVAYHFGNMPQLIRNLIEDLYKNGDIKYIFCTSTLLEGVNMPTQNLFILDNKKHRSELKSIDFWNLAGRAGRMSRELQGNVFCIKHNECDWKGSAFFKSKKVELIPTVYDRINKNLKRIENQIKNNEIKTGTEEEKRILRYIANIICIDTLEPKSGYQSPIIEELIKRNKIQILELAKSKNSNIEVPFSLLDSNESIDISIQNTVYKQLLELHADKKQITLSGNVDYENCLRILERFYHLYNWEKTNIKELNNVNSLKYYAFIMNQWINGISLNQIISDSIKYKESNQSFIRLPSGANEIFSSRKKEHVNILIGEIIRDIEKVIRFHFEKYFNHYFLVLKHILGEDNAGDNWAVLLEYGTRNRIVIALQNLGLSRYTANIVYDKCRAALIVENGKLKGFEKSLILSMLRQNSLEYDEVYELL

SEQ ID NO: 56164 - protein, 312 aa, Lachnospiraceae bacterium 3_1_46FAA
MVNRIFDKKNVILLKVNEDDLNTFLVDMDIDDEGNPKYCLDDFTKAICNTIPEYVFAQYEDPNIPQNDIVEKLREAAHCIYKIKDFQLMKQWCVDKDINAYNELKRSSTAKRGEFGELLLHLILREFKHTIPLISKVYFKDSASVPAHGFDAVHVSTNEKILWLGESKLYDDSKEGIKALVKDLNEHINTDYLNDQFVIIKKNLDNNSIPGREEWIDTITNCTKLSDKLNIINIPMLCTYTHDIYKKFSDMNDPNAIAYHELNVRELKEYFDKQNKMPLKDRVNIILMLFPVNDKNELVINLHKRLWHMQNI

SEQ ID NO: 56165 - protein, 738 aa, Lachnospiraceae bacterium 3_1_46FAA
MDKTTEIILEIENAERISFEQSFKIVSYCTQLLSQHSAEAELSARKIVIHVLNNWGKIDKNLYVVWADLIETLGFYPYIQKNSSDLKIMSFADDVRMSYFKSDFLKNTYLHKEQKKISNYLLSGKNIIASAPTSFGKSLLIEEIVASKKYKNIVIIQPTLALLDETRLKLKKYADDYKIIVRTSQPYSEDKRNLFLLTAERVMEYEPLPQIDFLIIDEFYKLSLRRKDDRADTLNNAFLKVVNKFHPRFYFLGPNIDGITDGFAEKYDAIFYKSDFSLVDCNVIDKSNLINWSNSDKQIDKEKITILCELLDELRNEQTLIYCSTPARARRMAKVYLEYLQRIEREKNNQLPLIEWINKNVSPEWSLAKELQYGVAIHDGSLQKHIGASIIKYFNEGRLNCIFCTSTIIEGVNTSAKNVILFDEKKGGNEIDFFDYSNIKGRSGRMMEHYVGRIFNFCHVPVQKSIVIDIPFYEQDPEILTNEILINIKKNDVKQEVRNRYDQINALPADLLSIIKQNGVSVNGQIRIYNKLISDLKSKSVLQNIQWSQLPTWDQMYYVLELAENNLFNFDSKRGVFSVKQLARYLNMYRTKKNIIDIVNDIYNSKIATVKTLTDERKARYYDEAVETAFHIYRHWFQFTVPKAFRVVDSIQRLICEKRNIKPGSYSFFVQQLENDFIRENLSILVEFGIPSNAVRRLENVIPSNLSEDEVIDFIKKNRSNIKKYLLPYESERLEQCI

SEQ ID NO: 56166 - protein, 324 aa, Afipia sp. 1NLS2
MEFDALATALAIIKKDWSVLSSRIHTAEHDIVTNHKHLNLRLHYPALRDAQATVEELVRTIALYLTHFSLPRKQVEAVYATQETMKTAFERHQAISRLEQEARSLFIRARKSSQRTGEAGELLLYLLTEWLLDAPQIIAKMSLKTNAQMPVYGSDGIHVRFDAKTNRLVLFSGEAKLHSDITKAIASAVTSIKTGLSREKMQHEIELVQRHIDFSGLNETARTALLRYLDPFDEAYNNRLEVVTCLIGFDFTGYAGRSPNELEDFDINFKTSATAKLREVGPIFAEALTDAGLTNQRVELFLFPVPSVSVLRDLFQNQIGWTRD

SEQ ID NO: 56167 - protein, 859 aa, Afipia sp. 1NLS2
MQPLADKVWANPHFHAAARRLQRAWLAHDIGVGPVDHPGLEEIVRIVRASAILACSKTADHRDQAYRTITSAFDLYGASELPLDQATRVVLARLGNFPALATRPSIRDAMPSLPASLITEELIVSDRRTITRRDRSVLLTHYQFGLWRRLVAGERVAVAAPTSAGKSFVLQNFIAARLEGSSPQTIVYIVPTRALIAQVSADVRKLLIGHEGASSDVDVITIPVEAGQPLPRRAIYVLTQERLRMMLSAHPTFHAQIIIVDEAHSVGDGARGVLLQWTVDDLLQRLPTTQLLFASPGIRNLDVFGRMFNLDDITIMPSGDPTVAQNFLVAAFDDAEAGDLTVRYVEPARTLTEIGRLALARRSVTRVEKLVNLAISLGQGASNIVYANGAGDAEHIALEIAARLDRSPTPRRQALAQLAAETVHWSYALVACAKKGVAFHYSNMPTQIRTAVEEAVIRGDIDYLVCTTTLLQGVNLPAKNLFLCRPEKGDRVPLESVDFWNLAGRAGRLMKEFQGNIFLIDYDHWRKKPLDHPRDATVIPAVEAGLLQKGADLLRVIEQPETQRREIDHIDAIFGRLLQEHFSGTLTKMLSRIPSYGDATPDSLALQKAIAEAAVDITLPTSVLRISPNISPHKQQALYQILRLRAESTPASAMALIPKHPSDRDAYQSYADILEICHKIIEGRPDTSRLHRFLALIAVFWMRGRPLPQIVQNQLRRNPDRDRREIIRDTLELVEKRVRYQCVRLFSCYGAVLAEVLQDVNLPDAVKTLPSIPLFLELGASDKTTLSLMSNGLSRATATRLTPRAPSRDLDAEDAMDWLRQAPVETYRLPALLLEEILEIRGDKATAMTPDDTDSRRKE

SEQ ID NO: 56168 - protein, 188 aa, Veillonella sp. oral taxon 158 str. F0412
MSKIHTEHLKTKPKVHTFYIGFDLADNGKLTQNKSKFYDELFLDVTSFAFGASNVMSRIKTPQDILKVQREAFRKMYYIQEICEARQHYLESDCVEDKYLKRGEFGELILYHFLHEYFDADALISKIYFKDSVGLAAHGFDAVHVDSKKKILWLGESKLYSSGDSAIDALMKDLEEHFNINFLIVNLL

SEQ ID NO: 56169 - protein, 218 aa, Veillonella sp. oral taxon 158 str. F0412
MVAQTEPSIVYVKSPNEAYKLAKEYMDYLVELDKAITNDDLDVFEWIDMNISPDWQLKTFLKYGIGSHNGALPRHIISTEIDLFNEGKLQVLFATVSLIEGVNTIAKNMIIYSHHKGSNYIDFFDFANIRGRAGRMNRHFTGNVYLFIDQIEDEQFTIDVPSIDQNPVSDEILFNIPNNDVKNIERKKLLETGLNEEIQDIIKKILFLSMVKRNSINI

SEQ ID NO: 56170 - protein, 505 aa, Selenomonas sp. oral taxon 138 str. F0429
MEYLGVGSYVRVMTSCAISAARKFDPFCEKIFLSLCDEGAKVFSYKTADGSEVTYSPANFSKIHNAAQNLPAEIMQMALRKDARDIERYFIAEIIPALDEARKKNAVLALKNIILKDDNIPDTTQLGTIKSLKKIELKDKNVFVLSEFLTDIFIYAVAKTDNTIDPAFTKSIKKNFYATYTPYVDTISFYEASMPKTVASIPLTSIGKFNQIFTPISSETLSISANHDLQIFCLKFDDFDFDYQGLWKYLRNNIGYYVYSRAQINRYVDEEEISSLSYDAIAHIKEFITKNKQEPETELGELLLYVFLEQVLHAPKLMSNVELSAHNGIISSESSGIHLLTANAVIPFNQIVLGVSMLNSSMKETIDRAFADAQRIKNRKKDERRFVEATIFEGAFPRDVCEQLEAIILPSETNVEKPATAFGLFLGYTLDNLPARGKSIDVYQRDAIAQIKNDILNSVPYIESKVIQYGLDGYSLYIYLLPFTDVDRDKKDIMNKLLQTEGGSL

SEQ ID NO: 56171 - protein, 877 aa, Selenomonas sp. oral taxon 138 str. F0429
MNKFRDVSFGEYLFSKIDNNKYLQKLYQNILINYSKRLFNLSDPEDPPVNIEDALTFIDVLSKSSGTSLSDTHKTRAQEMIALLYDMYPQNEDIQYCLGSVLATTCNFLGMKRLTPDFKSASLLEQILTHFNRNYLSVPSDEEAAFFPAQKEIFDSLSKPYFSYSAPTSMGKSYMMRVFIKQQLMKGTKKNFALLIPTKALINEVTNELIDNLTTLLQETNYRIVTSSGSIALETEHNYIFILTQERMLYILIDDPELKIDYLFVDEAHKISSSDKRSVFYYKVITKLEERQSTPHIIFASPNIPNPKIFLDILSKKAYLRTENSTATCKYAPVSQVKYIVDLWERNIRIFDSYTKKFLKFYEMPRPYSLSELIVWIGDRKHNIVYCKSKNDAIQFARNYAKTQEVVGDKKLQSFAEAIRRDVHKEYYLAELVEKGVAYHIGYLPANIRMQLENYYREGLIKTIFCTSTLLEGINLPAENLFITSYKKGISRFSEVDFKNLIGRVGRAKYNLYGNVFVVRLETHEAEIDLKNFENLLIADVPPQKLSIEAELKSNQKEFIVNTLLSGNVEIHKTPKDQSEDNYDLMRKTMLILVGDIVNHQNSRVRREFSPYLTPEIEEKIRAEFSVTGKKPDDDINVSYDQIQGIKELIRNGLSYPKIHDLKGGANYQEALTFLNKLAVAFKWRIYENQTLGAGEGDHYSKLTWYTVLLLQWMQGYGLSYIIERSITDYAEKRREVRVDYKEKEVFNGSQKHKNIIIADTLEAIENVLLFRLSSYFLRFSEEYRRQHPDDPFTNNWYEFIEYGTTNHLRILLQRSGFRRESTEYIRRHADKYVRGSSDRPKLLKRPLLDSPNELVKRDTEYIQYNIPELFLDEGEE

SEQ ID NO: 56172 - protein, 493 aa, Selenomonas sp. oral taxon 149 str. 67H29BP
MTSCAISAERKFDPFCEKIFLSLCDEGAKVFSYKAADGFEVTYSPTNFSKIHSAAQNLPTEIMQMALRKDAHDIERYFIAEIIPALEEARKKNAVLALKNIIVKDKNIADTTQLGTLRNLTKKELMDKNEFILSEFLTDIFIYAVAKTDNTTDSSFTKSIKKNFYAVYSSMRDTITFYEVSRPKAVAAIPLTIKGSFNHVFTPISRETLSISANHDLQIFCLKFDDFDFDYHGLWRYLRNNIGYYVYSRVQINRYVIEEEIASLAYDAIAHIKKFIEKNKLQSENSLGELLLYIFLEQVLQAPKLMSKVELRNHNDLISSESSGIHLLTANTDVTFSQLILGVSMLNTSLTEAIDAAFADAQKLKSRKKDERSFVESSIFNGAFPSDICEQLESIILPSESVEKKPATAFGLFLGYTLGDISKSGKSINIYQRDAIAQIKNDILNNVPYIESKIAQYGLDGYSLYIYLLPFTDVDNDKKDIMNKLLQTEESKT

SEQ ID NO: 56173 - protein, 880 aa, Selenomonas sp. oral taxon 149 str. 67H29BP
MNTFRDVTFGEYLFSKIDSNMYLQKIYRNILINYSKKLFNLSEQEEMPVNIGDALAFIDVLSKSCGTSLSDIHKTRAQEMIALLYHMHPQNEEILYCLGSVLATTCNFLGMKRLTPHFESVSLLEQTLTHFNMNYLSVPSDTGASFFPAQKEIFDSLSKPYFSYSAPTSMGKSYMIRVFIKQQIMKGEKKNFALLIPTKALINEVTNELIDDLTTLLQEANYRIVSSSGSIALETEHNYIFILTPERMLYILIDEPDLKIDYLFVDEAHKISSRDKRSAFYYKVIGKLEERQTAPHIIFASPNIPNPQIFLDLLSKRTTLNGEISSTACKYAPVSQVKYIVDLWERNIRIFDSYTRKFIKLYDMRQSYSLSELIVWIGSGKHNIVYCKSKNDAIQFARNYSKMQPVIGDTKLQDFAKAIRSDVHKEYYLAELVERGVAYHIGYLPANIRMQLENYYREGLIKTIFCTSTLLEGINLPAENLFITSYKKGISRFSEVDFKNLIGRVGRAKYNLYGNVFIVRLETHEAEIDLKNFENLLIADVPPQKLSIEAELNSNQKKFIVNTLLSGNVEIHKTPKNQSEDNYDLMRKTMLILVGDIVNGRNSRVRREFAPYLTPETEEKIRAVFSVTDKKPDDDINVSYDQIQGIKDLIRNGLSYPKIHNSKQGADYQETLAFLNKLAIAFKWHIYEHQTLGAGEGKHYSKLTWYTVLLLQWMRGYGLSYIIERSITDYAEKKREVRVDYKEEEVFNGSQKHKNIIIADTLEAIENVLLFRLSSYFLRFSEEYRRQHPNDPFTNNWYEFIEYGTTNHLRILLQRSGFKRESTEYIRRHADKYVRGSLERPKLLKKPLLDSPNELVKRDAEYIQYNVPELFLDEGEECDV

SEQ ID NO: 56174 - protein, 302 aa, Tannerella sp. oral taxon BU063 isolate Cell 8/11
MTSKFTLLIDDSLLNLSEEQDEQYEKKYLLSYLNDFESGEWQYKSFNRFIFDNLCEAALSAEEREKLPVDRQSDLAKAASNLRFSDDNGQGSELAEILLYGIMRRHYGALPVVPKIYYKQNSQDNAKGADSVHIVIEEDRGFTLWYGESKFYNNLEGAMKAAIKSVKDTITEEKLKKENSIVTQTKDLDILVKNQEMLSRIKSMLSFNTSLDELKPILHIPILLLHECRITAEQKQMNSEYKKSMQSNYQEQAQKFFRELNAKCSKTFLYKEITFHLILVPVPDKDQIVRKFTNYARAIKDN

SEQ ID NO: 56175 - protein, 713 aa, Tannerella sp. oral taxon BU063 isolate Cell 8/11
MENLFERCKEINDMLVQNQEQQARDSLIILLQEIKDNKIEYTPLINHLIREVGLYPYIDEKTADWRERFVCEAFKIDVGGGKEVTLHREQSAILSALLDGEDLAISAPTSFGKSFIIDAFLEIKRPNTVVIIVPTIALTDEARRRLYPKFSSIYKIITTTGVELGERNLFIFPQERALQYVGEIEHIDLLIVDEFYKAGKIKGTTKPLDERAAQLIEAISQLEKKATQRYFLAPNISELKNNPFTKGMRFEKIDFNTVYTKIIKVYEKISKDKKEKELQKFEFLENILSSTSDKSIIYVNSHSGIRIVAKRMSDFCMDTDQCFINQFSLWLKEHYGASYMLVNLVRKGIGIHSGQIHRSLAQIQIKLFEQEKGLRNLISTSSLIEGVNTSARNVIIWSNKNANSRLDYFTYKNIIGRGGRMFKHFVGEVYLMECPPAETTPLLELDYPDPLLERIDPEEYSGKLTPEQIAKIEENETEMDHLLGKGGYRQVIKETASQGVSKPILIDAIRSMRDNPNEWRAKLPCLLNANAERWKSVLFLTMPLLRKMKHIQGRNTKIVHFIQILSDSWSLSIPNLLKRLGPDSITIDEYFELEKLISFDFVSLLNSINAITKRILDANIDISPFIAKVSNAFLPPLVFELEEYGLPRMLSRKIQSSQVIDLEKEGVSINGILYEFRNIGEDRIIKVARLSKVDRFILSHFFDGITPVPSSAT

SEQ ID NO: 56176 - protein, 298 aa, Peptoniphilus coxii
MSHKHSNNIEINNKLHIYYISFDLLDNGYGQVKDKFYNELFDDIPAFAFGTDVMNKKKDEIGLVPTVREAMKKIYSIKEIQEASREYLDSTSTEDKYIKRGEFGELLLYHLLHEYFGADALISKIYFKDSAGSVAHGFDAVHVDTNKKIIWLGESKLYKNSSTAINELANDVVNHFNVNFLDSEFQIITNRIHDSKIDCDDYILKLLDPNTKTLNKLADINVCLFAAFESNSLVNFNKDNFEKTLKEEVEKLDKKMNTLLSQHPWANYLNVYLLAFPLDDKREFVSSLHQKLKGGQQI

SEQ ID NO: 56177 - protein, 711 aa, Peptoniphilus coxii
MNDSVKFNAEYLKDFEYNWNCTKYYTSIIDKTDARKFLINVLENWDQVNDDAKSIWLDLIERAGFYPYYIDKIESIENYNQSLQSSVRSAFFKSDFLNGIYFHEQQKEIERAVSLKKNVAVSAPTSFGKSLLIEEFVARKQYNNILIIQPTLALIDETRKNMSKYLNYYNIVINTKQKATDRNIFILTAERVLEYVGLPKIDFFIVDEFYKVSNLRNDDRIDALNISIMKIMDYKPQALFLTPCVNSLSDRFIERYNVVFFKTDYSLVNTNIIEVRKNNRPLKSNQKKKELFKLLKELKEPSIVYVKSPNEAYKLANEYINYLKPTNFANSNLPVFEWMDENISEKWKLKKLMMNGIGAHNGALPRHIVSSEIEMFNNGILSILFATVSLIEGVNTVAKNILIYSQNKGSNPIDFFDFANIKGRAGRMGKYYTGNVYLFNEELQPEEFSIDVPFVDQANISDEILFSIPDEYVEDKDRRKLLESEIPGDLQAIIRKNLISVEGQKKLYNYIRLNIGNLSYLKWSRIPSYEELWRTLYLAYKYLDNNDSEKFAKSQAIMALDIINKSLKETIFKREEFLRKKRSNKNFHEQAIEDVLKFVRNDANYKIPKLLSVLDSIQKYTFEKNSNRNYGDYSIFNSLLENGQIGEDFRFLIDFGVPSSGIKKIEVQFKKDNKTYNDNVEIIPWLSQNIKILKNILLDYEYDLLKKALNF

SEQ ID NO: 56178 - protein, 274 aa, Desulfosporosinus acidiphilus SJ4
MLDDLTKAIINTIPEYVFADYENPEIPQTDVVEKLREAAHCIYKIKDYDLMRRWRLNNDKTALEELKKSSTARRGEFGELLLHLLLRDFKNTIPLVSKVYFKDAAGIPAHGFDSVHISPDEKILWLGESKFYSESKRGLQELLSDLNNHFKKDYLNEQFIIIKKNLDNNSIPQRDEWIKILSNSNRLKDKINIINIPMLCTYPHDIYKLYDDMNNIAAITYHETNIRELKDYFDIQNQHPLKSQLNITLMLFPIRNKKELVTELHARLWHMQNM

SEQ ID NO: 56179 - protein, 733 aa, Desulfosporosinus acidiphilus SJ4
MEELISEINTSENISSNRSFYLAEKCSNLLSSGSTLDEQEARRIVIHILNNWEKVCHETYNFWTDIIEALGFYPYLAKNKDNLILESSADIIRQQYFLSDYLENTYFHKEQKKLSTNVFSDNNVVASAPTSFGKSLLIEEIVASHKFQNIVIIQPTLALLDETRLKMRKYSDFYKIIVRTSQPASEEKGNLFLLTAERVMEYEPLPKIDFLIVDEFYKLSLRRIDDRADTLNNAFLKITNHNNCKFYLLGPNIDDITPGFAEKYNAVFFKSNFSLVDCNVVNLYEQITPTTSDRENDKNKLALLYPLLDSLGNEQTLIYCSSPNRARRYARGYLDYLISKGTAPQNDLSLIEWIHKNIADDWSLAKELEYKVAVHDGSLQKHIGASIIRYFNKGLLNCIFCTSTIIEGVNTSAKNVILFDDRKGGRQIDFFDYSNIKGRSGRLMEHYVGTIYNFVQPPKQRQIIIDIPFYEQNPQIISDEILINILPEDIEDRTRARYEELYQIKHELLDIIKKNGVSVNGQMNIYYALERDIDVQYNNIAWAQLPNWEKMFYILSLAENNLFDFSDKHGVFSVKQLVRYLDMYRKKKNLMVIVDDIYQGKVKNVKYMTPERKLKYYDDSIEQAFHLYRHWFQFTVPKAFRVVDSLQRFVCTKHSRRPGSYSYFVQQLENDFIRDNLSILTEYGIPASAVRQLEKNVPPDIDEDDVFEFIRRNKKTLARNLLRYELEKIDECL

SEQ ID NO: 56180 - protein, 313 aa, Desulfosporosinus acidiphilus SJ4
MMATRNFDKKNIILLKINECELNSFLVDMDIDDFGNPIYMLDELSRAIINTIPEYVFAHYENPSIPQNDTVDKLREAAKCIYKIKEYELMRKYYLEQDKSVLNEIQKSKNATRGEFGELLLHLILRDFKGTVPLISKVFFKDSHGVPAHGFDSVHISPNESTLWLGESKFYTDGKRGIKELLGDLSNHFKKDYLDEQFIIVKKNLENNNIPQRDEWIKKLCSCNKLSDKINIVNIPLLCTYTHDVYKLYSDMNDRKATVYHENNIRQLKKYFDDNNDHPLKSRLNIVLLLFPVKSKKELMIKLHERLWHMQSM

SEQ ID NO: 56181 - protein, 734 aa, Desulfosporosinus acidiphilus SJ4
MESIFNKIDNSKILDYEDSFDIANQCAKLLFSDSSADQSEVRRVVIHVLDNWGKVCKDTYPLWADIIESLGFYPYIEKNKENLSLSSFADHIRGKYYQSEFLGDTYLHKEQKRLSDYILSGKNVIASAPTSFGKSLLIEEVVASNKYKNIVIIQPTLALLDETRLKMLKYNGRYKMILRTSQPPSKDKGNIFLLTAERVMEYEELPHIDFLIIDEFYKLSLRRVDDRANTLNNAFLKIVNKYNCKFYFLGPNIDAISNGFAEKYNAVFYKSDFSLVDCNVINLYSKINWTTSDQQNDKQKIKLLCNLLDSLKDEQTLIYCSTPARARRFAKAYLDHLIESSDLTQNSLPLIEWIDKNISSKWSLSKGLQQKIAIHDGSLQRHIATSIIRYFNEGKLRCIFCTSTIIEGVNTSAKNVVLFDGKKGGKDIDFFDYSNIKGRSGRLMVHYIGKIFNFCVPPEKETIVIDIPFHEQDPNIITDEILVNIPSTDVKNDTFERYKELHSIMPELLEIIKRNGVSIYGQMNIYYALERDINTSMYYNIAWSQAPNWDKLCYVLGLAEKNLFDFESRHGVVSVKQLVRYINQYRKNKSIMDIVDEIYQSKLKRVKQVTDERKIKYFDEAIEQAFHIYRHWFQFTVPKALSVVDSLQRFVCKRHRKHAGSYSYFVQQLENDFIRENLSILVELGVPSSTIRFLESKIPETLDEDGVIQYIKSQQSVLARSLIEYEREKLKQCF

SEQ ID NO: 56182 - protein, 297 aa, Chryseobacterium sp. BLS98
MIEKNIKDDFLDLFYNDLCNEALENNNTLNLFTLKVKNNAFSYDELINELGNKLCYFALSRKQVDELKQADKFNDLVKKAKAKLKHHADNEGELGEILLYCLLESHLNAPKILTKLELKTNSNDYVKGADGVHLLKLSDTDYQIVLGESKLNSDISKGVYEAFGSISKFLKSTSKLEFEIDLINSELVKEAYDQTTYEMLKRIIIPSAKEDDTYLDYSFGIFLGFDIPITDDESKLSNSDFRKNIREKIKKEVLKAKNSLNHQLKKSDYTGYQFYIYVIPFSDLQNKRKHIIEKIVE

SEQ ID NO: 56183 - protein, 850 aa, Chryseobacterium sp. BLS98
MKIIDKLTEDILRDEYFNALFNKCSLITAQNLFKKSNRVQFTTKELRDTLRFADILSNSKNSDARNRSYQIVASLNQDYKDNEVYRTVSKAIFSKLGNFPAINYLENKNKNIALLPIFREIETESKRLIQQAPDGNGMIFTDTQFELFNKLSKSTEFSFSGPTSMGKSFIIKSFIKKVIKNSPPENIVIIVPTRALINQFFSDLKNELHELLDTYKYKIFINSNVSDILTEEKYNYIFVLTPERLLSYLSQDTNPPIGFLFIDEAHKLANDKDARSVTTYSAIEKVQKKYGNVKLYFSSPNVSNPEIFLRLFNRDIQNSFRTGESPVSQNIYFVNLETKEVESYSNNSVLKLQDILDDSKDYSITKFIKFIGADKNNLIYCYSKRNTVNKAIELSKLLPRIEQSELVEQAIKNIKEYIHPEYYLVDFIEKGVAYHYGKLPQLIRNLIEDLYQKEEIRYVFCTSTLLEGVNMPTQNIFIIDNRSGSKTTLSPIDFWNLSGRAGRLTRELVGNIFCVQYEDFKWVDKDVLIRKDIKLQPTILTKIDHNLKKIEKALKNEEIKSGSEVEKEILKYIANIIKVDTLETTANYKSPIIDKLIEDNKQKLIDLAKQGIINFEIPKSILKFNQTINFDIQERIYKAVSKSKKSILPNSGAIKYESILKVLIDFHRLYSWDKTEKKLANVNSLKYYAVLMNQWVQGFSLSQIISQSIDYNHDNGYQVEVDFRVYEVFDKTNRRHINALIEKLIDDIEYVLRYILEKYFNHYYQILVAIIGESKAGDNWATLLEYGTQIPQVIALQNIGLSRNTAIKIFRHHRKSLILKDNKLVGVNKALLLNEFRSTSLEFEEIKRTL

SEQ ID NO: 56184 - protein, 302 aa, Clostridium sp. HGF2
MSSIDINTTIKAGTIDSVFKEVTHSESLGLRNAAQLRLFHLKLDGDTFTNDGLYKCLRRNIGYYVYSRSRIAKFKREDDEASINLEAMQLVKEQCQKAPEHFGNMLGEILLYAFFEEKLEAPKIFSKIELDTLTTDTIYDGVHLLKIDDESFQMVFGTSNVENQIDAAIDNAFSKIQAGLNQPKKGIPLVSELIFAQNADSVLADKLEKIITPSPDAPEVDSAYGIFLCYSLGLSKENRTVQEYKNLVEQKMVSDIKYSLPKIKKYITDCGLSSRSFYIYAVPLDDATEDKTTIMKKVTGGV

SEQ ID NO: 56185 - protein, 882 aa, Clostridium sp. HGF2
MKNSEITFGEVFFENIENNEYLIRLYEDILYNYAIKVFGYNRRLKKNLPINDALRFADILSKSNHSTKADKHKVWAQEIVTMLNFIYPDNEDVSYVAGSVLTIVGNYQGRNIIKSEFDGSDAMEKLFLEYKKKFYTIPSAPDKQFMVAQKSAYDHFENSYYSYSAPTSMGKSFIMRMFIKEEILSDCKHNFAIVVPTKALINEIRIKITKEDLGEILHQKNYHVVTAAGDAALSNWKDKERNYIFVMTPERMLYLMINEPDIQIDYLFVDEAHKITGADKRSPFYYQVVNMLSERMHRPHIIFASPNVPNPEVFLDTIPDVQSANEHKLQTSFSPVSQPKFIINLINREVSIYNEHNDSNIPITSIALDDADLIDVLLRFEKDEMKKERPFIVYFPSTRKTVVAARDFGANRIPKTNCQELMELAKDIKNEVHGDYYLADLVSKGVAYHIGYLPASIRQRIEELFKAGKITALFCTSTLVEGVNLPADNLFITDYRNGQKDMRPIDFRNLVGRVGRLEFNLYGNVFLVATSEKASDKFETLLSKPVDKQTLSIEKGLTKPQKQNVINVLLQGDVEFPKHPQKQTEDSYDLMRKFAIILLNDIMANRESRVRKEFQKVMNPGDEDLIKAKFSNRQQHMRDSDITVSVDQSESLYEAIANNGLEFPAIDSNGRYNADELWAFLLRIAKIFKWKSYESYTLGAPGNDPDKYSSLSYYRVILGQWVSGHGLQQIISEAIRYKKNNPHEAMFIDGKKVDYKEGSEHNNIIISEVLSVIDKIILFKLSNYFLKISNAYKDIKGKPAPNDWYEFVEYGSTNKRSIEIQKYGFSRESALYILQHEAEYVYKSETELKLKKSLLECLNKGVKADAELAWYNTPELFLEEDA

SEQ ID NO: 56186 - protein, 309 aa, Methylobacterium sp. AMS5
MTSVKFDTLIDESLSKITTISQLQNLLNNRLLSLANDFEDGKWRYNRFQSYLWDNIAQTALSEQERAALYDQSHSSLVAAAQNLRLTDKDEIGQGSEIAEVFLYGLMKNHYNALPVVPKIFYKQNAKDNAKGADSVHIVLNANEDDFTLWFGEAKFYNSIADSRLDSIVTSVYTSLGTEKLKKENSIITNVSDINHLDIPTALRDKIKASLSNQISIDLLKPRIHVPILILHECTKTAGCNILSLEYKKSIVAHHTERAGSYFVKQASKLTTLHMYDKINFHIILFPVPNKKLIVDAFTSTAAFYKGVV

SEQ ID NO: 56187 - protein, 706 aa, Methylobacterium sp. AMS5
MDVFDVCSEINDLLTEGNDLAARNLLIKLLSTIDKQKENYPQVLNQLIRSTGLFPYIQLENASWDQKFVHKAFAVDVGNRTATLHREQSSVLSRLLGGKSIAVSAPTSFGKSFIIDAFIAAKRPNIVVIIVPTIALMDETRRRLYKKFSREYNIITVTDTPLEQRNILIFPQERAFGYADKLPNIDLLVIDEFYKASVAHDKERAPSLIKAILKLSRNAKQRYYLAPNIKKLADNVFTRDMEFIELLDFNTVFLEKHDLHKEIKGDAGRKKDALLEIISKRTEKTLIYAGSYSEIDKISELVINNMDVIDRPHTTHFAHWLRVNYQSEWSVADLAERGVGVHNGRMHRCLSQLQIRLFEHEKGFDSIASTSSIIEGVNTSAQNVIVWKSKLGRNNLKDFTYKNIIGRGGRMFKHFIGHIYLLDAPPVEENTQLDLSFPDTILGSLDENQDKDKLTEKQIERIVEYKNQMSDIIGGENFALLRKKNVLQDSDSDFLLTLARNLKSNPQDWRGFGYLNSDNPADWERMLYKVVGLKPSAWDSSWSNVVSATKSLSFNWSMDIPQILSMLSPHGIDIEDFFQLERTISFKLAALLNDVNELHKIIVNPSIDIGGFVGKLSHAFLPPAVYHLEEYGLPRMISKKIHLSGLVNFTSDEVDLRGALKIFRAIGLDGILKTDGLSKFDRYVIRFFFDGILPENPPDFAVLDQK

SEQ ID NO: 56188 - protein, 295 aa, Cellulophaga geojensis KL-A
MIETNVKNIFLDLFYHDIENLELAKSNKVNVFTLKVKNNAFAYDELVKLISNQLYHFALSRTEVQKLIDAKEYATLVSKAQDKLRRYSSNEGELGEILLYCLLESHLNAPKILTKLEIKTAKNDYVKGADGVHLLKVTETDYQLIFGESKLNSNLKTGIYEAFGSLSKLLSENKIEFEIGLVNSQLIKETANPELYEFLKNVIIPNARENKISTDYSFGIFLGYDVGITEEESNKSNSEFRTHIRQKIKQEVENLIDSINFQINKSEFTGYNFHLYIIPFSNLAEKRKEIIQQLT

SEQ ID NO: 56189 - protein, 857 aa, Cellulophaga geojensis KL-A
MTIIEKLTKDVLNDEYFKLIFSKCSLISAENNLNIELSDNILTNKELTDALRFSDILSNSKNSEARNKAYQIITYLNHQFKNNEIYRTVSKAVYSKLGNFPAINYLTNYNANIATLPFFRSIEVEAKKVIQKVPDSENFVFTDSQFELYSQLSNTLEYSFSGPTSMGKSFIIKAFIKKVMRNSPPENLVIIVPTRALINQFTLDLKDEIRELSEQYKYRILTNSNVNGFIGDEPHNYILILTPERLISYLSQDNNPPIGFVFVDEAHKLANEKDSRSVTTYTAIEKTIKKYGNIKLYFSSPNVSNPEVFLKLFDRNKPNNTFKTNESPVSQNLFFIDLLSKNVELIQKDNNVNIENSNLFQVVNSTTTLIQHLGFDKNNLIYCNSKSKTIFEANEFSKIVGKFQLSEALKKAIKQIKEYIHPQYYLANLLEHKVAFHYGKLPQLIRNLVEDLYKKEEIQNVFCTSTLLEGVNMPTQNIFILNGKNGRKPLSQIDFWNLSGRAGRLSKELYGNIFCVQHSDWLWENKEILNKTEIILKPTVLTKIDRNLRKIESILKNQKITGSKEEQAILRYIANIISVDTLEIKSNYKSPLIEKLIEKKKDKIIELANSKVKDFEIPSYILNSNQSINLTIQNKVFNLIKKAHKQGKNIKLISNHINYEICLDTLKNLYILYEWDKAEKKLNNEKSLKYYALLMNQWINGFGLNQIIKMSIEHYENNRSLIHLGYIDNKPNFIQYEKGNVDHINALIEKIIEDIEYVLRFLFEKYFNHYYQVISNILGEDSAGENWASLLEYGTQNRIAIALQNIGLSRHTALAIYRKCRRALNVEEDKLKSINKNLILSEFKNGTLEYDEINRIL

SEQ ID NO: 56190 - protein, 302 aa, Porphyromonas sp. KLE 1280
MMKTKFTLIIDDILRDFLPGDKFLLSYLNDFEGNEWRYGHFVSFILDNLCETALSKMERDKLPTSPMSAMSKAAKNLRISDELEKSTSGLGSELAEILLYGVMRSHYKALPVVPKIYYKQNVLDNAKGADSVHIVIENDGRFSLWYGEAKFYTDLEEAMRSAVSSVKDTISDDKLRKENSLVTSMSDMEKLVLDKELFNRINTMLSSDTSLDRIKPILHIPILLLHECQITAGFSQMTPAYCSQMKSFYQRKAHAFFERLHQKCVDVNGYEKITFHLIPFPVPSKPRVVEKFYKKAKALRED

SEQ ID NO: 56191 - protein, 712 aa, Porphyromonas sp. KLE 1280
MIDVFDNCKQINDLLFQGKEQEARDALIILLQELKDNQIEYTPLVNHLIREVGLYLYIDTTTSDWQERIVFEAFKVDAGCGDEITLHREQSAVLSALLKGEDLAISAPTSFGKSFIIDAFVAMKQPNNVVIIVPTLALTDETRRRLYRKFGKDYKVITTTGEELGEKNLFVFPQERALMYVDEIAHIDLLIVDEFYKAGTMHGNINALDGRATQLIEAISLLGRKASQKYFLAPNISELKGSSLTSGMRFMKVDFNTVYTHVEKTYDSISGDKKEKETQKFAHLKRILETVEGKSLIYVNSHSSLQKVTEKILEFDIDMKTCGFLGLFSLWLKEHYEKSYVLAHLVRRGVGIHSGRLHRALAQIQIKLFEQEGGLKNLVSTSSLIEGVNTSARNVIVWSNKNSNTKYDYFTYKNIVGRSGRMFKHFVGEVYLLEAPPQETFPCLELDYPDVLLERIDPQDYSGQLTSEQIARIKQNEEEMDAILGQGEYRKIMKEIASYGVSKAVLEDIIEEMKGHTGEWNSKLRGLLDSNPKRWGNPLYLMMPLLRKVKHFKRRDKAIVHFIQALSRSWTQSIPEILGKVAVDGIKIEIEEYFDLERMVSFDFISLLHSINAVAKRVLPSNVDISPFIAKASNAFLPPLVFVLEEFGLPRMLSRKIQNTGILDLERNDISIDEVLDEFKLIGEKKIIEIADLSEVDQFILSNFFEGITSTP

SEQ ID NO: 56192 - protein, 313 aa, Peptococcaceae bacterium CEB3
MMQKKTFDKKNIILLKVEEDDLNSFLINMDIDDNGNPLYQLDDLSRAIINTIPEYVFANYEDQEIPQTDSVEKLREAARGIYKIKDYDLMRRWYLDNEQAAYDELKNTGSSRRGEFGELLLHLLLRDFNGTIPLVSKVYFKDAAGVPAHGFDAVHITPDDQILWLGESKFYTDSKRGIRELLADLSSHFKREYLDEQFLIIKKNLQNNSIPQRDEWIETLNGCTKLRDRLQMINIPMLCTYPHDIYTCFSDMDDAEAISYHEANVRELKSYFATQNTHPLKSQLNVILLLFPIRDKKELVTKLHERLWHMQNM

SEQ ID NO: 56193 - protein, 732 aa, Peptococcaceae bacterium CEB3
MDDIISIIDINESVSYEQSFDIAQRCSKLLSSGNEEQEALARRVAIHILNNWAKIPRETYSLWTDIVEAIGFYPYLEKHKATMQVQSLSDEIRQKSFLSHFLSETYLHREQKKLSDYIMAGKNVIASAPTSFGKSLLIEEIVASGKYKSIVIIQPTLALLDETRLKLKKYSDRYKIIVRTSQPAVKDKGNLFLLTAERVMEYNALPPIELLIIDEFYKLSLKRIDGRANTLNNAFLKIVGNCNSSFYFLGPNIDGITTGFAEKYNAVFYKSDFSLVDCNVIDMTSKIDHSKTGKALEEEKITHLCSLLDSLKDEQTLVYCATPARARRFAKSYLDYLVSKGESSTINLPLVEWIDSNISTEWSLSEELRHGISIHDGSLQKHIGTSIIKYFNDGLLHCIFCTSTIIEGVNTSAKNVILFDGKKGGKDIDFFDYSNIKGRSGRLMEHYVGNIYNFVAPPPKEAVLIDIPFFEQNPVSDEILVNIPESDIHDDMLSRYQELHQTQSELLDIIERNGVSIDGQLNIYYQLEQDVNTSKYNDIAWAQMPNWNEMQYILGLAENELFHIDHHGISSVRQLALYLNQYRTSKNIMYIVKDIYGHKMSSVQSSTGEKNSLKYYDEAIEQAFHIYRHWFQFTVPKVFRVIDSLQRYVCEKHGRRAGSYSYFVQQLENDFLRENLSILIEFGIPASAVRQLEVEIPKGMTEDEIIQFIKKHKNRLTASWLQYEKDKLDQCL

SEQ ID NO: 56194 - protein, 303 aa, Corynebacterium epidermidicanis
MNTALPTTLPNIDLASVFTEVTLDEQLQLNSDGSGLRLFHLQVRNNKFDYASLEDLLMNRLGHFVLSRAQIAQYEIEGNLGSIGLQASRFLRRPENQELKENALGNFMLHAFLELALGAPKLLSKIEIAEVSGTRQILCDAVHLLDQSTGSKLRANLIFGASNVVGDFGDTVDLALERAVAIAENEDAECKLVDQNILQQRFEPKTTEYLKNLLLPTAANSANYDVGFGLFLAYDLGLDPTLYQREEFPQVMEQKLKQDLRAHIGHIRDEIQNRGLGIYPFYIYTLPMNDAESDRVTITEAVL

SEQ ID NO: 56195 - protein, 878 aa, Corynebacterium epidermidicanis
MTQNKTGTLGDEIFANIENNEYLIALYEQLLEHYGHNTLGKESLRLGDKQLDDVLRFADLLSKSTHPERREYHQVWAQEIAVLCMELYCDNPISSPYLTSIFQAVGNYQALGRLENQALPDLFEQAFNEFQSDYLTVPGEEDKKFFAPQKRAFDAFKNDAFSFSAPTSLGKSFLMRTFIKDRMLKGGKENFAILVPTKALINEMRSRFINELGEELEAKNYRVVASGGDIVLEGEHNFIFVLTPERMLYLLINKPDTHLDYLFVDEAHKLSGKSKRAPFYYQVTTMLLQRPEPPRFIFASPNIPNPGAFLSLLQSAPESSDAMRTRFSPVSQFKFFVDLQTQTVSGYNHRTKQTQHLSTLNGISSVEDYLLHLRQLSLEKKREQTIVYHGSKQKAVENARHFASLLPKIHDDDLQTLAADIRREVHDSYFLAELIEKGVAYHVGHLPASVRLRVEELFREGKIHTIFCTSTLLEGVNLPADNLVVTSHKNGRSNLNEIDFNNLIGRVGRIEFNLFGNIYFVMGEGFSAKSTVEKLLKTDVPNQQLAVSEASLPNKIKEAIVCALKEGRMPEPTDLGKGEQAEMARTFSIILLRDLTAGRESLVTRSFQELLTPDTRARILEKFRDSYQSQQDDDINVSVDQHESLEAAVKAGLRFPHIDRDTGRPNYDDTLGFLQRLARIFKWDKYESATIGRTNNSGFTSLRWYAVILIQWIEGNGLNRILKESIDYQRKNPDKFWVNYRQVRYLDTPLHKNIVCNDTLEAIENIILFSFANYFLRVSNEIKKQEGKEVIENDWYEYVEYGTTNTSTITLQRMGFTRESATWIRKHHAGNYMFQDKETGSTYLNPALLDAENLSVRREANEIKFNVPKSFGMPYFLW

SEQ ID NO: 56196 - protein, 313 aa, Bacteroides sp. HPS0048; identical to SEQ ID NO: 55468

SEQ ID NO: 56197 - protein, 690 aa, Bacteroides sp. HPS0048
MMQTNDIYNTCLDISNVLNAGDISNARSKVITLLHEINGTNNNSYMELVNHLIREVGLLPYIDTYTASWEDRFVCEVFKVNIGERKPCVLHTAQSQVLKKLLEGKSVAVSAPTSFGKSFVIDAFIAIKQPINVVILVPTVALADETRRRICRKFSHQYKIITTTDVELAEKNILVFPQERAFAYIDKLPSIDILIVDEFYKASTNFDLERSSTLLSSMVELGKKAKQRYYLAPNIHEIEENVFTEGMTFLRMDFKTVVTHAWRLYKSRPKNEDKQSFKTRKLIELINTGIGKALIYTGTYKGIEEVTTILNRNLYNKDSELLANFSDWLECNYGEKYILKDLVKHGIGIHNGQLHRSLSQIQIKLFEEQNGLDYLVSTSSIIEGVNTQAESVVLWSNKNGAHKIDYFTFRNIIGRAGRMFRYFVGRVYMLEEPPSQENTKLRLEFPDDVVKKLDGNDPGIKLNNEQYVKIQRYQDEMIELLGTDIWHRIERIPQIRSCKPSMLKIIAEKLKTDSNWPTNCDALQNNNTWEWRDALGDIIEILEYHRKGHLRYYACACSNGWKMTIKELYNTVKDYGITYEDIFTFERYVSFNLSSIIAVINIIRQELYPNSSNIANFVYKASNAFLPKIVFQLEEYGLPRMISKKIQNAGLINLEDDSKEITIVIQEFNTIGIEYLEQKIPNLHSFDKYI

SEQ ID NO: 56198 - protein, 301 aa, Haemophilus sputorum HK 2154
MDYPKHPEPFLELKIHNLDSTPPISALCAGYECGEWRSSQLAEHAMEWLPEFCLTANELKSITSSNALKMIRKAAQSVYQTDKYKNRGEFGELFLHIILRQIYSSIPAISKIYFKDAVNNTVKGFDAVHIINIKDTKDTKDTKDTKDTKDTFELWLGEVKFYNNARQAIYDVIGEIQEHTKQDYLKNEKMLLLNKIDIDPKSPFYPILSKLLAPNTSLDELFDCACIPILITYDSKTLKKHTKTTKEFNLELEHEVMKVFDDFKNKISNLTIPIKLHVFLLPLQEKSVLIKKLDEELKRLQ

SEQ ID NO: 56199 - protein, 708 aa, Haemophilus sputorum HK 2154
MFTRNDIEKILKNSNPINVDTAFIILQSMYYLANTNNIEDNSTQQLLLRILDRKEEFNSFSDALNGLVRHFGLYPYLDTDNITIKDAFVRELHRPSLLTENNSGNEGIVFHKVQSEIFQHLINGENIILSAPTSFGKSTLIDSLIESQKFENIIIIVPTIALIDETRRRISSLKTEHKVITHASQEKLSKNIFILTQERAIDFPDLPNFDLFILDEFYKLDPREDSERAMTLNLAFYKLYKKSKQFYLLGPNINNIPNGLPERFQCKFIKTDYSTVVTEVIHIHPQKDHFDELINLCNSIKGSTLIFCASPNKARKITRLLTEKCSQLKDNYLNNEANWIAENYHPDWTLVKGLRKGIGMHHGKIPRAIAYLCVKNFNEEKIQFLVCTSTLIEGVNTKAKNVIIFDNKIARNKYDFFTFNNIKGRSGRMFKHFIGNVYLFNNPPQEELPLVDIPIFSQDESNTTDSLLIQLDKDDMTMESWKRIQKYHNQSILSIDTLRSNSGINPDYQIELAKYLLEHQYILEGLSFISNPSYEQLEVLCCLIWDHFIHSKSYSDIYSGKQLAFKLNQLKHNQLKEIILNEISQGIEADDAVENTLNFIRQWAQFHFPRFAMAVSRIQNELAERLGIEKSDYSFFCTQVENLFKDPALIALDEYGLPLPLAEKIENKLNPEGKLDIAIDNLSKLDLELLNNLTAFEKKLLQDVKNYI

SEQ ID NO: 56200 - protein, 297 aa, Methylophilaceae bacterium 11
MEKKLQSQLKNADEIKQILREVEFTHTLSDGTAVNTLLVYLPIKDGKSSHDEFFDEIKKGILTNFVLSCKEIEEKLGLKNPRSPESLFKKSVNFLHTHTAQGDLGELILFTLMDVYIGAPKLISKISMKGAAGMSALGADAVHGQYIDGTFKVFLGESKLHKKFKPAARAAAKSMKSAQDKYKHELNLIDSNLDFPGITPETKAELMELLDPWADNDLSDVIHSPCFIGFTQPEIMTDEVQFIEKYKGKATDYIEDFYLKLQKKELSCDKTILLMLPFTCLKQLTAEFITYMGIANE

SEQ ID NO: 56201 - protein, 835 aa, Methylophilaceae bacterium 11
MSEFFQTLSERIITNEGYSQTKQLLFSSYVTDLIGATKILGKSDIKKLADAAQIFHKSGLKDYKDEGAVLMAMLLDLYGNDHPGLIPIANILFASSGDFPNIDLLTERYPNIDYRYSFDLHALNDFRRDLNTVEEMKFTLTDFQRVLWEHLVSGEDVITSAPTSAGKTHIILNYLLDNVGKSDGAFAAIVVPTRALITEVAGKLYELIKEQDLGKDIEICTVPRDGQFRAKTFFVMTQERLHEVMLKGDINFNYLFIDEAHNITDQSRGVLLHITIEKVLENSLPQIIISMPSDSYQDSFSTIFKEVKFKKQITKHSPVAKILMNVDTIGTNLKVSLFNENCSHTIPKGFKGTKFVDVVFKLGQGQNNIIFRNRPDYCEDMADDLTELVEHEIPDYTPHSSQVEAADYVENFIHEDYSLADNLRKGIAFHYGPLPSSVRIMVENLVKGGHINFIACTSTLAEGVNLPAKNLFLENPMQPVFGETSKPLEDVKLNNITGRAGRMLKHFSGNVFLFNHNKWAVQDYFDEKVDEEKKIPTYFKALNEELDSVLSALTGNYDNSQNDQYKHYSIANKLLREFASENLSNTIDADDLELTSHARKLLVDAVGKAHANLKVPTFTLESNPTVGYIQQNNLYEFLSSLDSLEAWTLPHPMSPKLRETLLSVCYKLNEFYIYTPKENDSIEFVCLIARKWVRGDSLKEIIKDQIQFNEENDISGSTNSAIRKIMKTINTDVMFRLANALRCYQLLLNNVRADRGLELSKANLHSYLEIGAYKDRVVSLINLGASREAAIEIDELLEPSVEIKNSADLIELLNSNALDRIHTVTRRELIGLLKH

SEQ ID NO: 56202 - protein, 299 aa, Elizabethkingia anophelis
MRKTLLDLIENTIIHQYDLPNSTAGISKTIFSIDDDKCFKTTNNNDFSEIIYNSIIEYSFNEFEIDGKDYDKLHYIALQTKLKYNPTADLKTKIKYGFLGEVILFSVLYTLFKSKPLIARGYFYNPLENSETKGYDSYHLIENAGQTELWFGEVKFHNNYKAGIKSVFKNIDKAISDNYLQTNVFSISNELNNLQWKGSKIETVIENWKENPHLSIIDEIKKHNMKLVYPVMLLYEEDGAGYDESIKNIPTHIQAEYSSTKYSLSIPYSIFFILIPMKDVKLIKEDVIKWIESKKPLMS

SEQ ID NO: 56203 - protein, 763 aa, Elizabethkingia anophelis
MDRIKETTDVIIQLNKFKSKQITDDAFVRSVCDYFDAIKSETLNQSDLKFLKYISNVAGIPHYYDQLNKFNNTAEIEDFNLNTFSSLLYESTLHTSETRKVHKYQMDILNQFVPNQRNRFFLSASTSFGKTHIVFEIIKKMNYANVVLIFPTIALLSENLERLTSDEAYSYFRQKYKIHTLSEVTEFGDNNLFIYTPERFLSFKEKNPSTIIFNFAFIDEVYKIDNEYILDEEVRENERDVAYRLSVFYALEDNVDVLLAGPYIEFYKQKQGNYNGSFDNFLSKNGITLLNYNQFEIVNKAYSDIKTKKHVEVDNELQFDFQTNSKTDRLIEIIRNIISIKENTIIYCSTRAYTESYAKSILDSGALDKHSNTSYSDFITHISNNFDKDWVVVKALQKGIGIHHGLVPKYIQKEIISLFNNDKLSVLLSTTTITEGVNTSAKNLIVLHSKKGDKELKKFDAKNIAGRAGRFLHHYSGRVIVLQNDFMKAIDAEPEGIKHKNYDLQAPKDEIDLFYSNDEYLSEADKRKKIDIKTEQDKRGIPDEIFNLYKVVSRFDKITIYDEIIKLNAVENESIKNLIKVLNYRMDIDYDGFQTILKVIRPIVKNSKLQFLIDYKGTNEYSTLTHLTHFYLEDGFLGSVRYKMNTMSVDKAISETAEFVYNTLKYQVVKYLGVFNIMYRFIQSQKTKKPFDEVAGIDKLLVKLEYNALTDNGRIASDFGVPSNVLDYYESDDNRRKSEIKSKFDNYEKSIFDKVEKIIKGSD

SEQ ID NO: 56204 - protein, 299 aa, Elizabethkingia anophelis; identical to SEQ ID NO: 56202

SEQ ID NO: 56205 - protein, 763 aa, Elizabethkingia anophelis; identical to SEQ ID NO: 56203

SEQ ID NO: 56206 - protein, 325 aa, Burkholderia sp. BT03
MNRKSSVSDLDVSKHIRRLIGPHLVEERIRRLTADVGRDAKFNAYFLYPAFRNGKPTVGPLIEMLVGEITAFCIAKEERRKAKLADRNLPYDAPAMNALARRARRLFMDASENSSRSGDGGELLLFVLIEHFMKAPIILSKMRLKTNTNMPVHGSDGVHAFWDDENNTLVTVFGESKLHKSFASAVADAAESVEEFVKNIDGRYDHELLLTMNHIDLDGFPESVKQHLIKFLNPFETDEGNRRRERFALLLGFDAKQYNLVASLNLHEAEERFRKLYESVAKKAIQTASNHLSKRGIDLESVDVFMFPIPSVDDFRKRFASALSE

SEQ ID NO: 56207 - protein, 849 aa, Burkholderia sp. BT03
MNNFGNALATRVAQTSRFKAAYEELQRASLSDVIGSKALLNVETVSKLARSALILAQASDVKNWTLAQDIAYALASLSLTGEQRQLCSHVLATLGNFPAADFLLPASTSRTLPWTLQLDEGLRKEDNTIQVLGKESVLTDFQADIWDGLNRSRYLSVSAPTSAGKSFVLQAFILDALESYDGFQDIIYLVPTRSLIQEVSASLGKSLAPLGEKVVVSSVPMIDDELNHAQSRVLVFTQERLRTALDRSHLEPAIIIIDEAQQIADEERGMLLLNCLEEIIRRSPGVRLLFITPSSKSAASMNGLLDLKRMLSIQSDLKPVRQNLIYVTFQARAKQISLRLHRPGLEPLDIGAYTAKRRFLSKNKRLIDAAIELGGGGQSLVYAGGPDSAEKIALAISEHMTEATLANADLETLSEFVAEHVHPDYALVESVLNGVGYHYGHMPSAISTAVEQYFRDNKLPYLVCTSTLLQGVNLPARNIFLHKPTKGKGNPISGSDFWNLAGRAGRMQKDTHGNVFLVEYEDWESKPVEENERQEVVSSLSHALKSRQSEIIDYARDPKHPSGTDDYQFVESVFCRLFTDAKLGRFDETVRRATFGEIMPDVAELRRAIFEQLDRVTLPIDVIAKNNLISPVRQQALFDFFDSSLKGGRYRHLIPPHPMRENAAELLTAVMRISRIYLEGVENKLENFFGWFSIHWMNGTGLKNIIQMQIDYEIRARKEKGDETPVNSGTVIRETLKSIDKFLRFHYVKYLGCYINILQYALASRGIPAASEIPAIPLFLELGASNPVMIQAMSLGLSRVAAKEVSRLFPSSPGAPALRLRLRSMSKEVQGRLPRLVLAELQKFGLVRA

SEQ ID NO: 56208 - protein, 275 aa, Pantoea sp. GM01
MIFLENDAMAEVSLFYLPFKTGHSDFTYFFEIIKQEILLNFAFKCSEVEGKIGSEDPTEVEKLFKRAIRRFSKHTAKGELGELILFTLLDVYLEAPKILSKLSFKTSRRVAVFGADAVHAQYVGNDLFVYFGESKLHKDFNGAATDAVISIKSAREKFRDEFDLIESHLDFPNMTDDLQDDILDFIDPYSENDHGNKILSPCFIGFVDSNSFSNSTNEDEFFESYIDLAKRYTVSYFNKLVAQGIEIKKSSLLLLPFSSTDELVQQFIDYLGIQE

SEQ ID NO: 56209 - protein, 843 aa, Pantoea sp. GM01
MNNFYYKLAKKITNSDGYIKDRSLLFKSYINLMVGDSVRIDKVTVKKLISTSQIFYYSDDEVLKKEGTVILSMLIEVCAITYNDIIPIANHIYYNSGDFPNISLLEKRFPDISFNFNLYTETARHLRLEANTVQQLAFPLTNFQKKLWDELRNGEDVISVAPTSAGKTHIILSYLIEEIISSDGAFAAIVVPTRALITEVSSKIYGILQEKRHEDKVEICTIPKDEQFLDKTIFVMTQERLYEILQRGDISFNYLFIDEAHNISDESRGVLLHITLEKLLEDSSPQIIIGMPSPQYVNSFSSVFRGISFSKRITSHSPVSKILISVTPKSRNLVIERKDTGDNIIIPKKFNGTKLSDIAKRLGGGQSNIIYRNQTNSCDNTADEIAKLIEEDVNNPSLEEAAEYIESFIHEEYSLANNLRRGVAFHYGPLPTSVRVLVENLVKEGLVNYIVCTSTLAEGVNLPAKNLFLHDPINRVPYKPSTRLEDVKINNITGRAGRMLEHFSGNVFLIEPEKWQYTDYFDETEKKEDKIPTYFNLMNKNMSDIISVLRGGAAIEESDNYKFYTVANKLIKSFSSDELHETFSSPEITLNKSDIEELRKSVKFAIESIKVPQFVLESNPTIGYIQQNKIHSFLSNVDNLSLWSLPHPKSDELYDRLLKICDKLIEFGIFNPTDSYSSSYIAMISRKWVKGFSLKEMINDQINWDLNHKPTKSKVKDDESSGGNINSSVRNIIKVINNDIRFKLSNAVKCYQLLLADVANLKGIEVPSVKLHYFLEIGASEERMMSLLNLGLSREAAKELHDKLPRGVSITSISDLEKVLENFSQNSLHAIMIKEIRHLISRG

SEQ ID NO: 56210 - protein, 299 aa, Pantoea sp. YR343
MITKLAPQLVNTHLIKDILKRVDVSIILEDGRRVDTLLIYLPSFNGRTNHPEFFDMISKELLHHFALTCQDIERKIKRKGEQAASILFDKALSKLSQQTAHGELGELILFTLVDVYLEAPKLLSKVSLKTSPQMPVFGADGVHIQYVDNKVRIYLGESKLYTTFTQAATKAANSIQKAKAKYLDEFNLIDTYLDLPQLDDDAEEELLNILDPFENTNIEDHIHSPCFIGFADQKLIEDNAVNDDFIQCYIKLAFNHISDYYNKLEKKGVDITTSTLMILPFSNVDELVSEFITHLGIKK

SEQ ID NO: 56211 - protein, 845 aa, Pantoea sp. YR343
MSEFYTKLSNRIISNEIYADSTSELFGNYIKTLIGESSKVSKELAKKITTTSQIFYKSNNDEIKKEGANLLAMLIDTCAEEYPEIIPIANHIFTSTGDFPNIRLLEERFPKVKFKHNFLSEAQFDFRRSLNNVESLNLVLTDFQKNLWDDLQDGEDVITVAPTSAGKTHIILNYLLESVLNSVDGAFAVVVVPTRALITEVSSKIYNLAKDRDRESEIEICTIPKDGNFSDKTFFVMTQERLHEVLLRGDISFNYLFIDEAHNISDESRGVLLHLTLEKVLDNGTPQIIIGMPSPQYQNSFTSVFDNIIFKKEITSHSPVSKLVMNVKPKGRNLEIERINSRDKITIAKKFNDKKLADIVYRLGKNQSNIIYRNQTNYCESVANEIAERIKSNENNDALTEASEYIKHFIHEDFTLAANLMKGVAFHYSPLPTSVRVMVENLAKDGHVKYICCTSTLAEGVNLPAKNLFIQNPFFKKKFGKPERLEDVKINNITGRAGRMLQHFSGNVFLIDQENWAFDDYFTETDKQKEEKIPTYFKLINDKTSDVKLALSGQYPGDDEQYKFYSVANKLIKAHDNGSLDVTLSAPEINLDKSTINALKVDIETAFLNLKVSSLVLESNPTIGYIQQNKVFEFLTSGIDLHEWSLPHPKSEDLFDRILKISSKLADHGVFLPSGSYTTRYICLISKKWIQGNSLKEMISEQIHWDKNSIPDGNNDDGDEDIKEVKVNRSVRNVINVINSDVRFRLSNAIKCYYTLFVLASRIMRSDAQSVKLHYFLEIGACDERMMDLLNLGLSREASKEIDEKLPSNISIKSLGDLIDLVKSERISQIHVVIRKEIEHLINRA

SEQ ID NO: 56212 - protein, 304 aa, Bradyrhizobium sp. YR681
MLSGDPEALDVHLSLVDRDVVIDGYQVKIHCHCLTVDGNGRVQPHRLAEFMRNAVADYAIPRSQLAKAKARDTKFNSTEAVTALVEQARRSFTDLAKTGEGGEMLLFLLAERFLKLPQVLCKMDLKTDSRMHYHGADGVYASVTPEGMLKLYWGESKIYKDAATAIKDCLASVAPFLIEPEHEDAGRERDLILLSDKADLSDPALTEALKRYFDKMSPMSKRVKYCAVALVGFDAAFYPGGRAQAIADEMKEAARIELKKWSSTIGTRLKKEKLEQVEVELFCLPLPSAEDFRAAFLKAMGQTV

SEQ ID NO: 56213 - protein, 868 aa, Bradyrhizobium sp. YR681
MSLNDLQGWLVAEGLREALDQLTLHTVVAELDNIVPPTDKAASFDWPRLLLAGSILAQSDQRTYQDAALRIATAAITLSDNEAIKDSGAVLLGKLSNFRAVSLATERGLLTADVEGRLGMALRIEAQHRQMDQSILVQSSGRWIQVNDFQQRFWSQADNYQWLSASAPTASGKTFLVLQWLIDQIRSTEMHVAVYLAPTRALVAEIEANLVSLLGARSGIEVSSLPIREKHDKAHEGGSRAIFVLTQERMHLLANAIGGAFKVDLLVVDEAHKIGDNQRGVILQDAIERASRSNRTLKLVFISPATQNPQELLADAPEGAHTASFESDVPTVLQNLIVAEQVPRKPKLWKLSARQHASLLPLGVVQLGSSPGSLKKRLAFIAAAAGERGGTLVYANRASDSEDIADLISQLIPEVPSDPELLELADLARKGVHPRYRLAPLVERGVAFHYGNMPSLIRSEVERLFRSGKIRFLVCTSTLIEGVNLSCRTIVLRGPRKGVGHPMEAHDFWNLAGRAGRWGDEFQGNIICIDPQDAQAWPDGVPERARFPIKRESDAVIEQGESLADYLDRRATTDLAEFEDPNQFEQVASYLLATFLRQGSIAQSSLAKRHNPAIIERLEASLANIAAQIAVGADIAARHPGVSALGMQRLLEAFRNYKGDVENLLPAAVDSQDSYDRFVTIMRRINQYLFPAFTPDGIIPLHALIVVQWLKGFSLSRMIERNIDYHRRNGRSFKLPVLIRSTMEMVEQIARFRAPKYLSAYVDVLNMHLAAIGREDLIDGDVDIGTQLEFGVSSRTLLSLIELGLSRVSAVALYEKIARDDLNKEDCIAWVRERDAQFEGMDIPAIIVREIRAKLLPEASAGAAASTS

SEQ ID NO: 56214 - protein, 315 aa, Kosakonia sacchari SP1
MDSVEKLKLIDWKELIVNKHTWIESRLVNHPSDTDAKIVSRIFTIPFSGVIQEHQPLVDSMADAIEHYVFDKEALSKMKAEGVTPFRKAAQFFGDTNPVKDGKYGELLLYILSEAILNTPMVSHKITSLSNLNDQVKGGDGVFFGVYRNNLSILIGESKIYKSFSGALDSAFDSLDRFTRSYTNGALGHELFMARTNVSNNFDFETMELIYRAFTPGDEIYSECVKTHPVLLVFEDNEIKKIEEKAVNKSEAENLFNVWLTTKKKAIKAAIDERLAKYPNVKPCFLDFFLIPMTDVGEFKKSLYRAIHGIDYKEN

SEQ ID NO: 56215 - protein, 885 aa, Kosakonia sacchari SP1
MSESTATTAINHKDFTTVFNSLIEHLFLRNRGEGQKIDLSDEAIRRATWLASLGSSGNENDKNIASAFGTLLYLYDMNNELYIKACYVLQSRAGNIVSAKHLAGLFDEENFLKHFSVSLDFELVNQKYLLEKKIPGENPIYFTHFQRDLWDKLENGENVAVSAPTSAGKSFVIKKYIYEHVLKSNHGYFVYVVPSKALINQVGNEMSRELKDIAIVMTTYKPLEEDKLKVVYVLTPERCMRLLDEKNNKEPEIVFFDEIQNIEDNSRGNVFENIIYRMTSLWRSTQFIMAGPYINNLHESLGKVVDINLVEQKTSATPVLQLKVILTVHKQKKSVSYKLISPVGETVLGEYNIGKALYSKLASSKGTALRYITSILDSKEQNIIYAPKKNLAEGWALAISKTDDEELEDNESDFIYDERIEDLCSFLEREIHPLYSLVRSLKKGVAFHHGGLLDVARLEVEDLFSDGVIKNLVCTSTLLQGVNLPADRMIVISPKIGDYELSHFDFLNLIGRAGRINTSLYGEIFCIQLVDEEWAEGKIDSNEIKEIQSAVLKKLNEHGESVVSYIDIYSNDIIDNQGDYKAINLASYLRSQFLVDRLHYEKIIENSNLTTNQIRVMTNRLEALEDDLKIPKDILYKNPFIDPLLIDQLYFLVETEGVNNWLMDRYPGTKSGSSDFNVDFKDMNYYNQYKSIIVRMNDIFNIETEINFKEDGITRKTKHYVSIFKLINDSHKWMQGRNYRYFIDNMVKIKLNSRNITVDYKKIDGITNFVTTHINTNLTFILVKYLSLWSDVISSFMSENERTEKAFFLNLSSMLEMGSYDPQVLEVMAYGINRSTAIELLRNERIRDGQTTEQFLSQYNLEKLSPLHRKYLQRAGFGSSRTKNN

SEQ ID NO: 56216 - protein, 293 aa, Citrobacter sp. KTE151
MATTVNLSNTDDLMNHLHWFEQKIQKPAAKSHRGVAINYLDLSERRDSFIRELKSTASSWVYSKNRYNAILNRELTSRNQDFQNAISYLHEIMSLKFRKGCPQGQYGELLLFNFIQHFFQAAPLLRKMPITTNPGLERHGADAIHYLDNGDKQIFFLGESKCYESKYKFNEALSSSVSSIFNSIQNIENELLLYRYDDFIEPELQAIADNLLKGKLKDPIFEFICLIVYEENKNTQAPSAPEIRKKIEECVEDRWNKTHSNLYDSFNLAYISRIHYIVFPSWSLSNLLNNFEG

SEQ ID NO: 56217 - protein, 826 aa, Citrobacter sp. KTE151
MNDRSIILSLLSFELDDFAIRLNLITGERKKLNRDLLINALNLLNKIANSTNNDDNRQLAMITIALIWTHCNENDKDTLRQILSPTLSYIGFSPSNKMMDESLKNDGVYSYYGSYFDKLKIIADELKNKITINQKDYILTEFQHDLWEAIDNNKIIGISAPTSAGKSFLLYLKTIQLLGKGATKIVYVVPTLSLISQVTTDLSNLFKDHNIRGVDILNSFEEGKENFVYVLTQERAISVFSQESIDSLDLLIVDEIQNIERADSENNDRAKILYDVLMDVRTDVEVSKIILSGPRLKNIGGLSFDIFGEISEEKKTDVPPVLSLTYSVSKKSDIYYINQYSPFSSLPISTPIQNVDLIKGIGASQYNSAFNSYLHSILKKLNDDSNIIFSPTTRQARKSAKEYCEVFPMIATTKLESLSLYLKNSVHKHYELAEFVNYGVAYHTSRIPMHVRKSIEYAVSQSYIKNLFCTTTLMQGVNLPAKNIIIRNPNLFVRKVETSVMLSPYEFANLRGRAGRLLTDFVGRTIVLDENSFESHREENETLFSNEYKEIKTGYHDLYLRDIDYINEKLDDSSLVFTSNSKSIITYIRQMFFRHGHEGISRLNNVGIFLDEFYIKKIISGLEDISVPRQIVMQNRYWDPFDLNELYLFITKTNMHIPSAIFKADLCDVFLSWLKIMRDNFNYYFTRYIGQVHDEKFLFGIAKSAEGWVRENSLCEILENRFPTYNNELHENLDKEIDKLTKHVSFGLPMLLKPAADISDSSSVISQIELGLYSEISRYLSDRGVPRETAIKIRKYHSENKLQALDLKRAVIELNEWELQHISHLL

SEQ ID NO: 56218 - protein, 301 aa, Streptococcus sp. GMD1S
MSHCHSEHKEISNNVHTFYIGFDLDDFGKISQVKKKFYDELFDDIASFAFGSHNVMKRIKEPQDISKVQREALRKMYNIPELQEASRYYLESDLVEDKYLKRGEFGELLLYHLLHEYFNADALISKIYFKDSMGLPAHGFDAVHVDSDNQILWIGESKLYSESSSAIDALMKDLEEHFRISFFDSEFVIIENRVHDSDIELDDFMKKLINPQTKVLDKLANINIALFAGFDSKSLQEFEDEESFKKKLESEINILEKKALKKIEEHPWNEHLNIFLFLFPIDNKKEFVKDLHLKLKGAQQG

SEQ ID NO: 56219 - protein, 710 aa, Streptococcus sp. GMD1S
MKNIKEILKYSELKNYEENFELIKYISSIIDTSDARKVIIHILDIWENVNNNAKEMWIDLIGRAGFYPYYIEKVCQEEQLTLSLQDQIKTEFFKSDYLPNIYFHQQQKEIEIALSNGNNIAVSAPTSFGKSLLIEEIVARKQFCNILIIQPTLALIDETRKKLSKYKGDYNLIINTRQIVLEKNIFILTAERVLEFPNLPNIDFFVIDEFYKICNRLNDSRIDSLNVALLRVMKHNTQAMFLTPTVDSLSEAFRERYKVAFFKTDYALVNTNVIEVRNRNNNLLSGNSKKNKLFKMLYKQEESSIVYVKSPNEAYKLAKEYVDYLRKNKIETENKKLDIFEWIDNNISPNWQLKEMLEHGVGAHNGALPRHVVTSEIDLFNKKKIKVLFATVSLIEGVNTVAKNMFVYSQHKGDNKIDFFDFANIRGRAGRMNEHFTGNVYVFIDEIADEHLTIDVPSVDQNPVSDEILINISSNEVKDIERKQRLEDGLDNEILEIIKNNLISVEGQKSLYRFIEKEQKTGGIDYLRWDGIPSYDKLWQTLYLGYKFLKSNDRIGFVQSRAVMSLKFVNLSLRKVIEEQYKYYLSEKRKDPLNSAIDFVLKFQKTEAGYEIPKILSVIDSIQRHVFDKLGLPAGDYSVFASLLENEQIDERLQFLIDYGVPSSAVKKIRNIPDNLIEDSHIIQYLRRNLSLIIRNLIPYEANLLEEAIR

SEQ ID NO: 56220 - protein, 301 aa, Streptococcus sp. GMD2S; identical to SEQ ID NO: 56218

SEQ ID NO: 56221 - protein, 710 aa, Streptococcus sp. GMD2S; identical to SEQ ID NO: 56219

SEQ ID NO: 56222 - protein, 301 aa, Streptococcus sp. GMD4S; identical to SEQ ID NO: 56218

SEQ ID NO: 56223 - protein, 710 aa, Streptococcus sp. GMD4S; identical to SEQ ID NO: 56219

SEQ ID NO: 56224 - protein, 315 aa, Thioclava dalianensis
MTPVLPEDLVNIVSGDPEELGVHLQLVQRDVLLKDCVARLHCHCLTVDGNGRVKPERLAEFMRNSIIDYAVPKSRLDDARARDARFKSGSAVAALHHEAIGTFTDLANTGEGGEMLLFLLAERFLKVPQVLCKMDLKTDSHMHYHGADGVYASVNENGLLKLFWGESKVYGDPTAAIRDCLASLAPLLVETDHERADRERDLVLLSDKADLSDPELTAAFRKYFDRTSPLSNRVEYCGIALIAFDADFYPKDDAKGIGEDILKAANDEMEKWVKNVKNRLSVEKLDKFDIQFFCVPVPSADGFRASFLKALGIKK

SEQ ID NO: 56225 - protein, 873 aa, Thioclava dalianensis
MKDTELFDWLTGEALRDDIIRLTQITVATEITNLDAIHESADPKNSFDWQQLLLAGSLLARSTERTHQEAALRIATAAVTLETSPEVRDAGAVLLEKLSNRRSVELAIRRNRIAPDLEGRLGVSMRLEANRRRFEDSILLESSGKWIGVNDFQRELWAGASSGAGWLSASAPTASGKTYLVLQWLLDHVRTSKTKIAVYLAPTRALVSEIELSLKELCQSDTGIEITSLPLTEVYFSSTTGDKKAVFVFTQERLHLLVNLLGEDFSVDLLIVDEAHKIGDNQRGVILQDAIERVSRQNPMMKVVFVSPSTQNPGELLEDAPNDMPKTSVNTDMPTVLQNVILAEQVPRKPKEWSLDLVWGDSPIPLGTLKLSNKPAGLKKRLAFIAAAAGGRGGTLVYCNGAAEAEDVALLISQLEGSEKTDDQELLDLADLARKGVHRNYQLAPLVERGVAFHYGNMPSLIRTEIERLFRDGKIRFLACTSTLIEGVNLSCRTIVVRGPRKGRGNPMEPHDFWNLAGRAGRWGNEFQGNIICIDPKDEKAWPVGVPKRSRYPIKRETDVVISSTDELAAYLENRNIDSLADLAQGEEFEQVGAYLLNTYIRLGTLSDAAFAKRHSPDTLRKLDRSLEGISALINITQDVLVRHPGVSAVGLQRLLEAFRKYEGNIENLLLAPSESVDAYDRYVTVMRRINANLYPVFLPDSLIPLHALVVVEWLKGLSLAAIIRKRIEYQQRNNRSFKLPVLIRETMSMVEETARFKAPKYISAYMDVLRLFLTEAEREDLIDEDFDIGIALEFGVSSITLLSLMELGLSRMSAVALYEKIARDDLDKEGCLAWINEHGPNFAGMDLPNLIVRETLQVSGLDDPEAGHEFSE

SEQ ID NO: 56226 - protein, 302 aa, Flavobacterium sp. F52
MKDSLKKLIDKTLILEYKLSHSTLGIDKTCITHKDLNDDCYKNVDAEDLNRIIYESILYYAYDEFQLLDGDHQKMFIKAFNTKFKYNYTATDLAKRRLGIYGEALLCTVLHHFYNTNTLVSRGYFYDIQKKSEVTGYDSFHLIQKGNEIELWFGETKFYEDCEDAIDSVFKNIEKAISDDYLVNTNFTTILQKKGNITDKSSKLYKILDHWEKCIIDSLADELIKNEIKLVYPILVTFNKINNDYNETIKTAIKHINDNYNHIKFDQITIEHSIFFILIPIDDVKSSKETIIKWIDKKEPLM

SEQ ID NO: 56227 - protein, 802 aa, Flavobacterium sp. F52
MDRQERTLNVVKALNSYNSGNLPMHKLLDEVCDFFDFIKDEELDDSDKRFLIYLSNKVGVPQYYDVLDKFNSSYTSSIEDENIGLSTFSSLFYESSLFTDEDSKLHKFQMDILNLFETQKQNRYFLSASTSFGKTHLVYEVIKKMKYRNIVLIFPSIALLSENLSKIKEGKIAFPIDYKIHTLSDIDTDYGLNNIFIFTPERFLSFLDKNNTSLLIDFIFVDEVYKIDNGYVIDDEAKENERDVAYRMAIFYGLSQYTNVDLLLAGPYIEIFEKKSPGYNPSFDLFLNDFKITKLLRNEYEIVKVSKTEIENVKAEINIDGVNFNFTKKKTKRARMQEILDRILLEDENAIVYCNTQANAEKVANEYERSNIDTDFFQAFIDHLKNKYDNRWVVIESLEKGIAVHHGVVPKYIQKEIVNLFNTKESNVNILTSTTTITEGVNTTAKNMIVYKSEKGAGTNGKPLLTFDAKNIAGRAGRFMEHFKGRVISLEEEFLNVINEVGNQIEHKNYQLLNERKEIDDEMTPIEYLNETSKQRLAEIKTLQEDREIPEEILSQFKVISKRDKIKIYDAINNLNAESHKRINTLIHDLNSGPFLVLNQIGFQEILDIIKELTIENNNLYFLIERKYNTKKGETFSVLIASLVSYIYNGYEGVYNYNFNRLMDNINKRAEDAIKKNKLFDIEKETRNAVNSAMRITSTLVFNTFKYQLVKYIGVFNLMYKFYISKHQNKDFADVIGIDKLLVKLEYNAFTPEARTASDYGVPQNIINYYDSNNESERRRLLDSFDNYEKQIYQRIKKIIEE

SEQ ID NO: 56228 - protein, 302 aa, Propionibacterium sp. KPL2000
MAGTGITPTLKGATFGDTFIEVQHPTSLGLLNSEQLRLFHLSVQNNRFNYTDLTKFIRRNLGSYVFSRAEIEDYRRSDDVESIALEAVERIRAQQGDGGLGEILLYVLLEQILEAPKALSKIELERAAGQVTSRCDAIHVLAPGGQAPTNCLVFGTSNVVGDIEDAIDQAFDRVVAIRNNQATECQLAEQTIFTKTTDPATANTIKDLLVPQRGANTGYDTAFSMFLGYNLGLAPGNYSNEAYRAQLDQKMRLDISHHASYITWQIQDRGLSAYSFYIYVLPLDDVSVDPGEIMTRVLNGGA

SEQ ID NO: 56229 - protein, 881 aa, Propionibacterium sp. KPL2000
MTNGQVNIGDVVFNDIDSNEFLRELYANLLHNYGLYRLKLTGCAPLDVDLEAALRFADLLSKSTHPHKRDVHRVWAQEIALLCQILYPENRYTKAYVPAIFTTLGNYPGLRQLGATSDAGILAAAFEAYQSEYLTVPGVQDMKFFAPQKKIYDRLATGEFSFSAPTSLGKSFIMRTFITSQVKAESRANYAIIVPTKALINETRSKLIGELEDELERHNYRIVSAAGDIVLEGQHHFIFVLTPERLLYLLISRPDLRFDYVFFDESHKLSGKNSRAPFYYQTVTLLQDRPNPPRIIFASPNIPNPEVFLRLVSPASESHKDKAIATRYSPVVQFKYLVDMDERQVLTYNDYAQEFTHLASLTDESVTSAALIQFLTQSTPTAEGRRGQTIVFYAGRQRAVEAAEEYARRLPLLNDRDLDALAKDVERDVHEDYYLCDLLRKGIAYHIGYLPPAIRERIEDLFRAGKLTTLFCTSTLLEGVNLPADNLVITTTKIGRPNMTPVDFKNLIGRVGRIEYNLYGNVFIITGEGLANKSTTESLLQTEIPKQKLSIETDSKVISKSMKEGIVDSLREGNVQFAKGDESYEVYEMKRKFGLILLRDIAQGRDSLVRHEFAPFLDGDTVRAIREAFVERADKQDDDINVSIDQAESLTDAIRAGLKYPALSGDGKFNYDDTLTFLERLARIFKWGTYDSQTLGKTSEDGSRFTLLRWYAVLLNQWMEGHGLRSIMNRALDYRRREGTIYILWKGPVAYDDSPAQRNIVFGDILKTIEDVILFSLSNYFLKFSNEYKTFHGVEQFDNDWYEYVEYGTTNPLTILLQRFGFTRESSTYIRNSLPNCLRKEEDQYFLNPALLESPNVNVRKEANEILFNVPEAFTWPGSVF

SEQ ID NO: 56230 - protein, 302 aa, Propionibacterium sp. KPL2005; identical to SEQ ID NO: 56228

SEQ ID NO: 56231 - protein, 881 aa, Propionibacterium sp. KPL2005; identical to SEQ ID NO: 56229

SEQ ID NO: 56232 - protein, 307 aa, Acinetobacter sp. ANC 3789
MEFNIVVSDDFIDICSNEKILIKENKKVLSFLNDFEDGKWRTSKFNSFIWDNIAETALNYQERKALFDKSQQKMVAAAKNLRLASESDEIGRGSEIAEIMLYAIMKNYYKALPVVPKIYYKQNSQDNAKGADSVHIVVNGDEYSLWFGEAKFFNSLNDSNFYQITNSLYNALQTEKLKKENSIILGVRDLQYSGLDEDLIGRITKDLSSQNSIDNIKKIINVPIMIIHECDITKGETTYNEDYIDAIKKMYRDKANSYFIKQFNKLNEIHLYNLINFHLILFPVPEKKRIVDKFVKQVEFYKEEAED

SEQ ID NO: 56233 - protein, 638 aa, Acinetobacter sp. ANC 3789
MIKDKATWQEKFLLEAFTVDIGGKEVVLHREQSKLLSGLLDGKNLAVSAPTSFGKSFIVDAFLQLRKPNTVMMIVPTIALADEIRRRLQPKFGKNYKIITTTDIELAEKNILILPQERALSYQGVVDHIDLLIVDEFYKASKQEKDSRSISLQRAMLEFQQIAKQRYYLAPNINSLTSNIFTKGIEFVSIDCNTVALDIDHTYERINRNFDKNTALFEILSKADGKTLIYVNSHASLNDVLTLLSENKDPIDHAFLTEFSRWIKKNYSSTWRLGYLIQKGVCTYNSNLHRSLSQIQLNVYENDFPLDVMVSTSSIIEGVNTSTKNIILWSNKLSTSLLSFFTYKNIMGRSGRMFKYFIGKAFLLEKPPEKTDLELDLVLQDEASLMVDDEYLREELSNDELQRIITFKREMANLLGVKYSDLIALQDLDASDASTLQKIGHAILVKKFSSKKLNLLNADSNFWESPLKDILLNVRPAGLGGSYTDIIHYILVVKDNWTKNIPELLLELEDYDLGIDEFFKFEKIISYNLASILKSFETVYNKKYGSQLNISGFIDRLSHVFLPKNVFYLEEYGLPRFISKKINDFKLIDLENNELEINEIIDHFLQIGYERIIDQIDNLDLFDEYVLKTFFTGIEVKK

SEQ ID NO: 56234 - protein, 471 aa, Lactobacillus mellifer
MVKLKFGSLLSGFWACSNMTQCAACDHLFKLVNSNYDVQEGVATKMKNCLASLPRDIAQKIYYIEEDDEFVENIQNDIVPLITKPLPFIAFIIDCLRKDSSLNDDKSIGMKSKRYYLKCKSFDLAKTIADFLFFTIIQNDNRDSETHEYIKRLSKSKINSFNTKGLSLIKASSPPKNFDLTSSNDNFDSVFEEVCVGNLNIPNPNNIHGFKLKNNLYEADYTQLIELLQNNICNYVYSRAEIDQLKKHIDFADVQRKTLLAASKLNIQSSTLGDLLTYLFIENEEKAPKLMSKIEFNNYKNDFDGIYLKKINDSYQIILGASKIHSSIHDGILDAVERIRTLISQSFHPSVLVSDFNFNRRFSVDDIKALKQIFIPMHPQYELEVKGFGIFIGYSMNLSCDINSLSSKEARIAINSQIHEDLKSTIFQLNKAIEDRKIQQYSYYVYLLPFNDAVNTSKKIMEKVLGKNENN

SEQ ID NO: 56235 - protein, 864 aa, Lactobacillus mellifer
MKTTNRIVMQEFFGDIMSNKYLKVLFSKLLDEYSNKVFGKDFQIDLSAKRDLMRFADLLAHSRMLKESSYHQNLSQQIIFMLENIFVDDISIQFVKQRILFSLNNYSFPNKELHTTQSGDALLNYLVNSYKKDELKIPGSENKIFIGDQKEIYDKMSRNNLSFSAPTSMGKSFLARTYIKNEILGNKKNNYAFVVPTKALINEISSKIINDLGNGLSQKKYRVIRSVGELNGYNQGNIYHYIFVMTPERLMYLLISFPSIDLPFVFIDEAQNISKHDERSAFYYNLIDMLEVKHSRIAFAAPNIPNPDIYLELISNNDKEKDARSIEFSPVVQIPFVINFIDKTIKIYNSINEHFQALNNIKENTLFDLIDSFSYLSNNTTQNLIYCNKIDNTIGLSVQYAEKLEDKNDVELDKLASDIKSEINEDYYLADLVKKGVAYHVSFLPKRVRIRIEKEYRSGKIKNLFSTSTLMEGVNLPADNLIITSNKKGNANLSPMDFRNLIGRTGRLNHSMIGNVFLAIMPESFSGRSNEQDYVELLGSSNEKQKLNTDLLTKNVVLLVKISLLEGDLTLKVFHKLSNWKYKTIRKFVLQYLNDIQNSRQSIVRKKFQHYITHQEEQEILTKLYEKYNDNFDNDVNISTDQTSKLKLMIKQGMRYPRFDDNEQLNYQEVLNFLDQMDSIFNWKQYEKGRIGNPNKRRWYAVILIQWISGVGLRNIINKAIEYKRYNPKNAIYHNQKYYDFNDSKSQKNIVINDTLNVIQNVLLFDFANYFLRVSKELKHYLNVKNLDNDWYEFIEYGTHDKFRIWLQKCGYSRESAYYIERHPEFFYNDNMSYYLSSMLIDVDDANLRDETRDIMYNHPEIFI

SEQ ID NO: 56236 - protein, 315 aa, Mangrovibacter sp. MFB070
MESVEKLKSINWKELITNSHEWIESRLVNHPCDSQAKIVSRIFTIPFSGVIQEHHHLVESMADAIEHYVFDKEALAKMQADGVTPFRKAAQFFGDTNPIKDGKYGELLLYILSEAILNTPMVSHKITNLTNLNDQVKGGDGVFFGVYRENLSILIGESKIYKSFSGALESAFDSLDRFTKNYTSGALGHELFMARTNISSNFDFETMELIYKAFTPGDDIYSECVKTHPVLLIFEDAEIKSIEEKAINKAEAERLFDAWLTKKKEAIKSDIDAKLIKYPNVKPCFLDFFLIPMTDVGEFKKSLYRAIHGIDYKES

SEQ ID NO: 56237 - protein, 886 aa, Mangrovibacter sp. MFB070
MAESTATTAINHQDFTSVFNLLIEHLFLKNRGKEEKYKISDEMIRRATWLASLGSSGNENDKNIASAFGTLLYLYDTSNELYLKACYILQSRAGNIVSAKHLEGLFSQGNIIKHFSSSLDFELTSQKFLLEKRVSDNNYIYFTHFQRSLWDKLERGENVAVSAPTSAGKSFVIKRYVYDSVISANDGYFVYVVPSKALINQVGNEMSRELKDIATVMTTYKDSENDDLKIVYVLTPERCMRLLNENSNKAPKIVFFDEIQNLEDKSRGNVFENVIYRMTSLWQSTQFIMAGPYIINLHHSLNKIIDLNLVEQTTSTTPVLQLKVVLTVHKNKKTVNYKLISPVGDAVLGEYDIGKALYSKLSSSKGAALKHITSILDADEQNIIYAPKKNLAEGWALAIAQTDNEDSELDEDNTDLVYDSRMESLCSFLENEIHPLYSLVRCLKKGVAFHHGGLLDVARLEVEDLFADGAIRNLVCTSTLLQGVNLPADRMIVISPKIGDYELSHFDFLNLIGRAGRISTSLYGEIFCIQLVDEEWAEDKIESNETKEIQSSVLRKLNEYGESVVSYIDVYTKDIVDAQGELNAVNLASYLRGQFLVDREHYEKIISNSSLTTNQIRVMTNRLEALEDILNVPKDIIYKNPFIDPLLIDQLYFLVESEGVNKWMIDKYPRVKSGVADPNAEFQHMNYYNQYKSIILRLNDIFEIEKEINYKEDGVSRKSSYFVSIFKLVNDSHKWMQGRNYRFFIDDMVTKKLTNKGISVDYKKVDGITNFVTTHINTNLTFILVKYLSLWADVVSSFMSEEERTLNAFFLNLSSMLEMGNYDPQVLEVMAYGINRSTAIELLKKQKIKNEQTTWQYLVQYNLDKLSPLHRKYLQRAGFGSSKPAQ

SEQ ID NO: 56238 - protein, 306 aa, Paenibacillus sp. FSL R7-269
MEWEKLVQIDEQWVSDHLVRQHNAEDTKIKVRGYSIKFSGNILDFNAISTFVAESIHKFVYSPGKIKELGEVKAVLQSQKYFGKKNPDTDGKYGELLLFLLVESVLKCPMVAYKITTLSNPRDQVKGGDGIFLGDYEYQPDKYHSACLIGESKIMDGFAASVDNALDSLDRFHNEKSSSQFSATEFMVAKQSLSGDLDIDYVYDCLTPGSEAFQKNILVHPVFLMYNTSSIDTIEKGALTQTMAEELIKEYFVDRGNEHFRLIQDKITKWENLQKVYLDFFIIPVNNVRKFRNTVYYQIHGVQYEG

SEQ ID NO: 56239 - protein, 886 aa, Paenibacillus sp. FSL R7-269
MKDNLCEQAYDHAIFSKVLDTMLYNYIAKNFNGTSKKIDMSELKKAGWVASILSDSKTDIHKQRAQIFASLLYLLYSDDVNCNKMSYIIFSRTGNLLATKFLSVLYDSNSHKNLSHIKFKHEFGTILDYEVGLKRDENTIDLNQESIVTTDFQRKLWESLLGQNNVSISAPTSSGKSFIIQSYIKYKFDILKKFNVLYIVPSKALLNQVSEQFRRILNKEIMIKTAFINTQVDYDNPKYEKVMYVLTPERCLNVLYQKNDSFSPDFIFIDEIQNIEDEEGRGVLLEYVLNDLSKAWPKTTIVTAGPNISNSDTLFSNIFNKECVENETSLSPVFQIKAIVSPDFIYNNLDLKVTSLQEKAQGLNISLPVDFNVKQVADSNSGTLMSKIVKRIADGEQSIIYSPRTDFAEKWALVHLNSLESKASNALRELIDYLKEEIHPKYYLVKCLEYRVAFHHSKLPELVRKEIESLFDSGEILYLYCTSTLIQGVNLPAKNLFLIYPKKRTDELSPFEFGNLIGRAGRIKDSLYGSIYFVAKNNSDKIIAEKYFAENYQKEVVLASTKSLKKDGFIENELKDRALDVTRNKSGHTITLLKHKYLSGENELETYLKNKGLDKSEIALIIDELESQLFNIELPYEVLKLNPSVDPMLQNKLYQIIKEEGIINWVISPNSNFYKKIRKVDLENYEFKDLSFYWQFSILCTKINDVFEVTKETYFKHNIKKLYMGNISHFGFRWLQNMSFREIIEEDINYYANVREEIDAENENDINKRINNVMKVHSKVITFTLVKYFKVLADILAYSLSEEEKEKYKLILSLPIMLELGTMEPIMIQLISLGINRSVALKVFNEFKKEHNYLERDVIEWLFTKGSNLQMKPIYIKYLRELGYIR

SEQ ID NO: 56240 - protein, 302 aa, Paenibacillus sp. FSL H8-237
MIDTSPFSKKMLEVLKHSKTYKVNNQQNNLELFTCPINANQFDYHRMVESLLESVADFSVSRRTKEQYQGSPMTLSQKAREKFREYKENKGELGEFLLFCFLEGHLNAPKILSKLELKTSTELYVNGSDGIHFLKLPSGNYQLIFGESKLYEDLTDGLRDAFLSINDFLKEENQKGKEKSGIRYEKSLLSASVFKETWSKEEEDFITQLVYPTNKQPFEVDDAFGIFIGFEIELEKYQRRLPNDKFRDMIDDHVNKIVEMKIANIEKYIEQHELFGYNFYVYTMPFLDIEISRTKILESLIK

SEQ ID NO: 56241 - protein, 492 aa, Paenibacillus sp. FSL H8-237
MTLLNKLVDRALHDPYMSGLLNKLEKQYASYFISGKVKIHNLTEKEYLDLLRFADILCRSEKYEARNIAYKIVSLLHVFYNDDQMFKLQAYNVLIKLGNFPSIRIVLGETKVKSDEVMLDQIIKETFQAAPGSNNVFTDTQYKLFEKMKDSNHFSFSGPTSFGKSFIFESFIKYLIEKKNGSDNIALLVPTRALINQVSTKLKNVINDNKYKILTKPMVPLLYKKNESKFIFVFTPERLIAYLSENNPVINYLLVDEAHKLLSETDTRAPLFYHALMIAKRKSINLYFSSPNVPNTDIFLQMVGNSVEETLSIKENSVAQNRFFIDCIQKRALYFSENGEENVLEYNGYASDPHTNLKNAINILGEKTPNIIYCNTKDDTIQYALEFSKTLQKRSNSELKELINLVENTMHEEYYLVDCLRKGVAYHFGGLPQRIREKIELLFQKKIIKNIFCTSTLLEGVNLPAKNIFILSNAIGLTKLSNGIWCTKIPIR

SEQ ID NO: 56242 - protein, 284 aa, Ralstonia sp. GA3-3
MEGVYGDKPQRLLTQLFPIAGAPPGSSFCAGFELEQWRCDALADHLMDWIADYALAEDELAVRHTNMYVRLKEAAARVYSSDKYRKRGEVGEIIQHAICRDFFDTIPFAPRVFYLTASNDVVKSFDMVHVRYVDKTNIELWLGEAKFYSSGAEAVASAIESIRAHIDAGFLRNEKLLLGPQVSKTIPRHEEIRRLLSRQTSLDELFSAAVFPVCIACDSEAVAMRDSQKAQYSVDVQEEMEVLLSKLRASGLTQHIRIVLIYVPLGSKELLADAFDARLKGLAR

SEQ ID NO: 56243 - protein, 687 aa, Ralstonia sp. GA3-3
MQGGALKKAVFQVMRDAALAINESGEDDPALLEVVPRLANLMATRQELESFREVFSSLARATGLWNYIDKSTADGPEALIAEAVTVPELDNVTLHREQVAALNGLLSGQNLILSAPTSFGKSLLVDALLATRKYRRIAIVLPTIALLDEFRRRIKRRFGDGFHVVMHPSDQSTDAPTIFLGTQERLINRADLGKLDLTVVDEFYKLDPARRDERSVMLNAAVHKLLGRSRQFFFLGPNIDGVKVSGDGRWNFRFFRTRFSTVAVDTFDLHHVEDKRGRLLEELAEDEHWPALVFVSSPDKANRLAVEAAQAMAVSDESAAFASWLADNVGTRWPLVEAVKYGFAVHHGRLPRAIAAQMVRLFNTRALPVLFCTSTLIEGVNTAAKTVFIFDKAINRARYDFFTYSNIKGRAGRLGQHHVGKVFLFNKPPEQIETEVAPTLFADEDDAPDDYVVYLDEPKRADVVDNRVGALGNALGLSPVELRLAASIGLDDAAILKEMVERSLRQGRSLVWHGVPKYQDLVALTTVIGSVRKPSSFGLRKMTQLPLFISRLRAIKSMRDFLRWYDESYQGDLEQYDNVFKFLRTCEYGLPQIVAVIELFAKKLRPEVDYSVLIQGLSRWFKPEELKDLDEEGIPIQIAERFYTHGDTRQHVIHRLTQAVRQSNSAITAFERQWLIGALELTVSSRP

SEQ ID NO: 56244 - protein, 299 aa, Polaribacter sp. Hel1_85
MRKALEDLIKKSIVYKYDLPYVVGSVPRTIFSTLDDKCYAVSDNDSLIKIIYNSIIDYSFNELDFTERELEDLHTIAFQERIRYDEDDSDATKQKYGFFGEVILHSILKVFFGTQTFISKGYFYNPLENSESKGYDAYHLIEHDSKVHLWFGETKFHQSYTQAVNDVLSKIKNSLSDKYLSKNLLALRKNKDNLNLKGSKIEKILIDWTENPNIKIIEEIKQHSIELVYPVIILFQQNKKGYDESIKAIPKYIEEKHKLEKYDLSIPYSVFFVFLPVEDVKLVKSEVIKWIESKKPLMS

SEQ ID NO: 56245 - protein, 763 aa, Polaribacter sp. Hel1_85
MDRIKEASNVIIGINKYRENQIEDYDLIKIVCKYFDDIKDEEISEADLRFLKYISNTVGIPHFYDLLEKFNNETEINNFDLNTLSSIIYESTLNLTSTNKVHKYQKEILELFKPNQLNRFFLSASTSFGKTHIVFEIIQKMNYDNVVLIFPTIALLSENLQRLTSEDNYKYFLDKYSIHTLSDIEDLDDKNLFIYTPERYLSFIEKREEEIDFDFAFVDEVYKIDNDYIIDEEVRENERDVAYRLAVFYSLKKDVDTLLAGPYIDFSRPNDNNYNRSFDRFLEVNNIKLIDYNNYEIVNKTYNDIKSKKNYFIDDDLELSFEKTSKNDRLIEIVQAISNINENTIIYCYSRNSVESYAKTLITSKIFENHNSGDYVDFLTHISNNFNKEWTLIEALKNGIGIHHGLVPKYIQKEIVSLFNNDLIRVLISTTTITEGVNTSAKNLIVLHSMKGTKPLKKFDAKNIAGRAGRFLYHYSGRVIVLKNDFMKAINAEAEGIKHKNYDLNSPKDEVDLYYTDDEYLTDEDRLKVEDISSKQIERNIPDEVFQLYKVVSRLDKIVIYDRIKLLTDLEINAIKKLIRFINFKMDIDYDGFQVVLNIIEPIVKNQKLKFLIEYKGESGQYSTLTHLVHFYLTGGFRGSINFKLGKGSTVDKAISDTSEFVYNTLKYQVVKYLGVFNIMYKFYRFQVTQQPIDEVSGLDRLLTKLEYNAFTESGRIASDFGVPTAIVNYYENSENSENIKQSFDDYEIEIFKRVEKIIKGEN

SEQ ID NO: 56246 - protein, 349 aa, Bacteroides sp. CAG:144
MEFGLRTILDERINESNLKAYCVRFDFGLCQIEAFAEILLDALVDYAYGFHAGILEQYDRRVLKEAAKSLYKIQGFVDAQKLYLENDSVLEISEDEKSEEQKKYEEQIQKKGEFGELLLHTYLRDYFNTVPLLSKIFLKDTDGFTVHGFDAIHIGKDLTDESKDSLYLGESKIYFRSSGNSGASGVKDLAKDIECHFKKDFLYREFSLVAKKQHNFLPLSDYSDKNTISQYEEFLMNKDQWIEKLRNVSQMKMSLSTLLDSVTIPLLCTYESDLFKHFSTIDGDEFKNEYEKEVQSLQKVFNNQIGKIKKECGEPIRTDLNIILILLPIPSKKELVTLLHKKIWAQQNA

SEQ ID NO: 56247 - protein, 733 aa, Bacteroides sp. CAG:144
MHNIDEYIKYLEESSIIDFSICFEMAEMCSAKIDSDPAFSRRLCINVLNNWAKIPEGCRIIWNSIIESLGFYPYIQKEQIKLDSLSEEMRYGMSESHFLSGKFHHDEQRRIISKIFEGKNIIVSAPTSFGKSLLIEEIVASLKYKNVVIIQPTLALLDETRKKLSKYSGKYKIIIRTTQEPSKTKSNIFLFTAERVCEYLYFENVDFLIIDEFYKLSGGRDDERSSALNNAFYKLLKLHNPQFYLLGPNIDKISDGFARKYNAIFYKSNYSLVDSNVVDIYNSISDESSKNREKKLFELLISLSKEQTIIYCSSPDRVRSLSKKFYNYIRENEKNENVINLPIIEWIIENLSAKWSVNNILKCGIGIHDAALPKHITTSIIDYFNSDKLKYLFCTSTIIEGVNTSAKNVIYYDAKKGHDIPIDYFDYSNIKGRAGRMMVHYIGNIYNFNVPPEKVEINVDIPFFQQNPIKDEVLIQLDENDVNNKQSNQYLEIKTISDKEKEVIRRNGLSVKGQLHILNQLRSDIHSKANFICWNGTKPKKVYLDYILKLAWDNLLSESESKTITFNQLSYLTHAYGVWETPIKKLIEDNVKYKINKYKESHPNDEIAEQTLIGYEDQSIKLILQVVRHWFEYKVPKFLSTINSLQEIVCNEIGIQPGDYSQFASIIENGFIPIHLTLLAEYGIPHSAIRKISKFIPAAIDDENLILYIKDHKLHLIKSLIKYEQDKLSNLFT

SEQ ID NO: 56248 - protein, 522 aa, Clostridium sp. CAG:265
MHRVVKINVIGNIGTGMLISLKDDMKHDVILTVCHIFGENNEDEWEMWEVGIDDISVTSDYYDTEFEVTDVLYKNGDAENNDFALIYIKKFKKDIDYENPYLPKDEECILNKTVTIEGYAREKENNASRVIEGNIYNFTDDKKTFYRVNYMEKDRVNDLSSVEMNRGMSGAPVFLKDENDIFVGMQKMVSSTKSTDGILGVFTYKYCLVQIKSLYKVDLPLITKEKNRLIRNDSLFRFIHVIQQEFNIKPNSKNHIGASIEYKDIEELRGHFLNELIDTMIDWVYSSDRFKEILAKIVEDGKSEVAAYSQIHNKIHKKFRREIDGKLSALGQIGELLLSHFIQRYLRAVPILRKQEIRAVSSIEHICKNAIHYKKENGKNIIILGEAKIYTSKYNFNEAFKESIDSILKTYKNYSDEKELYIHEDFVDKDMNDIAESYLNGTMVKPQVHLVSITIYNEDQQIDIIDEDEIKKQIDGIIKERYSKFSDDYIDVGKYPILNRITYIIFPVWEIEKLALQYEELL

SEQ ID NO: 56249 - protein, 843 aa, Clostridium sp. CAG:265
MKEWLEIEYYTIASKAKFINKQVEVDHKLILKTIRCLDYMTTMKEKPSKEYIITVIALMWEYTNKQEYDLKNFIIKILSRIGYSTSAIVIDNEFDKDECKFFKPKSVFDMFSLTAEQSVNEISVKDKTFLLTEFQKSIWDAMNDNKIIGISAPTSAGKSFVILLKSISKMIKENLDIVYIVPTLSLLNQVMEDYNKMLKVLGIKNYRISNSFDLNSLDSINTIFVVTQEKALFAFSNEKKKFDKKIILISDEIQNIERITNDDDLRAKILFDTLIEFKYKKNINQIIIAGPRIENIDKLGESIFGKNTKELTTVVSPVLNLTYSIRKVNDDYYFCQYCALSEDTYKKKIEDDSLIKCYGIDDYNDQYLKYLNTFVSRIGNNEQNIIFAPTSKKACEIACYLSEDKKENCVSNKLKELIKYYEDTINTNYAMCKSLEAGVAYHHGKLPMNVRRTLEKAISDKEINNVVCTTTLMQGMNMPAQNVIIRNPHLYVRKKKDSGELSSYEMANLRGRAGRLLKDFIGRTYVLDESSFENVEGYNQIDIFEDVTTTLPSGYGEKFMEHRDDITNTIQSMNFIDSTMIKYGYLVAYIRQSVLRYGINSQKHLKEVGIELTVEELDNTIKNLKNLNIPKDICYKNRYWDPFILNEIYINRNEFVNKLPIMPNKKGAKYRLEKLMKWIRDNKKTHFMYEKYVPQLYRKGKMRSMLCSNCIDWGKEIALNDILCGDRYEGEQASENIDQTINLLERVVSFNIPLLLKPIFDIVDSDNLFLTCIQTGAYNISTRRMIEIGIPRETAIYLNRELFTNVRMDKIEEEKRDDIIMNIIKENINSLPYWIKVQLEFMI

SEQ ID NO: 56250 - protein, 475 aa, Clostridium sp. CAG:568
MIFSIGILAQIILSVSRGLNNGECIDSLISSITGTSDFSYIERSRYTRILSCEENLPTKIKRDTNDIEKVLGKTGLRDIATNLENRFSMKMDSFGRLRIVKAIIWCLSNESCQLGDKIFRWSGKTRKEVISTKAILDFWAFLAEALTYCYQIDNKHAENYGFKIVDHIEEIEKAVQTTVAEKAGREPYLLPKSEVDKVFHLESTRSIGKSHICITFHVLDDDGDSFDYSKLKAFISRNIKRYVFSFVKMDEIENAEMDISQQANADISKIVHEKKYDFSKEMGDILVFSFCEGLKGYPKILTNYEVLKKDLTNEYIGNYGMHFQLRDDRLILIMTSSSMQTKLSDAVKECIERSKIMAREKSAVKGLLSPALLKQTTDEETASKLTEFLLNGDSNSAKYGYTLFIGYSFDSSHGSLKEQIEKDMAECVQYLESEIQSDSKMTMREIDIYLVPFNDADEDPQRILKDVLGLPKEGM

SEQ ID NO: 56251 - protein, 248 aa, Clostridium sp. CAG:568
  MOD_RES (243)..(244): Any amino acid
MTLIDRILDNISKNADAKSAIDTLFRKYGEQVLNESTIDISEDEIGLCLRIADIFSKVPNESDDSEHYHSLAQEIIYMLKCLLPNRKDVDLVSDSVLSSLSNYPVRKNMGLSEEEKNYGLLRLIGEKIKMGSLEIPGEKGKFFLLPQKIAYDGFKNRSFSYSGPTSMGKTFLMTTFIKQRIDEGHDGNFAIIVPTKALINELKGEVIREFKNEILEKNYRVISSANDLQLEAEHNFILVMTPXXSYWS

SEQ ID NO: 56252 - protein, 118 aa, Coprobacillus sp. CAG:698
MDQIFDKEEAELLKGYILQKPRKPTETIFGIFIGYTITYDGTSDTNDVYAKKVIEENIKQVMELKAYIIKKIKEYRISNYEFNFYFLPFHNAARDRKVIMKSLTSGKSKLEWGEIRNG

SEQ ID NO: 56253 - protein, 864 aa, Coprobacillus sp. CAG:698
MDKHNLSYYLLDEINNDLFFRKKYNDLLVAYSKSLFNNCFEIYENEYAMLLRYADILSLSDNEKHQNMAQQIVILLSYLFPNEKEVSFFKHSIYINVSNFASVSSFNVENEQYCYADILRTIEIESHKIMNKIPNTDKEFFDAQRIVFNEIESNQFYSFSAPTSMGKTFVITNYIHNKIKNGSKDNFVIVVPTRALLFEIANKVIHEFSDVLGVGKHKIVTAIASLQSKERFIAILTPERFYYALLKHPEFQYGFVFIDEAHKISDKDKRSIIYYKILDMLKERNNVRIYFSSPVIPNPDIYLELTNFYSLSTNDATGQAFEFSPVLQNKICIDLTNKKYSIYNNLSNDIVECGDLPSEITNKMSALLLIGKGKRNLVYVSSAKKAINYAMQLSKLVLLDESKCDKNELEKVAKLIEQKIHKEYYLAKLIRKGIAYHIGALPAEIRLNIEHLIRDKKIQYCFCTSTLLEGVNVPIDNLFIFDYKKASSKMSKIDAFNLMGRVGRITLNELGNVFLFIGEKNEKTYYEQVLLNPLPNQTLLPSDALKLHHKSDIVKILLEGKTNLLHSDEKFKDKKFNESTYEYATKCLNMLLYDICSQNDSYIVRDFRKNKVLSPQNIIDIRERFKSIVSKNDDINLSAMQKKSLYIEIKEHNLNYPDSFVYDDCLEFMRKLSRIFQWNIYEKGTLGKGESINYYTVILIKWMQSSGLCEIIRDTIKYYQSHGGNLVFYEPIYHLEQYDDSEKHKNQLINDVMTDLEQVINYKLSIYFLCLSEAIVEIHGKDALINDWHEYVEYGTCNEYIILLQKYGFLREEALVLLKSIYKEYIKCENKSIHISKKILEMTNDELNYSLKTVLINYPEIFVD

SEQ ID NO: 56254 - protein, 315 aa, Eubacterium sp. CAG:841
MTDLKNTSFSDGFGIFNKVYDVEFDIVNKNRLRLFMLNTENKLFNYDELYQYLLSNITKYVFDRRKNAEIETNPIKRNAATLEALSHFRSITSEQDKGAGGELGEILLYLFLEQDMKAPKLFSKVELKTSAMDYIKGSDGIHFKFRETLDGKKILQLVIGEAKIQNNLDDGIKAAFMSINTYLTQNIQDRNLLDTHLMNQLVDEEEAKILKEYILSVPRKKKETVFGIFVGYSLEYKGGGDTSDEYDKKAIEENIKQVFEYKSKIINYINKYRISNYEFNFYFLPFHDAMRDRKAIIESLTCASPHLKWGDIKNG

SEQ ID NO: 56255 - protein, 863 aa, Eubacterium sp. CAG:841
MDSLSNLILKNILEDQELQKTYESLLTNYAKSLLENISFEFNDEHRILLNYADLLSLSDEEKHNNIAQQIVIILSQLFPQNDEVKFVKESVYQNVSNFASYSLLKKRGMLSNAGYEFLRELEVEQHRIENLAPDAENSLFDTQKQVLSGLHRNQFYSFSAPTSMGKTFVIKMFIKNKLRNGNYENFVIVAPTRALLSEIANNLIIDLKDVLGLNKHKVITNIAAVNSEEKFIAVLTPERLYYSLLKQSDIRLSYIFIDEAHKISDKDKRSVIYYKILDMLKGRSDASIYFASPIIPNPDIYLDLTDFYTQSDNQSAGRAFTFSPVIQNKIYLDFQGNEYSAINNISGSIISCGSLAGFSSDKMRALITLGRDKCNLIYVSSANKAVDYANQLMDLLDKDNTDSDIYKELDSVARQIEEKIHEKYYLANLVRKRIAFHIGALPAEIRSQIEQLLRKGYIRYCFCTSTLLEGVNVPVDNLFVFDNKKGFAKMSIIDAFNLIGRAGRVTLNEFGNVFLIVEKVNQRNFYNDVLLKQLPEQSLLPKEALSNRHKRYIVETLLEGRTNLLQEGEKYADHSFTEITYDYASKCLNMLLHDLCSKRDSYIVRDFRKSGALQPQNIIDIRNMFSNIVQEDDDINVSAKQKESLYRAIRQSDINYPRSLEYQDCLSFLRKLSEIFQWTVYEKDTLGKGDRLSYYAVILTQWMSSKGMHEIIRGAIDNYERNRGKLISYDPVYHLENYNGSIKHKNQIINDVMKDIEHVINYKFSMYFLRFSEAIIKVRGKDALVNDWYDYVEYGTNNDLVIDLQKHGFTREQALRLLRPPYNVYVNNANGEVAIDLRIEDYVSGELKQAIEIVKINYPEIFN

SEQ ID NO: 56256 - protein, 312 aa, Ruminococcus sp. CAG:579
MSESISATIKNSGLTLDSVFVEVQHSEGLNLPKANHIRFFHTAMRGNRLSTDNLQVFLRRNLARYVFSRAQLENYRINDDLDSAVSEAMRIMAENGGSSAEGTGNMLDEILVYAFLEEKLKAPKLMSRVELYTEMAQFRSECKGIHLLSPSDLPQNTKFQMVFGASNIVDDVKTAIDRAFETISKIDSHESREILMVQKTVLDQFFNQEEVALLSDVLIPQPGKPETYDTAYGVFLGYQLGLNPTGRGDDFEALAEQKMLCDIREHAGYISEKISAAGLTGHSFYVYIVPFNDAEQEKTQIMDAVLRGGAPI

SEQ ID NO: 56257 - protein, 890 aa, Ruminococcus sp. CAG:579
MNQHEKMRLGDVLFQGIDENDYLNELYKNILYNYAITVLQITNIKQLRGVNVDDALRFADLLSKSTHVEKADSHKIWAHEIITMLLTLYPDDEVVHYYAGSVLTSTGNFMGRKLVQSQYVEPTVMDELFSTLSDLYLTVPAAPEKKFFQQQRKVYEHLDDACFSYSAPTSMGKSFIMRMFIKEQILAGKKKNYALIVPTKALINEVRSEIIRNDLENLLDENQYHVVSSANDMALETHPDHNFVFVLTPERLLYLLNDKPDFVLDYLFIDEAHKMTGRNSRAPFYYSVVDELSRRTAKPKFIFASPNIPNPQEYLSLLASGEYDKQNAIASAFSPVVQFKFLVNLKTKQIYIYNDHLKTLEYICSINANPEDGVIPLMGLFYKNSGERTSRMIAYFSSKDKAINAALTFAELQKQIDGGTQKQIDPELAELARDVRNQVHRDYFLAGLLEQGIAYHIGYLPSAIRMRIEKLFKDEKITAMFCTSTLVEGVNLPADNLFITSYYSGRAQMTDVDFRNLVGRVGRIQYNLSGNVFMISDETRNNKQDVYLDKLKSGIPDQHLSLVQDLKPKHKKRIIEILLSGSSVIDKYNDDQPEEEYIMMRKFGLILLKDILHDNDSLIQQEFRKYMKDGDEERIKNIFSQYIPIIDSDINISLDQTRKLRAAISADSTFAYPLPEPNGSFNIDEVFGFLIRLGDIFDWKRYEYSTLGKCDEDGDYTKLRWYAVILVQWMEGKGLNYIMRRAVEYQERHPEKFWINRYTKQYYDKNSLEHRNIVFANTLEVIENVILFSISNYFLRFSNEYKRVHGEKSLNRNNWYEYVEYGTTNEVTIQLQRYGFSRESATYIKAHSQYFTVDGEGNVHVKNDLENCGDNEVVQQIPDIRFNTPELFVE

SEQ ID NO: 56258 - protein, 314 aa, Ruminococcus sp. CAG:624
MNINNTSYSDGFGIFNKVSEEKIVNCQNNTLRLFMLNTENKLFNYDELYEYILPNVVKYVFSRKRLAGIEDDPQKQMTIILEALSHLRPIENEKDKGAGGELGEILLYLFLEQDLKAPKLFSKVELKTNAQDYIKGSDGIHFKFRKNAQGEPIMQLIIGEAKIKNDLKEGIKEAFKSINTYLTSNIQDRNLLDTHLMDQFVDEEEARIIKEYITAIPRKPKETVFGIFIGYSIEYSGTSDSNDEYDQKIIEENIKQVLNLRQEIINQISKYSVSNYEFNFYFLPFHDAMRDRKTIMKQLTRGMPHFSWEDIRNG

SEQ ID NO: 56259 - protein, 864 aa, Ruminococcus sp. CAG:624
MDKTLAEYLFPDIENDQFLNSQFQELLIDYAKSIVIGKRTEYTNEYKSLLRYADVLSLSIYEKHQNISQQIVILLSHLFPNESEVEFFKRNIYKNVSNFASANILEKDKVPNEQLEVLRQLEIESHKISNNIPGTDKQFFDTQKIALNSLEKNQFYSFSAPTSMGKTFIITNFIRKKLKTGSHDNFAIVVPTRALLSEIANGIIKEFADLLGEGRHKVVTTMASVQKDENCIAILTPERLYYSLLKLPDYKFNCIFIDEAHKISDTDKRSIIYYKILDMLKMQEDISIYFSSPVIPNPDIYLELTNYYSQPDSSANGRAFVFSPVIQNKLYIDLSNSTFAIYNSFSKALIPCDTLPTTITDKISALLQLGKDKCNLIYVSSAKKAIEFAMQLCQVIPDDSITIEDKSALEFAAKQIEKKIHKEYYLAQLVRKRVAYHIGALPAEIRAQIEGLIRKGIIKYCFCTSTLLEGVNVPVDNLFIFDNKKARSKMSITDAFNLMGRAGRVTLNEYGNVYLIVEDKDVKKYYDDILLKPLPRQELLPSKAISKKNKKYIVQTLLSGRTNLLEIGDKYKDKGFTETTYEYSAKCLNILLHDICSNNDSYIVRDFKNDQALTPQNIIDIREIFGVITEKDDDINISARQKESLYKAVREQHLNYPSSIAYDTCVDFLKELSRILDWKIYEKDSLGKGEKIRYYAVILNQWMEGKGLHEIIRGAIKHYQTNGGSLVSYEPNYHLEKYNDSTQHKNQVINEVMKDIEQIINYKFSMYFLRLSEAIIEIHGEKALVNDWYEYVEYGTNNNSVIILQKYGFLREEALELLKPPLLDHIKFEKQRVIIKNSIMDIASQDLQDKIATIKINYPEIFSD

SEQ ID NO: 56260 - protein, 539 aa, Pseudomonas sp. FH4
MDSSNAGGVAAKLGFLYQDCAAALFVTQMLLNKKIQAVRCEVTDDIDILYDTHTEFVQVKTSDKPRWSVSTVTSRTRGADKKLIANSSIVHKSMQCAFTPIEKCKFRILSPRDCKAPLDYLEIELSKRDGKPGRQSLIDELDVKLRKYVAPAGNSISDWVDSCSWEVIPSLRQVELTGLSNIRNAALNLYGVILSSDSMVESIWVNILVAMTKRSALDRRVYVEDDKTYHRDNFLAWFKAEVLFYDRGNSHCKVYVHRKLPDILIQLQAPFLSPIPTRNGLALHQRYQMGQYRYEHIAKNICCWFDELLLRPGEIADFISSTATEKYKLLRSRLADNARDLERFLGNALLHSVMRLRHNSQPIPATLYLDSKDEMRVFENVHIVQRAKGGDELWLGISKLTKAKTLSQVLNDLRDTLYNDIVSGLDGVREKVLDVKEDSYLLNHDIDDILDTSNSFEDHLERLRFVIFFGYESSLLTIPETKGHEANLYQEAYDLFVDFISDITKSPEYSQFNFELYLYPAPSFDDLCGLVEKKMRDDM

SEQ ID NO: 56261 - protein, 729 aa, Pseudomonas sp. FH4
MNRIYDTARLLLETEGTSAFSYLHAADKLLSNPVSLHMGRDLVIRALDARLKFTNYTPLLRNLVRKSGLYPYLKKEFQEVTVSEKAALGIYQTPFSDEIVFHSMQFQVFELLRSGRNVVLSAPTSMGKSAIVDSIIGLGIVSRVVLVVPTIALADETRRRLQERFGEFYQIIHHSSQEANGDKVIYVLTQERVNERQDIIGIDFFVIDEFYKLAFQQRASGKIDYENERVIELNIALSKLLKASKQFYMTGPFINSVTGLASLGFEYTFISSDFNTVALDVESFDLSPNDEEGKEEAVLSIADLCRGEATIIYCKSSAVAGGVARSLAKHGFGTEFHSPHLDWVAQEYDSDWDYCVALRSGIGLHFGGLPRALQQYTIDLFNQGKINYLICTSTIIEGVNTIAKNVVIHDNRDGNFSIDKFTHGNIKGRAGRMGVHFVGKVYCLESIPQDSFNQEVDIPLGIQDDTTPMNLLVGVQPEHLSDYSQSRFERDENIDEFGVDLLRRHSSFTLEAFRELYSYVEMLFEESFQSTIFHWMPSGEFLNVLAEALTRFQSGALRRVRIPTKNSSVIHAKLTSYLYTPQYAEYFKSQIVQSKARLEKGEVDNLSTCINDDLKVVVNILGYTVPKLLGILEDVVKLHAKRRNINAKIDYSKLRGVFEHYHLPSGLAGLEEMGVPVQTLQRLNTLMDAPHDLDVDEMAQYLRNNEDRWRGLGTVDRSFLTRTLYPSSR

SEQ ID NO: 56262 - protein, 259 aa, Mesorhizobium sp. LSHC412B00
MVPCPQFDGRQWRFGRLAAHLTDWLPEFAFRPDDLPDRIENTSEVRRLMERAIAHLYSEKAGPSRGELGELLLHVCCRQFFGTFPAVSKLFYKTSSNEVVKGFDLAHVRLSEEGEIEIWLGEAKFYRDGKQAVRAAVKSVKEHLDRGFLQGEKIMLGGKISKFTPGYERLQWMFDVDTPLDQIFDRIVVPILVTYDSESCLDFQGEDSYNSQLEAEVLALDDEVNSRNIAVSVVKIMIPMNSKKLLQDEFDRRMGFYRT

SEQ ID NO: 56263 - protein, 705 aa, Mesorhizobium sp. LSHC412B00
MRRQELEAVLAADGSDLTGIFRKASALGRYILEHGAAEGWLNQHIIALHAAVLDFPALESLLPVTQGLLREVGLFPYLESAELDWQDAIARESFRPSGELASGYLFHREQAHAFDVLALGQNLVLSAPTSFGKSFLVDNLIDVRRPRTVVLVVPTLALLDEQRRRLDKAFGRAYRIIHRNDQLLSEDMGNILVLTQERLRDRTDLPKIDLLIIDEFYKLNADIQDARSRCLNIVFSRYAPRAKQIFLLGPNLDYDVDLGRIFAKRIDSDATTVATIIHDFSHESFKRKRLAALLAERSMEKSLVFCKSPASARKLAESLIQEGIGYDLPYCRQLGAWLAEHYHPDWVVASALKIGIGMHHGAMPRSVSQQILRAFEESDLNILICTSTLIEGVNTKAENVFIFDDKIRSKRFDYFSYRNISGRAGRFRKYMIGNVFLFNEPPDPEAYQLDIPSLADPADLSDDFLIGVDGFAHDDSFRDRRARLETDLDLPAELIEQLATFPIASIRAVADKVKERLRAGDQRVLWSDRAGYEELAATLAMGWRPFAKDSSLVSAGQAAFFAFRMLGTGGRIRDYLNRIVQSSKPEGVQREIDRALRAIREVDFYVPSVLSALQLLVNHFAMRVELPQVDYLTMAETIESHFLPRHVKGLEEIGIPIPLGMKVHGYLGGDHDLDEAITTLRSLRERDYIDGGLTQFEYRMIAASV

SEQ ID NO: 56264 - protein, 313 aa, Mesorhizobium sp. LSHC420B00
MASMSNDFSHLKALIKTLEHTIQCTDKNVQIRAHYLPFRNGKPCTGELLDNIRGYICNFAMSRSEIDLVHKSAATFSPQQMMIAYNKLRDDAADLFIKAQKSTSRNGECGELILYLLIEWILEAPQILAKMSLKTSGQMPVHGSDGIHVKYDPATDGLIFFWGEAKFHATISGAMSSAVTSISSTLKYDKLKEDINLVRRYISFSGLSPGDQTKVVEFLDPLSQQYQKKTDASACLIGFDFDGFAKLKDCDSATLELRFRELLEEALKSAAASLASNLEAAGISHHRMEVFFIPVPSVEDLRIEFQNRIGWKS

SEQ ID NO: 56265 - protein, 850 aa, Mesorhizobium sp. LSHC420B00
MIDKVWQNPVLAQALGALEQNWLVQTLHLERSPPVAISKADACRYIEAAAILACSELAAQRLAAYRIATYTYDLFRGEIDGLEASVRAVLTRLGNFPSLATEPGINSALSKASWAIAEEEVVRRAANEVEIAGAAVALTDFQVTLWRALSTGESIAISAPTSTGKSFILQAFIAQSLTKRPLFSACYIVPTRALITQVHGDLSDALAAAGLSDVEVVTVPLEEGDPLPEKAVYVLTQERLQLLLLNHPTKNVDFLVIDEAHSVQDGDRGIILQSAIDDILIRGPSVQLLFASPTVSNLNVFSGMTGRKDVSIQATEQVTVSQNFINMTVTSPKLGRVKVYSQSASGGAEVGVAEIGQQLSSRVECLVHIAQKFGADKQSIVYANGQADAEKIAFQISDLRSESTPDGQSGDLDALAELAKEAVHPKYILALTVKNGVAFHYGNIPTVLRNAIEQSFISGALRYIVCTSTLLSGVNLPARNLFMCLPQRMKGVALESVDFWNLAGRAGRLRREFQGNIYLIDYDKWTHQPLAAPKSAKIVPAIEHTIHTRTNDLDAVIQDSQFLMPGTSDAGLETIFVKLLADYKRGRIGVTLDRANVARDAPLREQLENSLAIADQLVPLSADVIAASPTISAHRQQRLYDSFVGIIDGGGELAARELLLKHPRETKAFDSYVAALALCHGTLLRRTGSIKQNRFFALMLLKWMQGMSISELVDGRTSFYPNEKIDTTIRSTLDLVEQELRFNYVRAFGCYNALLSEALKVSGHGELCKSMPSIALYLEIGASDKTMISFIALGLSRLAAKNLTNICPIKTLDVKNARAWLSRQDLEILGFSTYIRSEVNLALKRSSVTG

SEQ ID NO: 56266 - protein, 269 aa, Mesorhizobium sp. LSJC265A00
MHELVELAWLHLTSFTLTRKEIDAVRALQSTLPFEDFLIKTTQLNDAAAKLFIKAHKATNRNGEAGELLLYLLTEWILGAPQFIAKMTLKTNPQMPVHGADGVHVRYCPETARLFLYWGESKMYGDVGAAIIAAAASIAKSLEPDEQGHELQLVQRNIDFTGLGTEAKAALLRYLDPHEEEYNERKDVITCLIGFDFDGFQKARAAGDQGAEDAFRALAKEELAAVAPKVSAALKTAGLGSQDVELFFFPLPAVQEFRDLFQARIGWLP

SEQ ID NO: 56267 - protein, 844 aa, Mesorhizobium sp. LSJC265A00
MIQELADKVWDNRGFHDAAHRIELAWLTKEIGGIEDGHADITDATRLMRSAAILACSETADHRRAAFRVATCAYDLFGTGQLPLDQALRMVLTRLGNFPSIGTRADVASARVRLPLVLAAEEIASADAHEVTINGQTVLLTDFQQRLWLNLMQSRRIALAAPTSAGKSFVLQGYLSALFNNEQPKSIVYIVPTRALIAQVAEDLTIQFRGVEQDIPDIVTVPVDAETSLAVRAIYVMTQERVQLALGAHPDFSASVIIVDEAHSIADGSRGVLLQWVIDDLLIRNPASQILFASPAIRNLDIFGRLFGLTDVVEFSSIEPTVAQNFLVTTVESATKGKLVIHTAGDGSRALRQVATLQLGRTVASRTEKLVHIPAVLGRGHSNIIYANGAAEAESVALQLAELMSDREPTEARLALSDLAKEAVHASYALVECVKHGVAFHYSNIPTQLRRAIEAAVSSGEVDHLVCTSTLLQGVNLPAKNIFMFAPEKGRTRALESTDFWNLAGRAGRLKREFQGNIFLIDYDKWKKKPLDGPKDSVVTPAIESSLNEHHDQLMTVISGAPTTSRSDETDLETTFVRLYTDFKGGHLNQTFERAGVQPDDIQSSLVEAALAAASKKLTLPAAVLRRSPNISAHKQQRLYDRLNAKIAQGADVARTLIPSHPRESEAFQSYANILELCHEIILGIDTSKNLHRFHALIARRWMLGIPLPQIIDGQISRNASKPVRTTIRSTLDLIEGDIRFQAVRLFGCYSALLVYALDSAGFVEMVSSIPSLPLYLEIGASDKTMISFISLGLSRVTAMKLNEMSARKDLDKAGALQWLRTRPLEALGLSPLLLAEVRAIAVA

SEQ ID NO: 56268 - protein, 302 aa, Chryseobacterium gallinarum
MKLESTINETFLELFYNEIECDVPDTHSKLNLHILKIENNEFCYPELVNHLRNHFISFSLSRKEIQDFEKDKRYGELYAKAASKFRDYNVNDGEAGELLLFCFLESHLKAPKILTKLEIKLSSKDYAKGSDGVHLLKVADKDYQLIFGESKLYQSLTTSITKAFESIQDFLTRTSNNINDEIGLINSQLCKEAFDEDLYQFLKSVIMPKVNAEEPITKNNAFAIFAGFEISPTDDERKLSNSDFLKTIKEQIKKEVEGKMEHIKKKIEEYSLHGYSFYVYVFPFMKLDETRKDIIKKITLAE

SEQ ID NO: 56269 - protein, 859 aa, Chryseobacterium gallinarum
MIERLAADVLQDTYFTALYTKAAKLFVNNFFSAAESEQDFNEKELNDLLRFADILSNSKNPTSRNKAYQIITLLNQKHKTNPYYKTFSHSVLAKLGNFPAIEYLKNEDENISELPFERDIEKKVKEFIQAVPDTEDLIFTDSQFELYTKISNSKHFSFSGPTSMGKSFIIKSFIRKVVGNKPPENIVIMVPTRALINQFSIDLNKELKVILEHYNYKVVTNSNVPESPSESQQRYIFVLTPERLLSYLSQKNNPSFAYLFVDEAHKLAADKDTRAVTAYSAISKSLKQNKNLNLYFASPNVSNPEVFLKLFKKDETLNYKTKETPVSQNLFFVDMTRKKAIHYLDTEQYHFEPDIVKKSESIFDILSSLGSNTNNIVYCSSRFEAVDKAEKMFDYFNQQEATKSSNVKKVIRQIKGYIHKDYYLADFLNKGVAYHFGNLPQIIRNKVEALFKEREIGYVFCTSTLLEGVNMPAKNVFILNNKNGSNPFQPIDFWNLAGRAGRLRYELSGNIICLKENDKVWKTPENLLENKTDISLNPSVENYIDKKLKKIEQLLNDNPDIKGETETIKEILRYIANIISIDTLEIERSNYKSEIINKLIQDNKQEIIDLAKKKNGKIEVPSSVLSTNNSIKLKIQNEVFIALQKQKGNPATIKLPAKVDYEVCKEWLHRLYDLFKWHTEEKKFKSKAQLDYYAMLMNQWMNGVSLNQIISQSVSYYSEHKRTIQIGYVNGKPYYPTFNGSKQHINVLIGNIIDDIEYVLRFLLEKYFNNYYAMLVAILGEENAGVNWATFLEYGTQNSIVIALQNYGLSRHSADYLFKNFKDCLKIEGDKLIDINILKLKQRLDKEAIEYDEINSILF

SEQ ID NO: 56270 - protein, 315 aa, Enterobacter sp. MGH 38; identical to SEQ ID NO: 55046

SEQ ID NO: 56271 - protein, 885 aa, Enterobacter sp. MGH 38
MAKSTATTALNHQDFTSVFNLLIEHLFLKNRGKEEKYKISDEMIRRATWLASLGSSGNETDKNIASAFGTLLYLYDTSNDLYLKACYILQSRAGNIVSAKHLEGLFSQGNIIKHFSSSLDFELTSQKFLLEKRVSDNNYIYFTHFQRSLWDKLERGENVAVSAPTSAGKSFVIKRYIYDSVISANDGYFVYVVPSKALINQVGNEMSRELKDIATVMTTYKDSENDDLKIVYVLTPERCMRLLNENGKKAPKIVFFDEIQNLEDKSRGNVFENVIYRMTSLWQSTQFIMAGPYIINLHHSLNKIIDLNLVEQTTSTTPVLQLKVVLTVHKNKKTVNYKLISPVGDAVLGEYDIGKALYSKLSSSKGAALKHITSILDADEQNIIYAPKKNLAEGWALAIAQTNNEDSELDEDNTDLVYDSRIDSLCSFLENEIHPLYSLVRCLKKGVAFHHGGLLDVARLEVEDLFADGAIRNLVCTSTLLQGVNLPADRMIVISPKIGDYELSHFDFLNLIGRAGRISTSLYGEIFCIQLVDEEWAEDKIESNETKEIQSSVLRKLNEYGESVVSYIDVYTKDIVDTQGELHAVNLASYLRGQFLVDREHYEKIISNSNLTLNQIRVMTNRLEALEDILNVPKDIIYKNPFIDPLLIDQLYFLVESEGVNKWMIDKYPRVKSGVADPNAEFQHMNYYNQYKSIILRLNDIFEIEKEINYKEDGVSRKSSHFVSIFKLVNDSHKWMQGRNYRFFIDDMITKKLINKGIPVDYKKVDGITNFVTTHINTNLTFILVKYLSLWADVVSSFMSEEERTLNAFFLNLSSMLEMGNYDPQVLEVMAYGINRSTAIELLKKQKINNEQTTWQYLLQYNLDKLSPLHRKYLQRAGFGSSKPA

SEQ ID NO: 56272 - protein, 309 aa, Tepidicaulis marinus
MSMAGLTFQILVDDTLAGVTSTSQLIGVVNKRVLSLINDFEDAEWRYPKFQSYLWDNIAQTALSEKERSALVDQSHSCLVAAAQNLKLTDKDEIGKGSEIAEVFLYGLMRHRFGALPVVPKIFYKQNVQDNAKGADSVHIVVDGDDFTLWFGEAKFYNSITDVRLDSVVDSVMNSLSTDKLKKENAIITSVADLDGLSIAANLRSKIKAALDNRDSIDNLKSKIHIPILLLHECPITSNTKDLTDAYKIEIATFHKNRADAYFLRQIAKSKSVHKYDDLNFHLILFPVPNKKKIVDAFVQAVAFYKGQK

SEQ ID NO: 56273 - protein, 444 aa, Tepidicaulis marinus
MMDIFDVCHEINSLLTLKNEVAARNLLIRLLANLDQTKTPYPQVVNHMIRATGLFPYLQLANASWDQKYVHYAFEVDVGRRKATLHREQSSVLSKLLDGKNIAVSAPTSFGKSFIIDAFIEAKQPDNVVIIVPTIALMDETRRRLFKKFSEHYTIITAPDTPLGLKNILIFPQERAFGYLSALEKIDLLVVDEFYKVSQKHDRDRAPALIKAILKLSKKAKQRYYLAPNIKKLSDNAFTRDMEFLELLDFNTVYLDIKEPYKEFGGDATKKGEKLIELISPGTQKSLIYAGTYSEIKKIADLVIARIDPVDRIYTSHFSTWLRQNYQSDWLLADLVDRAIGVHNGSMHRCLSQLQIRLFEYEDGFDSIVSTSSIIEGVNTSAQNVIVWRSKLGNANLKDFTYKNIIGRGGRMFKYFIGNIYLLDAPPKSEDTQLEIEFPEEILG

SEQ ID NO: 56274 - protein, 344 aa, Bradyrhizobium diazoefficiens USDA 110; identical to SEQ ID NO: 54976

SEQ ID NO: 56275 - protein, 274 aa, Bradyrhizobium diazoefficiens USDA 110; identical to SEQ ID NO: 54979

SEQ ID NO: 56276 - protein, 290 aa, Bradyrhizobium diazoefficiens SEMIA 5080; identical to SEQ ID NO: 54978

SEQ ID NO: 56277 - protein, 274 aa, Bradyrhizobium diazoefficiens SEMIA 5080; identical to SEQ ID NO: 54979

SEQ ID NO: 56278 - protein, 285 aa, Tamlana nanhaiensis
MNIESLKTYTENQIFKFEYSSTGKFIKNSFHLDYLKNKYRETDLISLIRDTVPYFALTEEEFEQLESIDQTRIAWSRISKARKDKKGDYGELLLFLILLIYYDAPKLVTKVRLRTSMNLQINGYDCAHFTIENDEPVLWIGESKFYQDFSSALTKSISSLNDHCNIISTTDELSILKPNIEINKNSHEDFIKLQSLFKGKSIDRIKFKVPVLLTYNSKCIKNNDDISDKFKTELREEIDNLYNTIETKDIQTDLRNVDFIFFLFPFDAVSYVKDSLENIENALRT

SEQ ID NO: 56279 - protein, 752 aa, Tamlana nanhaiensis
MSSKNTLSLVLNSVELNPQVIALVEKLRNENELDFQEYKLLLEGTYSLLNSKDEDSYNLGLYSICHVCEFLPNDNFLLQILNDCIVSSRIFLYKEMLPILEGVKESFLDLYIKSFYTLETGTILTKDQKKILSLFNEHKKIIISAPTSFGKSRIIEEIIINNDYHNIAIILPTIALLSETYLRFNVNSHIKENYNLINSLGLADTIAKNNRNIFILTPEKMDMLLDEKPELKIDFFVMDEIYKIQDDVDRKSVFSNCLYRLSKMDNHFYLIGPYFNDFSPNFRKETESYFKKFSSEIVQKDTYSLYKMEKGEEYVIRNKTLKKKVNHKLNLRDIIKSVDGQTIVYNYRKDYVESLSKDIIAILNKPDEDETSSDLIEYISESISAEWSLVKALKKGVAFHHGSVPRYIQTEIIDSFNSKEIDIIVCTTTITEGVNTSAKNVILYSNALGKKDNLLTGFEVKNIKGRAGRFRVHFIGRVFYFHEVNENDRDIILIDYYDKEELSPEDVIQIDKEDLKDKNLETRERLEDLLAKNKVPLSLLKQNKYIPIHKQIGLINFLRANPIHLVLAYFEGTHPDKDQLSEIFNLSREHLFNERDYNDKGFRYWELSRLLKYYVYHTPSIKQLINEQTNSEYIDSKIRSAFKLITHYFEFAFPRYFRAFENLYNFVYREYHDKPDGGISLKYLITLLEFGFVKENEIALKEAGLPNDIIRKVSNKFSDCNSLEEVKLKYLYNPNIISNLSEFEQKIFRRYI

SEQ ID NO: 56280 - protein, 298 aa, Veillonellaceae bacterium DNF00751
MSHKHSNNIEINNKLHIYYISFDLLDSGYGQVKDKFYDELFDDIPAFAFGTDVMNEKKDKIGLVPTVREAMKKLYTIKEIQEASREYLNSNSTEDKYIKRGEFGELLLYHLLHEYFRADALISKIYFKDSVGSVAHGFDAVHVDVKEKIIWLGESKLYKNPKTAIDELAKDVENHFNVNFLDSEFQIITNRIHDSKAACDDFILELLDPNTKILRKLANINVCLFAAFESKSLVNFNKDNFEKTLKEEVEKLDKKMNTLLSQHLWANYLNVYLLVFPLDNKREFVSSLHQKLKGGQQI

SEQ ID NO: 56281 - protein, 711 aa, Veillonellaceae bacterium DNF00751
MNDSVKFNADYLKDFEYNWNCTKYYTSIIDKTDARKFLINVLENWDQVNDDAKSIWLDLIERAGFYPYYFDKIESVENYNQSLQSSVRSAFFKSDFLNGIYFHEQQKEIEREVSLKKNVAVSAPTSFGKSLLIEEFVARKQYSNILIIQPTLALIDETRKNMCKYLDYYNIVINTKQKATDRNIFILTAERVLEYESMPKIDFFIVDEFYKVSNLRKDDRIDALNISIMKIMDYKPQALFLTPCVNSLSDRFIERYNVVFFKTDYSLVNTNIIEVRKNNRPLKSNQKKKELFKLLKELKEPSIVYVKSPNEAYKLANEYINYLKPTNFVNSNLPVFEWMDENISEKWKLKKLMMNGIGAHNGALPRHIVSSEIEMFNNGILSIMFATVSLIEGVNTGAKNILIYSQNKGRNPIDFFDFANIKGRAGRMGKYYTGNVYLFNEELQPEEFSIDVPFVDQANISDEILFSIPDEYVKDKDRRKLLESEIPGDLQAIIRKNLISVEGQMQLYNYIRLNIGNLSYLKWSRIPSYKKLWRTLYLAYKYLDNNDSEKFAKAQAIMALNIINKSLKETIFKREEFLRKKRSNKNFHEKAIEDVLKFVRTDANYKIPKLLSVLDSIQKYTFEKNSNRNYGDYSIFNSLLENGEISENFRFLVDYGVPLSAVKKIEVEFNKCNKENYDNIFILQWLKQNINIFNSILLEYEYNLLKKSLNF

SEQ ID NO: 56282 - protein, 306 aa, Atopobium deltae
MSPILNFSNQGNNLSSIFTEVKHSESLGLVNPEQLRLFHLNVSSNLFNFASLSNYLINIVSEYVFSRAQVEKLSQSSNPRSIGIQALRIMKKNGAADVRGTGNELGEILLYAFLEDILGAPKLFSKVELNASSTSFGKSSDAVHLLTLENTPFPCYQTIFGSSDIAGDIRSAIDHAFTTIEKVEHDIKRVDSILVDSHIFEEAFDTKTAEKIRNIMIPSANTKMANDIAYGVFLGYSLGLNPQSRSNLDFLKAMDAKMQTDIKQHASYIANKIKQFNLGTHSFYFYIVPFNDAEKDKKEIMEDLLM

SEQ ID NO: 56283 - protein, 589 aa, Atopobium deltae
MSDDKVKLGEIIFNSISENEYLNRLYKKALLSYARKTLSMPIDNSSLNSTEVHDLLRFADLLSKSNHATKYEEHKMWAQEIIVLLNFLFPDNKNIKAFGGSVFSNTDNTRGISILNTDFEDPFILSRLFQEYKKSYLRIPYQENMHFFSAQKQAYDHLNDKYFSYSAPTSMGKSFLMRMFIKEQIANESHQNFAIIVPTKALINEVSQKIIREDLNDLLSKKNYKVITASTDIALEGKHDFVYVLTPERLLYMLIAHPNLKIDYLFIDEAHKLSAKNGRAPFYYKVVDMLRKRKCPPKFIFASPNIPNPEVYLRLLTDISEGNVSALKTSFSPVTQIKFLLDLKNKKMSVYNQHSKNLIEVADVKSGNIQLEDFLQIVESQNRSSDIPNHHQTIVYFNSKSKAVNTAKNFADRLNDLNDKDLNALSNDIATSVHKDYYLADIIKKGIAYHIGYLPSSIRMRIEDLFRAGKITTLFCTSTLLEGVNLPADNLFITTKKVFTRKMTPVDFKNLIGRVGRIEYNLYGNVIFVTESDDKSQASEYVDMLKTDVPPQSLSIEAGAGILTKPERKYIVNTLKSGSVVIEKRKNGK

SEQ ID NO: 56284 - protein, 542 aa, Novosphingobium barchaimii
MPLISLIDPETASDAGGVAGRRGQKFQDHVAASLVIDMLVEPTIVQIECETADDVTIRRMVDAVEAHEYVQVKTTDGDSKWSMQELLQRTDSREGTSIAERSLACDAHDAVPSFRLVTVREPRSPLVHFKIPRGERSSRASLMAAATGPFEKKFPKFKSPKGRTLADWAKQLLWQVEPDMEKLAGHNRLRLLKLAGNHGERPHVTEIETSYADLLGMVIDAGDASRVHAPEKKCISRATATTWWRKQIALFAAETRRTIKVYRVRSEEFFSEFHRGTGTSDNRTVSGWDVEFDGGEWRCRELVDHLLDWIPEVVLPPTVLANLNQLNARSLLTRAVEACEAHGGLRAREVLAELMLHALLRHHHRSEPIACKIFHMNSGRLVFGSAHVVLDDAGDQLWLGQSRLTTVTDRESMPAAVAEALRSGLDREILRRERKIILQLRHPAHLSEHNLGRSMAANGKIDDLLSVLHIPLLIAYDSDVLAEGFTQDYLNGLRQEANEMSAAIQAELDTDLRDFKIHIFLIPIECADTLAGLFETTLKADQ

SEQ ID NO: 56285 - protein, 703 aa, Novosphingobium barchaimii
MAFDALQTISALANDVATQPAARDLVIRMLAAKDLLRDDFHPLLEGLVRSVGLIPYTDPDNARSLDDHYLMEAHRAPIPDEKDYFFHTLQLQIYRDLVAGRNLVLSATTSVGKSMVVDAVIASGLYNVIAIIVPTIALIDETRRRLGRRFAHTHEVVTHPTQQTDFSRPVIFVLTQERALARKDLDKVEFFVIDEFYKLEIDEKEPERSIDLNLVFARLAGQGAKFYLIGPHVSGVTGIAARYNPVFVPSEFSTVALDIVQFDLPEKGDARKEKLVELCGQLTSPTLVYCQSPPRATSLAEYLLEHGDFGKVASTRAAVEWLRREYPEEWILTKALEYGIGIHHGNVPRAIQQYIIRAFDSGEIKIIICTTTLIEGINTVAENVIIYDRRVENTGFDAFTFRNIAGRAGRMRKYFIGKVFVLEAAPPDETMSVEIGVGLQNEDTPAALLLELDDEDLAPISRQRVLDIERESPLSMETLRLNRHVPLDRQYAVHTHIVRDLLNLEDALVWSGIPKPFQLLKVCEIIHDHFDGYALSRYGVTSGMGLKAELDRLRLAKTFRSYIDHRIANRPFFQSVSESVEQALKFMRRYVSYTFPRSLLAISNIQAEVLTRSGRATVGDYSIFASRAASLFMNSSLFALDEYGVPPETTKRLKYAGDGPATLSEAVDLLFLAAQDPESDLHPFERSIVEDLMTTMPPRPITL

SEQ ID NO: 56286 - protein, 305 aa, Alcanivorax sp. 97CO-5
MEFEILIDCSFSEINLNQSLAPIDKKFTTSFLNDFEDGQWRYSKFQSFIWDNIAETSLSFKERESLVNHSLLVAAAKNLRLTDSDKEDIGRGSELAEIVLYGLMKHHYQALPVVPKIFYKQNSQDNAKGADSVHIVVESNGDFSIWFGEAKFYNNIEDARLSSIVTSVENSLKTDKLKKENSIITNVQDLDELLIDKELKETIKNTLSNKSSIDDLKPRLHIPILIMHECEITAKSTQVDERYKSEVLSFHCYRATSYFNKQIKKLKGSVHLYSDITFHIILFPVPNKDKIVDMFVKNVEHYKDQ

SEQ ID NO: 56287 - protein, 379 aa, Alcanivorax sp. 97CO-5
MDIFETCSSISDHIQSGDDLLARNELIKVLHFHKKEGVSYSPLVNHLIRETGLYPYLDPETSSWEDRFVYESFKVDIGFELPVTLHREQSLLLKKLLEGKSLAVSAPTSFGKSFVIDAFISIGNPKNIVIIVPTIALADETRRRLQQKFSGDYKIITTTDVEISDKNIFIFPQERAVSYIDKLDSIDVLVIDEFYKASAEHDKERAPSLLRAMIQLGKISKQKYFLAPNISTLKDNPFTRDVEFIHLDFNTVFLEKHNLYEEIGNDVTRKSAALLSLIKDRHQKTLIYAGTYSNITQISNLIIDKLPPRKGGILTDFSRWLSKNYARNWPLTSMIDRGFGVHNGKLHRSLTQIQIRLFEIEDGLKGIVSTSSIESPPVC

SEQ ID NO: 56288 - protein, 302 aa, Gynuella sunshinyii YC6258
MELSIKSREFLDSFDHINSKVLDKYGKNKLDLFVLKINANEFDYNSLSNRLTDPVIEYSLSRKVRERYSDRPGTLSRKAREKFLDYLKNKGELGELLLYCFLETHLNAPKILSKLELKTSTGHYVNGADGVHFLKLDDGNYQLIFGESKTIKSLTTALTDAFKSIDEFKRCINAKGDEKSGLPYEKALVSDNLEKEEYNDEEADFIRSIIYPKRDNNFEVDDAFGIFVGYEISISAEDKRLPNSGFRLKIQDQVKSEVEKSFEHIKNKIEDHKLSGHHFYIYVLPFTNLEDSRQKIQKEITA

SEQ ID NO: 56289 - protein, 845 aa, Gynuella sunshinyii YC6258
MSFFDKLSAEVLKDEYFIDLFIKAEMLSASGFFGTEKIILGAKEYVDLLRFADILSRAKNFEAQNKAYKTVSLLIDDYKSDDLFKRFAHSIFVKLGNFPAIRFLEDNDLGSDDNSIELVFEKSLKEIYQKSRSKNLIFTDEQYEIFSNLKNSNHYSFSGPTSLGKSFIIKEFIRYLIEENNCNENIVILVPTRALINQTLLQLKKEFYDIETYKILSHPTVPESFRSGEKKFIFIFTPERLTAYLAEFSNPKIGYLFIDEAQKITSPNDTRSPLYYHAILQAERKSIKLYFASPNIPNPEVFLQLFEKSAEEAKSVKSSPVSQNRYFLDFLDKRCLMFSDVADEQNVNVDFSDDDFYTWVKRLSKRDASIIYCNTKSDTVEYALKFSKTLPDKEDNRIDEVISVIEEHLHKKYFLIDCLKKGVAFHFGSLPQRIRERVEQLFSDRGIDFVFCTSTLLEGVNLPAKNIFILNNAIGLTKFSDIDFWNLAGRAGRLTQELSGNIICTRIEDKKYRWKNPEKDLDVVKNRQIKPIEPLVNSGRGNFYKNIEASLSGKEFTKKSATANEINIWNHYANIALIHEIRSDESPLRSNFLERNDNAKVVLQKLKKETLVPEKILSSYSMIKSKYQNHIFQSEDLASKKLSSNISYESVLEKLELLCDFYSWETEEVTGRKKLLPSRDILKYYAVLMANWMDSQPLSWMISNSIKYHEKTGVIWEDNQSVPFNSKSQKHINIVINNLISDVDNILRFKLKNYFSNYYDILAEKLGDKNAGENWGEFLEYGTNDWRIIELQNIGIPRHLANFLLENHSEFFVFEGGSLLSIRKESLIEAMDENSPEFKELVEVI

SEQ ID NO: 56290 - protein, 302 aa, Geomicrobium sp. JCM 19039
MKISNNSLNITKAMRQVSTSQIPVENNLQVFIFPISSNQFDHKVAANHLLESVADFALSRKAKEYIGKTNYMKLSKDARAKFKDWRQNTGELGEFLLFCFLEGHLQAPKILSKLELKTSSEMYVHGADGLHYLKLSNGNYQLIFGESKLHKQLNPAIRDAFKSIRDFKESVNAKGNEKSGISFERSLMSSNLDRETFSEEEKTFLRSIVYPTPGESSYDVDEAFGIFIGYEVEFENERKTLSNIGFREHVETAIKEEIETQKENVANYIEKFDLYGHIFHIYVLPFSKLDDTREMMLKELLS

SEQ ID NO: 56291 - protein, 853 aa, Geomicrobium sp. JCM 19039
MNFFEELTEMALNDEYLKSLIYKAETIYGQTIFNSDELNQIFNSKEYYDLLRFADILSRSKKPEARNTALKIISLLYELEGYKNDNDFKNFSESVLTKLGNFPSISIVGSNHEDNNDEEIEIDKILKSTMQQAPNSKYIFTDAQYDVFEKMKDSNHYSFSGSTSFGKSFIFEAFMNYIIDERNASDNIAILVPTRALINQVTIKLKSEIKNKKYKIVSHPKVPLLYKNEGNRFIFVFTPERLISYFSDSNNPSINYLFVDEAHKLLSDKDQRTPLLYHSLMQAKRKSVKLYFASPNIPNTEVFLRLFGNSIEESTSITESPVAQNRFFIDCIDKKAVMFSDFGKDIPLNGLKYTKNEVENLIEVVNKLGADKQNIIYCNTIEYTVKHAREFSSHLQNNSSKRIEELIALIKESVHDQYFLIECLKKGVAFHFGKIPQRIREGIESLFRSGEIRFLFCTSTLLEGVNLPAKNIFILSTKIGMNYMDEVNFWNLAGRAGRLAKDLSGNIFCARIIDQEGYWKKTKEIEKVKNKKITEIESPLMKKNDKNLYKNISNSLSGQPFTNKNLSANEKKYINMYGNILVYHDIVKSDSILRNRFFEKNKDARITLEKVTSTIKVPDYIIAQSANIRIDIQNKIFSTESTDQLPEGTDYKSCLQMLNILYDDYEWQKEESIGLNPLVKNREHLNYYAVLINSWVNSKPLKIIISNTIKYFDEHDKDLNIRANQYETFNKENATHINILINNLISDIENAIRFKIKSYVNNYILLLVERGVEVKSNWSDFLEYGTIDRFIIEIQNIGFPRHLATFLKENYPHCFQFVEGEITEFDTHKLKNEINTEKYKNEFNELSKLLEWT

SEQ ID NO: 56292 - protein, 315 aa, Rhodovulum sp. NI22
MTQVLPEDLVNIVSGDPEELGVHLQLVKRDVLLKDCVARLHCHCLTVDGNGRVKPERLAEFMRNSIIDYAVPKSRLDDARARDARFKSGSAVAALHHEAIGTFTDLANTGEGGEMLLFLLAERFLKVPQVLCKMDLKTDSHMHYHGADGVYASVNENGLLKLFWGESKVYGDPTAAIRDCLSSLAPFLVETDHEGADRERDLVLLSDKADLSDPELTAAFRKYFDRTSPLSNRVEYCGIALIAFDADFYPKDDAKGIGEDILKAANDEMEKWVKNVKNRLSVEKLDKFDIQFFCVPVPSADGFRASFLKALGIKK

SEQ ID NO: 56293 - protein, 873 aa, Rhodovulum sp. NI22
MKDTELFDWLTGEALRDDIIRLTQITVATEITNLDAIHESADPKKSFDWQQLLLAGSLLARSTERTHQEAALRIATAAVTLETSPEVRDAGAVLLEKLSNRRSVELAILRNRIAPDLEGRLGVSMRLEANRRRFEDSILLESSGKWIGVNDFQKELWAGASSGAGWLSASAPTASGKTYLVLQWLLDHVRTSKTKIAVYLAPTRALVSEIELSLKELCQSDTGIEITSLPLTEVYFSSTTGDKKAVFVFTQERLHLLVNLLGEDFSVDLLIVDEAHKIGDNQRGVILQDAIERVSRQNPMMKVVFVSPSTQNPGELLEDAPNDMPKTSVNTDMPTVLQNVILAEQVPRKPKEWSLDLVWGDSPIPLGTLKLSNKPAGLKKRLAFIAAAAGGRGGTLVYCNGAAEAEDVALLISQLEGSEKTDDQELLDLADLARKGVHRNYQLAPLVERGVAFHYGNMPSLIRTEVERLFRDGKIRFLACTSTLIEGVNLSCRTIVVRGPRKGRGNPMEPHDFWNLAGRAGRWGNEFQGNIICIDPKDEKAWPVGVPKRSRYPIKRETDVVISSTDELAAYLENRNIDSLADLAQGEEFEQVGAYLLNTYIRLGTLSDAAFAKRHSPDALRKLDRSLEGISALINITQDVLVRHPGVSAVGLQRLLEAFRKYEGNIENLLLAPSESVDAYDRYVTVMRRINANLYPVFLPDSLIPLHALVVVEWLKGLSLAAIIRKRIEYQQRNNRSFKLPVLIRETMSMVEETARFKAPKYISAYMDVLRLFLTEAEREDLIDEDFDIGIALEFGVSSITLLSLMELGLSRMSAVALYEKIARDDLDKEGCLAWINQHGPNFAGMDLPNLIVRETLQVSGLDDPEAGHEFSE

SEQ ID NO: 56294 - protein, 303 aa, Novosphingobium sp. KN65.2
MTGDPEALDVHLSLIERDVLIDGHAVKIHCHCLAVDANGRVQPHRLAEFMRNAVADYAIPRSQLAKAKARDQKYKSTEAVTALVEQAKRSFTDLAKTGEGGEMLLFLLAERFLKLPQILCKMDLKTDTRMHYHGADGVYAGVTPDGVLKLYWGESKVYKNVASAIQDCLSSLAPFLVEPEHEDAERERDLILLSDKADLSDPVLTEALKRYFDKTSTQSRRVQYCGVALIGFDAEFYPGGGAKVIADQLTEAARLALVTWRKKIGERLQTEKLEQFEIEFFCLPLPSADEFRKAFLKAMGVAV

SEQ ID NO: 56295 - protein, 870 aa, Novosphingobium sp. KN65.2
MRIADLQSWLLDQGIEDELDQLTRHTVRGEIGNLVPEPDGVASPVDWQRLLLAASVLARSNTRSHQEAALRIATSAVTMSKSAAVIDAGAVLLGKLSNFRAVALAGKRALLADDLDGRLGMNLRIEAQHRQMEQAVLVESSGRWLQVNDFQQRFWEKAAVNGWISASAPTASGKTFLVLQWLIDQMHDGAKRVAVYLAPTRALVTEIETNLELLLGKPGAIQISSLPLTEKYDAARLGGAPLILVFTQERLHLLANLVGDDIAIDLLIVDEAHKIGDNQRGVILQDAIERIGRANPALKLVFISPATQNPGELLADAPDGTATAPVDSDVPTVLQNVIIAEQVPRKPKLWDLSVVKADGKQLIGRLKLASSPTGPTKKLAFIAAAAGVQGGTLVYANRASDSEEIADLISQLIPTSAIVDTELLELADLTRKGVHPQYRLAPLVERGVAFHYGNMPSLIRLEIERLFRAGKIRFLVCTSTLIEGVNLSCRTIVLRGPRKGLGNPMEPHDFWNLAGRAGRWGDEFQGNIICIDPGNSQAWPHGVPARARYPIKRESDAVIETGTGLSDYLDHRVSADLSELPEADQYEQVGAYLLTTFLRLGSIAEAGLAKRHDKALIARLDASLAAIAAQIEIGPEIANRHPGISALGLQRMLDAFRRYEGDPENLLPAPVDSEDSYDRFVTIMRRINQNMFPAFSPEGLIPLYARIVVQWLKGFSLAMMIRRNIEYHVRNKRDYKLPTLIRQTMEHVEQIARFKAPKYFSAYMDVLHIHLRAIGRDDLVEDGLDIATQLEFGVSSRTLLSLMELGLSRMSAVALYEKIARDDLDKAQCRAWVADRLNEFPGMDIPAIILREILERLHPDAESQTTPSAS

SEQ ID NO: 56296 - protein, 302 aa, Spirochaeta sp. JC230
MLFEVLLNNQVRNIAPYFELRLIENDHLLSIINDFEDGKWRYKKFQNYIWDNIAETTLNYKEREALVNQSLLTAAAKNLRLSDKDDATGEGSELAEILLYALMKDHYKALPVVPKIFYKQNTQDYAKGSDSVHIVIEDNEEFSLWFGEAKFYNSVDNSRLSRIVESVKNSLRTDKLKKECSIISGVSDISYIIGDNIAEKVKAVLSYQNSIDTIKELIHVPILLLYECSITKTESVLTEEYRRNIKELHVDIAKRYFSKQLENISDIFLHEKIKFHFILFPVPDKENIVSKFIENVEFYRGD

SEQ ID NO: 56297 - protein, 698 aa, Spirochaeta sp. JC230
MELFNYYQEINDLQEIGEELKARNELIKVLDMHEKQDIKYNHVINHLIRRSGLFPYIQIENASWEDRYIYEAFKVNIGKSEPAILHYEQSRILKKLLNGDSFAVSAPTSFGKSFIIDSFIAIKKPENVVIIVPTIALTDETRRRLQRKFSDEYKIITNTDIQLSTKNIFIFPQERANNYVDKLSSIDLLIIDEFYKASLAFDSERAPALVRAIIKLGKISKQKYFLAPNISKLNKNPVTKDMEFVHLDYNTVFLRVFTLYKEIKKDEEKKGLYLLKILDKYTGKTLIYAGTYTNIDKVSTLIIDKHLDSGSELLANFEKWLIKNYDPNWILPKLVKRGAGIHNGRLHRSLSQIQIHLFEQVNGLNCIISTSSIIEGVNTSAENVIIWKNKNGTSGINDFTYKNIIGRSGRMFRHFIGNVFVLESPPDEEQTELDLEVPNEIINEIDEDIQSEYLKEEQVRKAVEYKDEMISMLGAERYKILKKEKIIQSSDSELILSIVQEIFEDQESWRRLSYLNSPDPDQWDTMLYKVINLDPGNWGTRYSYFVGFIKALSNNWDSTIPDLLRSVEYMDLGINEIFQLERTLAFEFSSLLQDVNTIQKIIINEPSIDISPFIFRISHAFLPKNVYQLEEYGLPRMISKKIHEAGLIDLENGEIEINTIIETFKKLGSGRIKSIKSLDNFDNYVVDYFYEGIIINKN

SEQ ID NO: 56298 - protein, 307 aa, Listeria newyorkensis
MGKLTEHHLYEDIKTQCFHIVFDLNDNGEILQDEDGWCEEIFDEIPNFALGKAKAQEISQNSPRKAVKQGMKLLYKVKEVQEASIEYLGSEKAKDPEDKYLKRGEFGELILYYLLDKKLDKPQLISKIYFKDSYNSVVHGFDAVHFDRATNQLWLGESKFYKSKQSALTALSKDLSDHFNVEFFNQEFTIINNRFADLNIQNDHIKSLMDEGTRFLSRLVNINACFFALFDSSVLESFSYEEGTDEPTEAFLDRLEILVKDARENFNNKIESFQNKENLKIHLFLFPVQSKYDLVKKLHEKLKKEQD

SEQ ID NO: 56299 - protein, 688 aa, Listeria newyorkensis
MKTLLQDYGESFRLASEISMNQDTEKLIYVVENWQSVNEAIKPIFNDLIESFGFYPYIKKIDNLDTAGLIRNEYHKSNNLINSENQNITFHFEQKLLEEKISNKKNLLISAPTSFGKSLLIEEFVARKKYANILIIQPTLALIDETRRKLKKYADFYNIIVNTKQSLLERNLFILTSERVLDIYSEIKNIDLFIVDEFYKISNHKKDGRASQLNIAFYKIMSKEPQLLLLTPNIDNVNSEFIDKYKLEFFKTEYSLVNQKIQKVSFVKNQKKEALFRLLQDLEEPTIVYVQSPARAEKLAKEYIEKVTTTVKKSFPIFEWIDENISPNWMLKNFLENGIGLHNGQYPRHIVNSQLDYFNNNNLDVIFATTSLIEGVNTVAKNIIIFEMKKGDRRGTQSITYFDFNNIKGRAGRMMKHYTGNIYYFDNPPEKQTENLDIPIIEQDEGLQSEVLVNLEKDDIKEQRREDYNLLVMNISDELLEIFKKNYYSVESQKKLYSYLSSNKVYLNELLWSTPTPKYEVLVRTLEIITQQLDGESGNTHKFLAQKCQQVMRDNLRLAISNEVLYQKGLQANKNKQDREIENMSISVILKFLKSQAKYEIPKKMKILESIVNYLSLDEKADYSAFIALLEHEGIDEELSVLLDFGVPASALKKIGIAPNSDVSTYIKQNLDSFGFNQYELDIVNKAF

SEQ ID NO: 56300 - protein, 293 aa, Vibrio sp. J2-31
MDSSLKDRIKNQIFKFEANLTNSGEEDSVYTLDFESGRYRQRELVGLIRDIVPFFALTEEEIKTIDRSDWNRQSFTRVSDANENSKGDYGELLLFVLLSSFYAVPKFVTKARLRSTTREQIKGFDCAHFSVDKGKVVLWLGEAKFHKDLSGAISSAYSSLQDHLNDSERIKSELKLLGGEIEINKTLDSDTYNLLKSYVSGGRSLDKVDITVPVLITYDSKHINSCSVENCADIELDDFKGKLKTEIDNCFGKIYKKNWPIGKSIKLVFIIVPLESVSEMKGQINIVEQAMKF

SEQ ID NO: 56301 - protein, 740 aa, Vibrio sp. J2-31
MNNYIVDCLKRLDNLELQEIENLLIGVYRNLDSTDDNDYNTCLSAICHIANLSIKDVMIQQLLHDCIIKSRIFLYDNLLEINDETYNPNYSIQDMVLKNIYTSGLTNTTLTRPQKEIFSAFQTSKRLIVSAPTSFGKTRIVREIIAHNEYKNIALIMPTVSLLSEQYQDIKNATDGYVISKSSKVEIDESKSYILILTPERMSAFLEENPDFKVDFFVMDEIYKVDYKLDDDRFRVFSDILYRLAKTDADFYLIGPYITDFSQKFRDKFDVKMLRYDTEIVQKDYYSLDFETERRTHLIEKSKIKIIKDKFKNLLRIVSEESIDGKFLIYRYQKQYVEDTANKFVKLWPVKEYNKELVNYLEDTVSSNWDLIPCLKRGIAFHHGAMPRHVQDLIVDEFNTKEPSGIDYLFCTTSLTEGINSAAKNVVLFDKKIGAGESLKTLDRKNIEGRAGRFMQHFIGRVFHLEQPEDGDLETSVEVEFFDNNDPAIESLIQLEDDDIDDDFSERYESHLKDIDMLNIPNQVLKENKFVNVDSQIELINHLRTLPSLEKYYFEEQIPSKEYLNNILTTIYNFLFTQNDIGRNFDGEVGQSILIGLTKYYVYFSPSFKVLLQSDTVQNARKKENARIRYVFDLMSKYFEFVWPKYLKSFQNIYNFVAKERSQKPIDVSMLIAKLEYGTTENHEIIMRDSGLPNEIVKKISHRFKGCENFEDVVIKANIIKPYLTDELRPIEMRVLNKYL

SEQ ID NO: 56302 - protein, 485 aa, Erysipelothrix sp. LV19
MKRLCFGTLMHILYQARNQKVTNDLLCDAIFSSYSQTTNSFDSSLPGHLKSGRNNVPPDVIAAARDTSFEDAERVFENKVVKLIKDSKRESVVRAIKEILREDSNIQDQTVIGYIKGYEKNNIINNSTFSLSALLASVFYFAIIEVKNQECKKAIKEIDKSYVESFDLSDEQIYFESAKAESQIPLHKTLHDPTFERVFEKVSSINIFGLSNPSNVHIYGVDANNCKFKFRALKEYLVDNIGNYVFSRAKTNRLITSKKSYAIGSQALVKFMQAYGASAETVLGEMLLYVFMEQELNAPKIMSKIEINDLGRSIESKSDGVHLLAINDNGQLFHQLVFGASDVHGDLAIAIDRAFDKIIEIESNSDTELKMVENTTHGSIYDSDTTNYMVNLLIPNKASVAKPDMAFGVFLGYTLSLGYTETNNNKYRIAVKEQMKRDISALKPYIEQKIFDNGMSGYNFYFYVVPFNDAPLEKSSIISEMLDGR

SEQ ID NO: 56303 - protein, 871 aa, Erysipelothrix sp. LV19
MQTPRNQTLAEALYRDIDKNDYLKEIYESLLYDYSINLFKLRKQQKEINIKDALRFADLLAKSTLPDKRDEHRLWGQELVILLSIVYPEDLAVKYYLGSVLSTVGNYRGLKSTYIEGFQTSNVFDGLYFEYDKSRLQIPGEEGSYFFHDQKDVYDGLNYKYFSYSGPTSMGKSFVVQTYIKQQIENGSTKNFAILVPTKALINEVRSEIIGSLQEKLKETNYRVVSASGDIVLQQEHSFIFVMTPERLLHMMIGKPQIKIDFLFIDEAHKISDRGGRSTYYYKVIAQLSKMKEMPTVIFASPNIPNPEVYLSLIPKINIDEVKKLASKYTPVCQFKYFLDLCEGQAYFYNDYSKSLSSIGKIPQEDELSDIVNRVGSTQQNIIYCNSRQKVVDYAVQYASKLPIKDDEKLISLANDIRNEVHNDCYLADLIQRGVAYHVGYLPTNIRLRIEKSFVDGILRTIFCTSTLVEGVNLPADNLFITSYRNGNSNMDEVEFRNLVGRVGRIKYNLYGNVFLIRMEDRLKTQNYIDLLQNDVPKQEISINLIDNKKYLSLVVDDLARGDMELTKVREAATEKDFDALRKFAMIFTKDIAEDNITPIREAFSSLLDEESEYKIKENFPVEKTSDDINFSYDQIINLRELVESGQEYPKLTGENDEVDFEELVDFLMKLRKVFKWDIYEKRTIGKSGTYREDSVVRWYAVILLRWIRGNGLSQIIYHALKYKEKNPNSGVWVGNMKMADVYNKNSKSHKNYIISETLGVIENVLLFSISNYFRKFSLEYKDVHQVDHFQNDWYEYVEYGTTNPLTIFLQQSGFSRESSKYIEEPTNQNKYLIEVDGEIQIHRSILTCGNVGVETEAHDIQFNMPELFID

SEQ ID NO: 56304 - protein, 307 aa, Brevundimonas sp. DS20
MTGLVFDVLIDDALSNITSAEQLKGLVKKRVLSLVNDFEDTNWRYPKFKNFLWDNIAQTALSQRERASLVNQSHSSLVAAAKNLRLTDKDEVGQGSEIAEVFLYGIMRHQFHALPVVPKIFYKQNVQDNAKGADSVHIVVDGDDFTLWFGEAKFYNSIEDYRLDAIVGSVLASLSTDKLKKENAIITSVSDLDGLQIDTKLRGNIRAALSNRESIDKLKSKIHIPILILHECGETAKSTDLSSYYKDTIKLYHQSRAEAYFSKQMAKASNVHKYDDVSFHIILFPVPDKKVIVDAFMKTVAFYKEQG

SEQ ID NO: 56305 - protein, 695 aa, Brevundimonas sp. DS20
MDVFETCQEINSLLTAHNELAARNLLIRLLADLEQAGTPYPQVVNHMIRETGLFPYLQLDGAPWDVKYVHQAFEVDVGRRVATLHREQSSVLAKLLDGTSIAVSAPTSFGKSFIIDAYIAAKKPDTVVIIVPTIALMDETRRRIFKKFSRDYTVITAPDTALGSKNILIFPQERAFGYLDLLNKIDLLVVDEFYKASQKHDKERAPSLIKAILKLSKKSKQRYYLAPNIKKLGDNAFTKGMEFIELLDFNTVYLAINDHYTDIGGNEKKKAEKLIELISAGDQKALIYAGTYADIKRVSDLVIDHMPKVDNSYTNNFAQWLRDNYKPDWILADLADRGVGVHNGRMHRCISQLQVKLFEYDNGFSNIISTSSIIEGVNTSAENVVLWRSKIGKNNLKDFTYKNIIGRGGRMFKYFVGNIHLLDAPPAAEDAQLEIEFPEEILGTLDETDDADQLTDRQVEKIIEYKVQMSSIVGEENFARIKRQNLLHDSDADFLLRLATDMRNSPEDWKGFAFLNSNNSSNWESTLYKVLKLKPNGWEAPWSNVVTVTKAIANNWKQDLSQIIRALEDSGIDIEEFFKLERAVTFKLSALLSDTNELHKLIINPSVDVSGFVGRMSRAFLPSAVYHLEEYGLPRMISKKIHRAGLINFEDPDVDLLVALERFKQLGQGKILATQSLSRFDRYVVKFFFDGITVD

SEQ ID NO: 56306 - protein, 284 aa, Aquabacterium sp. NJ1
MTAYASVPERLLTCLYDSKNDQESQALYCAGFELQQWRCDAMADHIMEWLADYALAEEELNVKHTNMYVRLREAASRIYTSDKYKRRGELGEIVLHAICRDFFKTIPLAPRVFYLTASNDVVKSFDMAHVRYLGEGAFELWLGEAKFFQDAGEAMASAIESVNAHIDAGFLKNEKLLLGPQISRNIPNYEGIRALFSPNAPIDKLFQTAAFPILIASDSKAVANGKSHDDSYIADARAELTKLETKLKASGLREKIRILLIYLPVKSKNDLAAAFDKRLKGIQG

SEQ ID NO: 56307 - protein, 693 aa, Aquabacterium sp. NJ1
MNISQSEWQSLPSLGSLELKKQVFLILQKAATAVQEGGSDDPHLLEVVPRLAGLLESRPELDGFAEALSALARASGLWNYIDKERAAPSDLLLAESVTVPELGGITLHREQVAALNDLLAGRNLILSAPTSFGKSLLIDALLASGKYTRVAIVLPTIALLDEFRRRIKRRFGDRFDLIMHPSDETKDGRPTIFLGTQERLINRTDLGKVDLTVVDEFYKLDPNRKDERSITLNAAVSKLLNRSNQFFFLGPNIDDVRFSGDGRWKFEFLRTRFSTVAVDTYDLGAVQDKEARLLDEVGNDEHWPALVFVSSPDKANKLAAKAAEAMAVSDSSAAFAEWLSDNVGPGWALVETVRFGFGVHHGRLPRAIASQMVRMFNQSDLPVLFCTSTLIEGVNTAAKTVLIFDKTINRADYDFFTYANIRGRAGRLGEHHIGQVYLFNQPPDVEEMEVAPTLFADPDDAPDDYVVHLDEQDSTKNTDQRVATLKMNLGLDAAGLRLAASIGLEDALAIKHEILKEIRAGSRLVWSGMPRYPDIQAVVNVICTVRSATKFGALTTRHLPFLINSLRMAPTIRQFLLDYDKEYRGKPEAHDNVFKFLRACEYGLPQHFAVAELFVKQHDPSADYSLFISSLSRWFKAEELKNLDEEGIPIQISERFFEGESREALSQKLLDLAQQKSDQLTPFEQSWVLAALT

SEQ ID NO: 56308 - protein, 296 aa, Methylomonas denitrificans
MALANNDIKILLSNTSALINHVYWFEQDISEPHASSHRGISINYVDIKEKRDEFIRELKSTILNWIYSKSKYNAIYTDELLKRNNDHQNTNAYLLQVVDQKFRKGHPQGQFGELLLFNFIQFFFSAPPLLRKMSITTNPALERNGADAIHYTKRDENDVFIIGESKCYESKYKFNSALEASVKSIVNSFEDLDNELILYLHDDFVDPVLNVKAKEFKDGKCEHARFELVCLIAYNETFDIDGDSETAIKKNIESCLQNRWSNTSKTLYNGIKQSIISRIHYIIFPVWELDKLLEEF

SEQ ID NO: 56309 - protein, 806 aa, Methylomonas denitrificans
MEALAVLGELSNSDEEFHLQVSILIIALLWSYSPEYNKDQLRQILTPVLSKIGFSPSVFLIDNFFKTERVYSSIGSYYDKLKIVANDLANTIHIGEKEYILTKFQAQLWKTMQESNLLGISAPTSAGKSFLIYLKIVDLILDGASRFVYIVPTLSLISQVTADLSKLLKEFKVYNIDVLNSFEETCENFIYVVTQERALSIFSDKDIGTIDLFVIDEIQNIERVANEGPDRSKVLYDVLKDVKYNHDVSRIILSGPRLKNIANLGFEIFGEISDEEASESPPVLSLTYSISKDKKAYYLNQYSIAFDYPIQIKIANTETIYGIGGSQYNEKFSNYLNSIVEKLNDSINIIFSPTSGQARKSANSYCNAIKINQSAQNENVNNDLADYVRKTVHPCYDLADLLKNGIAYHTGKTPSHIRKSLEIAAREGLLKNIFCTTTLMQGVNLPANNIIIRNPYLYTKKRGAEIHLSAYEFANLRGRAGRLLIDFIGRTVVLDESCFIENSEFQDESRLFDDEYKEIKTGYDKIYQEHRDEIDTALLNDERVAESSSKHLLTHIRYMLYKYGDQGEDRLKDVGLNIDDSILHAARNNISNIKAPRDFILKNRYWDPIDLAYIYGIYIDNANKLPRSVWAANFANKILNWLEIMRDEMPYYFERYIGVFDNRYLYGVAKSAEQWAREKPLQDMLIDRFGTTAYEGIDSDIDAEIEKINSKVGFGLSMLLKPISDIDGDENPIIYSIENGVYSNISKYFVDRGVPRETAIRISKLVPNKYLKQREQAIDLKQVFQNLDYWEKKHVEHLINELDAQH

SEQ ID NO: 56310 - protein, 328 aa, Sulfuricurvum sp. PC08-66
MSTFSSENVINRHINNADLNVYFVGFDGGIYRDSHLTDYIMDALVDFAYGYHTGILKTYDRRIMVEAAKSLYSIDEFKSAFQKYVTEDSEFDDSSSDKYLKRGEFGELILHLLLRDFFETVPLLSKIHFKDSYSMTVHGFDAVHVGNFNGADSLFLGESKLYQNGKDGIDALMKDIEEHFTKDYLNKEFTIVGKRSSDFKYFDEISDLNTKKAYEDFLTKKDDWFNKINGLQSGKQKLSSLLSSTTIPLLCTYSSETFTKHNDETTQEFRDEFDKEINQLKTYFDKKFDIHTSAMGANLNIILLLFPVPSKKELVRLLHTKLEAQQRA

SEQ ID NO: 56311 - protein, 763 aa, Sulfuricurvum sp. PC08-66
MEFKEQIYSSESPLSVEMSFDIANHITSLVLTDKLEAHKLIIYILDNWHKIPTETHKLWTDIIEIVGFYPYVEKQNLDLNNFAGELRKARHLSKSISGRKVYFHEKQKELDEYIKSGKNIIVSAPTSFGKSLLIEEIVASKKYQNILIIQPTLALLDETRKKLRQYSERYKIILRTSQEPSDDKGNIFLFTSERVLEYHEFPQIDFLVLDEFYKLSLTRDDERAEHLNNAFYTILKKHNPQYYLLGPNIEEISSGFKEKYNAEFLSYDYKLIETEEIDLSNTKDEEKEKVLFDKLLKFKNGQNIIYCSSPNRVMELSNKFHKYLLQNKIIEEINIPLIEWAKNNIDKNWFLIRILSSGIGIHNGVMPKHINTSIIDYFNTKKINYLFCTSTIIEGVNTTAKNVFVFDKTRGNNKQIDFFDYSNIKGRAGRMMEHFIGNVFHFHPTPEKKETKVDIPFFEQNEQSFTKEIEIAMDDVDIKDKNREQYRQLKALNDDERSLLKQNGLSVDGQLELLKLLTDAVKSKNELYGWSGAPTYEQLKNILNIGWKYLLKKGESRNGMNPNYLTLLVWEYARGKTFKSLQEKIQTQLLEKKLAMDSSEGVKAIKIQEEYKKLKKSDKKQFREEHKDEFTHLKYYQDYQNKSDDDILQESIVTTFQILRHWIQYKIPKWLNVINNIQQYVAIKQGIKSGEYSWFASQLENDFVASNLSILKEYGVPKSAVNKISKHIDDNVNEEDVLQMIKRMAKNSKGMFDLYELQHIDEI

SEQ ID NO: 56312 - protein, 302 aa, Sulfuricurvum sp. PC08-66
MELSIQDYAFLDAFDNLGSFTIDEHGKNKLNLFVLNINANEFNLKRLEELLIDPMIDYSLSRSVREQYKNKPATLTKKAKEKFIDYVNNKGELGELLLYCFLETHLKAPKILSKLELKTSTSLNVNGADGVHFLKLENGNYQLIFGESKTIASLTDALTDALKSIDEFKGEVNYKGNKKSGLPYEKSLISDHLGKETFTKEEKDFISKIVYPKKENDFEVDDAFGIFIGYEITIDEKDKKLQNEDFRKKVQKQIKEEVTNKFAHIRKKIDEFQLYGHNFYLYILPLTELDKNRKAIIRGLQS

SEQ ID NO: 56313 - protein, 849 aa, Sulfuricurvum sp. PC08-66
MRYIEELAQQALDDEYLHELFFKIEQIQAETFFHIEPQDLDEKELFDLLRFADILSRSKIDEAKNKAYKIISLLFDKYSSNAVFQTFANSILVKLGNFQALSFIEKFSNTESKLPYEILYEKSLKEVFQKISHSEFIFTDSQYHIFETLKNSNHFSFSGPTSLGKSFIINAFIRHLITEHRGTDNLVILVPSRALINQTVNKLKQEFKDVENYTILAHPSVPVMFRKENSRYIFVFTPERLIAYLSKIDNPKIDYLFVNEAHKVIAPTDTRSPLYYHAILQAERKSIKLFFASPNVENPEIFLQLFEKSQDEKIVIKSSPVAKNRYFLDLIENKCLMFSELNKDYKLDMNFSNNDFFFWLKKLGNNDKNIIYCNSKKDTISYALDFSKNQPIKKSNNLESVKELIKEYLHDKYYLIDCLDKGIAFHFGNLPQLIREKIEWLFEEKEIDYLFCTSTLLEGVNLPAKNIFILANKIGLSKFTDVDFWNLAGRAGRMTKEMSGNIICVREKENKWNNQKEDLKVVRNKISKPFEPLMIKGQGKFFENIEASLTNKDFSNKSSSQSEKDIWNYYANLILIHEIKQDDSVLRTNFITKNKNALKILQEQKKKISVPEKILSASSMIKPKYQNEIYQSSDTQFLSSDFNYSVIVGVLQNLAEYYNWENEETGGKNPLYKPSEKIKYYAVLMDNWMKSKPLKMIISNTIIYYKNKGQIWENGSYIQFNYKEKHDINKVINLVISDIDNVLRFKLKNYFENYYMLLKEKLGALNAGANWADFLEYGTTDSKIIELQNIGIPRHLAQYILENHESCLLFENGLLQSINKNKLHQNFDIESNLYNEFCELFGFDKNTTN

SEQ ID NO: 56314 - protein, 315 aa, Sedimenticola sp. SIP-G1
MDKLKAINWSSLVAGKHSWIDDHLKVHSVLEDQKTVCRFISLDFSGTQQEMLALTEALAESIEHYVFDEKQLACFHKEGKVPFQKAMKFFGKTNPDMDGKYGELLLYLLTEKFLQTPLVSHKLSLITNTNDQVKGGDGIFFGDYKDELAILIGESKIHQGAAGAMEEALESLDRFYDNYSTGQLGHEMFIARSNISENFSSLDDVESLYQAFTPGTKQYKGCVKVHPVLLVFESNVISAIEEKAKNKDEAEQMFSEWLTGRSKKIQKLLGDKLNEYTELKKIYIDVFLIPLTNVSKFKHALYKEIHGIDYVSHKK

SEQ ID NO: 56315 - protein, 864 aa, Sedimenticola sp. SIP-G1
MTQIYSQAANHEDFIRVFDKLLEKLFLEDKVADNVQIDLDNEEIKKATWLASIAALSDDDKERNMANAFGALLHLTDRENEIYKRVCYILQSRAGNLITSSHIPKLFHKENTLSDYGTLLNFELAAHRALLEHEFSDDTKIFFTEFQKKLWESLNSGENIAISAPTSAGKSFIIKKYIMELVEVGAKNIVFIVPTKALINQVSNVLKSQLHEKAHVYTTYIANEEDNLATIYVLTPERCLKLLQDKNITPPELIFMDEVHNIEAGSRGVIFENILYRVISTWTSTQLVVAGPFINSLSDSIKKICNVSIIDHQTLSSPVFQVRSALTFFPNKKIAQYKISSPTQRIISGDIKLRKSLYSKIKTNKGEALEVIADMFSPEDHNIYYAPKKNLAEKWASKIAPVIASKNPKIIEAADSRVKDLIDFLSEEVHPDYSLIRTLRLGVAYHHAGLPDIVRQEVEELYSESIIKNIVCTSTLLQGVNLPADRLIVISPKVNSDDMPAFDFLNLLGRAGRANTKLYGEIYCIDIVDDEWGSKKLETEVNKTVDTSTNIFLKKNEDHLSVIADMSGDQIREMTGDKDIYGNLSYLRAIFKTDRNHFDRILSSSGVSSENVEDFSKKLESMYEGMTIPQELIAKNPFIDPILQNKLFGAIQAEGIENWLISRKPMTNGGRDSDSVAFQEKSYYFQLWSIFNRLNDIFNIEYEINGDGYAKDNYINIGRLVRDAHRWMTGKKHKFFILDLIGENNNDEKEVDKAARRITSHISTNLTFIAVKYLMLWADMVSYFLNEEEVEENAYILNLPSMLEMGSYDPVVLELMSCGINRSVALSISSKIKKIDSSAEKALSAINKEKLPNIFKRHLMKAGY

SEQ ID NO: 56316 - protein, 167 aa, Lactobacillus sp. wkB10
MSDGIHYLKLHNPDRYHIIFGEAKMYKNLSKGFKSAFKSIADHQSGKEFEKSLISSQIENEFIEEVDKKMINAILYPSDSEIKIKVSDAFGIFIGFEIDNTEGQTKTEDDYEKWVKNKIVSIVKSRTATIEKYITENKLVGDNFYVYLMPFIDLDESREEITKGVIE

SEQ ID NO: 56317 - protein, 839 aa, Lactobacillus sp. wkB10
MKKPAKKSTIIQELNNQAIKDNYLYKLLRKIQYIYGANLFDKDTEELSEKELFDILRFSDILSRSEESLNRNIALKIISTLFDDHRNEEVYQLFAQNVMVKLGNFPSLKLLENSEIKFNNKEIAFEKILKEISQRTSVNEMVFTDSQYEIFNEIKNSNHYSFSAGTSFGKSFLFSEYVNWIIREKNASENIAFLVPTRALITQVTEDLENNITDKKYKIVINPDIPTIFSNNKFIFVFTPERLVSYFSKSTNPPIGTMIIDEAQNAISDNERSPIFYHAITLAVQKSVKLYFASPNIPNPEIFLELVGNSTLESKHVLDVNVAQQRYFVDFNSNKYRIYYDFIKNKEYDERDLKLSDFDDLLVKMTFGTQSIIYCNSVRFTVERAQKLSQRVRKSEDKSLHKLSKFIKENIHDKYYLAELIEKGISFHFGALPQEIRKKVEALFKQGKIKYLFTTSTLLQGVNLPAKNVFILSDKIGMSNLTDFDFLNLAGRAGRLSKELYGNIFVIRLDQASKIDELFKFNKMKKVASKVLSGRGNFYTNIGNILENKEMTNKNMPAKQRREIADYAAILTYQLKRNVPSQLVDKFNQKNRNSKKLIKKMKDMNIPEDALMVSTTIKPLYQEKVFVLENPHMFKSDYTVSECQEILKALNSTYKWSEEEDGRYLGNEKRFGYYSVLMSEWIQSKPLNVMIRSTIKYHEKNKVKIAINGNPKSQEIFSINNTYHINYVINELFKDIENILKFKVKNYVVNYLKLTNQDDSEWQNYLEYGTNDKSIIELQKIGFDRTIAMELSNQLKKNVDFRKNFEFNEEGEIKRIDTESILKSSITSEAKNQIKKLLK

SEQ ID NO: 56318 - protein, 298 aa, Veillonellaceae bacterium KA00182
MSHKHSNNIEINNRLHIYYISFDLLDSGYGQVKDKFYDELFDDIPAFAFGTDVMNEKKDKIGLVPTVREAMKKLYTIKEIQEASREYLNSNSTEDKYIKRGEFGELLLYHLLHEYFRADALISKIYFKDSVGSVAHGFDAVHVDVKEKIIWLGESKLYKNPKTAIDELAKDVENHFNVNFLDSEFQIITNRIHDSKAACDDFILELLDPNTKILRKLANINVCLFAAFESKSLVNFNKDNFEKTLKEEVEKLDKKMNTLLSQHLWANYLNVYLLVFPLDNKREFVSSLHQKLKGGQQI

SEQ ID NO: 56319 - protein, 711 aa, Veillonellaceae bacterium KA00182
MNDSVKFNADYLKDFEYNWNCTKYYSSVIDTTEARKFLINVLENWDKVNNEAKLIWLDLVERAGFYPYYIDKIKNIENYNQSLQSSIRSTFFKSEYLNGVYFHEKQKEIEIAINLKKNVAVSAPTSFGKSLFIEEFVARKQYNNILIIQPTLALIDETRKNMYKYLDYYNIVINTKQKATDRNIFILTAERVLEYEAMPKIDFFIVDEFYKVSNLRNDDRVDALNISIMKIMNDKPQSLFLTPSVNSLSDKFIKIYDVEFFKTDYSLVNTNIIEVRKNNKPFKSKEKKQELFKLLKELKEPSIVYVKSPNEAYKLANEYIDYLKNVDVVNRNLPIFEWMDENISEKWDLKKLMKYGIGAHNGALPRHIVSSEIEMFNEGILQILFATVSLIEGVNTVAKNILIFSNKKGVRVIDFFDFANIKGRAGRMGKYYTGNVYLFNEQLLPEDFSIDVPFIDQNDISNEILFNIPDDYVEDRNRKKSLVSGIPEELQTIIRKNLISVEGQKKLYNYIKSNVNNLSYLKWSKIPSFEDLWKTLNLAYKFLENNNNEKFAKLQALMSLDIVNRPLKEVIYTRGEYIKKTDSNKNFHEKAIEDVLKFVRNDANYKIPKLLSVVESIQRYVFENIHNGISGDYSIFSSLLENGEISENFRFLVDYGVPLSAVKKIEVEFNKCNKENYDNIFILQWLKQNINIFNSILLEYEYNLLKKSLNF

SEQ ID NO: 56320 - protein, 335 aa, Flavobacterium sp. 316
MSINFSDLISINKKWFNKDFNHHYTKNINDKLKVRLYTIKPSGTIVNSNSLAESLFDILPDYFKSKYEIEKEIQREIDKTIDDYTTATDIEQREIALKNVSVRTYRQASNFFKTKSADSKSGKYGELLLFGIVEALLNCKMIAHKITNLTNVHDEIKGGDGIFMGEYTLASGIKNTAYLIGESKVWQSYSGAKKDALDSINRFYDPKVQSTFNSLEFFIAKKDINKVFDSDNIDIDELYDRLDPKSELFKKQIAVHPILIMYDTKGYNNLMVKAANNEELINLINNDVQSKLDKTLDGIKNKVKEYSELEKIYLDFILIPTNSVKSFNQTMDELI

SEQ ID NO: 56321 - protein, 885 aa, Flavobacterium sp. 316
MEKSNLTTQAFKHAILDKLIYNLTLKLLSKTFSSVVNINIDEDELKKGVWLVSILANSENQIYQRKAQLFTSLLFLNNQENIEILKVCYIIFSRLGNLTATKFLKHLYDHDESDPIELKSKYDFGDFLTKELIYEREKKIIESQNKSYLITEFQKELWQGLKLNSEISISAPTSSGKSFIIKKFLVDKLFNEKKYRVLYIVPSRALINQVSEDFISEINNEIHIKTTYVEENEIFDKEIYILTPERCIKILSSDLEIDFVFIDEIQGIEDIGGRGQTFEYVFNEISSKYPKTKIVTAGPNITKPEKTFLEIFERESSPISTKLSPVFQVKLTLKNIEKGIFEVIVQNDINKNQSFRHDFNFDFSKLKSLGDQMAHLVDKVAPDDFNIIYVSDGDLAQQWSIKYAEVKKSEFKLDYEVQELIDFLKEDIHKKYFLIECLKKGIAYHHGSLPDIVRKEIETLYINEKIKTLFCTSTLLEGVNLPANNLFTFQPKKDNSPLTKFEFGNLIGRAGRLNSSLYGTVYYLERYDDKIKASEYLNVEYEKEIEIFSSNAFSDFEIDDLKVAIKDINKSDKSKTNKVRQFCVFLRLKYLKDKSFVEKFLTKKGFSLNKIDEVLSVLDKSLSNINLSYDVLKKNPTIDPILQNELYIAILNSNITDWVINKNSNYNEYLDSNEVSLMPNSEKPFYWQFINLIERLDSIFDIKSEALIKHNRWVTPNSLSVQAKKWLASLPIGQIIQENIKYQCSEKVKEEFRKNQDSLKDINSIINDTIKYNSSITTHLIPKYTKVLADILEVILSDKQKEEYKLTLSLPTFLELGTQEPMVIQLISAGVTRSVAIQLNKIYKKNTTKEYRDNNDIWKWLYNRNEIPELKPIYNRYLKRLKIIN

SEQ ID NO: 56322 - protein, 539 aa, Pseudomonas helleri
MDSSNAGGVAAKLGFLYQDCAAALFVTQMLLDKRIEAVRCEVTDDIDILYSTHTEFVQVKTSDKPRWSISTVTTRARGASNNLIADSSIVHKSMQCASAPLDKCKFRILSPRDCKDPLDFLEIEISKRDGKSGRQVLIDELSSKLKNYVAPAGNTVSDWVDSCWWSVIPSLREIELTALNNIRNAALSLHGVILSAESVVESIWANILITMTKKSALDRRVYTEDDKTYHRDHFLAWFKAEVLFYDRSNSHSKVYVHRKLPSVLVQLQAPFESPVLTRNGLALHQRYQMGEYRYEHIAKNICHWFDELLLRPSEIADFISSSATEKYRVLRARLTDSANDLEQFLGNALLHSVMRLRHESQPIPATLYLDSKDDLKVFENVHIVQRNKGGDELWLGVSKLTKARTVSQVLNALRDALYDDIVNGLDGVREKVLDVKEDSYLLNHDVDEILDTSNSFEDHLERFRFVVFFGYESSLLTIPETKGHESSLYEEAYELFVEFISDLKKNPVYAQLNIELYIYPAPSFDDLCDLLAKKMRDDK

SEQ ID NO: 56323 - protein, 730 aa, Pseudomonas helleri
MNRIYDSARLLLDTNDSSAFTYLRAADKLLSNPVSLHMGRDLVIRALDARPRFSSYTPLLRNLVRKAGLYPYLKKEFQDISASERAALGIYQTPFSDEFVFHSMQFQVFELLRSGRNVVLSAPTSMGKSAIVDSIIGLGLVRRVVLVVPTIALADETRRRLQERFGQSYQIIHHSSQEASGGKVIYVLTQERVNERKDIVDIDFFVVDEFYKLAFQQRASGKIDYENERVIELNIALSKLLKASKQFYMTGPFINSVTGLASLGLEYTFISSDFNTVALDIESFDLSPNDDVGKERAVLAIAGQCRGEATIIYCKSSAIAGGVARSLAQNGFGTEFNSPHLDWVAQEYDSDWDYCVALRNGIGLHFGGLPRALQQYTIDLFNRGEINYLICTSTIIEGVNTIAKNVVIYDNRDGIFSIDKFTHGNIKGRAGRMGVHFVGRVYCLESIPQDSFNQGVDIPLGIQDDTTPMNLLVGVQPEHLSDYSQSRFERDENVDEFGVDLLKRHSSFSLEAFREIYSFVEMLSETDLQSAIFHWMPSGAFLDVLAVALTRFQAGALRRVRIPTKNSSVIHAKLTNYLYTSEYAEYFKSQIDQAKGRLEKGEVEDLSTCINDDLKVVINIFGHTVPKLLGVLEDVVKLYAKKRHINVKIDYSRLRGIFEHYHLAPGLAGLEEMGVPVQTLQRLNTLIEPPQDLDVDEMAQFLRANETRWISLGTVDRSFLTRTLYPNLRR

SEQ ID NO: 56324 - protein, 275 aa, Parcubacteria group bacterium GW2011_GWB1_45_9
MTNLPSDITERAKNLIFKFEFGGFDFKNIDGGQPYTLNYEQKKYRQDELVSLLFSALPYFALTEAEYSEFHELKKSPSYYDQTAINRIVKPGKKAGDYGEIILFLLLELFYGSKKLVTKVFYKTSNSLPVFGSDATHFTKEDGKITLWFGESKFYQNFTDALDAAFESIDGFLKTKIKGEVEFLTPSRVEINKNTDKDLRDEVIKLIDGKPSLDDVPIKVPVLITYELAELKNFDDVAGSHFIEKMKAEFESRYQQIQSKNWQKQYKNVTFVFRT

SEQ ID NO: 56325 - protein, 756 aa, Parcubacteria group bacterium GW2011_GWB1_45_9
MKELESKIKKSLSRIKTGDSFSDRDLVIWLKDVYKLLDNDNEQSYNLCLASICFIADRNPSDPMVVAILNEAIIKSRIFLYRDMLEKQSSGFLENNPISCVSEFTKWFYTDPISGTVLTKSQREISELFKKQKRLVISAPTSFGKTRILEELILNNNYGHIAIVVPTNALLSENYHRLKRNLLISDKYGIIYSSKIGRNFDLSGNMIFILTPEKLLNLLDEHQITFDFFVFDEFYKISKDFESGESGDYDRRYKVFQYALYTLVQNTNTDFYMIGPYIDKFSKKFLEKENAVFKEYKVEIVQKRIFLEKSAIDKQLGINLLKDKKKSAYKVLDKLREQDQLNLIYVPRQETAEKLARAYAEHLDDSGIDLSENVELKDFIRYIKDNISPEWNLIRALKKGVAFHHGGIPRYIQTEIISLFEKRIIHSLICTTTLAEGVNTSAKNVVVYEAKKSKENLTTFDRKNIEGRSGRFNEHFIGNVFYLSKPMDQERETGVDFELYDSPNLRQEDVILVKNEDLSADNLKNKEQALSKLQEKNIPQGLIQKNRFINIDKQISLIESLRTDLDLPFKEIKNNNEFINNKDLCDLLFQNVFKLANTDDRGAWNGYTFKQLSWLARSYMFSPYFKTLVGHKLFESSKNIDTRIRRALRLMSQHFEFLIPRYMQVFQEIYNFVAIERNARNIELGRVVSLLEYGTADQVEILLRDTGLPLEIVNKIKKHFRGCEDANAILARRKEKDGELRNELDEFELRLMDRYL

SEQ ID NO: 56326 - protein, 293 aa, Parcubacteria group bacterium GW2011_GWD2_42_14
MAIPGTQELNTDGQVNVPEDERLFCFCIEELASETYLNDFLTGLNDFLPSYVFDRNTLATHEARVRDGTSTTTPIDRAREFLQRTQAGRAFDSGELGELLLHLFAKEVLGAHKLASKIQSRGDNRTTIPGRDNAYAWMDEEDNVYMLVGEAKLKPNSNDGLREAQGDLNHFWQTARIEHEISLASTHIRSEMTEENLAMYEAFFIDDNEAHQRLRYRNIVFVGYNHNSLQNLRNQTIDDEEFIRLTSEDLQRCLTNQQTLISESPHHGIYCFLPFESVEAARTAFAQINGLVV

SEQ ID NO: 56327 - protein, 890 aa, Parcubacteria group bacterium GW2011_GWD2_42_14
MPPLNSITQLSSQILESEAFINRFLQLQTYAGQSRLSFDITDLSDAVVSKLLFQGSVLAMSDDVPHKKVSQKINALLFETKADQPLVNLSIQILSSRLGNYPVISEDSEVFGEQNIVRKLNDGADVIEVLDPEILGSLSFEEEQARLLINNQVFHFNLYQKEILDELADKALVSFSAPTSFGKSFIVRHHLAREYAEGRTSKVLIIVPTKSLIDDFHESVSSLKRRLGLDFSIYTHARSVEEVPERSVFILTQERLSFLIEKNPDFVRTFQIVYCDEAQYISRGYRGFVLRSVLRRVIDLCGILGVNGNTQYIFSSPLIKNPEYYKERFFPELTEDHFFHKEVLYSPVEKNIHFVTKGSVDFSYSLLNDSSNQEGFAEKIQELGNRTFPQQLRGNNNSVEKEIERNIHVVLNSNLGSGTILYTTSPLKTHEYAHKLAEILPEKNILNQREILDITQYIRDHYDESFGLIDLIRRGIGLHYGRMPIGLRRAMVRLFENRTIDYLVCTSTLLEGVNLPAKNIFLFSNKHNGNTKHTALSFWNLVGRAGRITFGLSGNIFCVTQRMEEFRELFEKQDSEIVDPETEVSDNQTRRNYVLSSFLDQEKRFDYLRSRSRSDIEYLIYELLTVNNIEEIVNRFKLPEEERVSLMQSIQIEKDSLQLPVNVLRKNPGIDPRLQDSLLTLLEGLTQLQLRTLCEIAANPLAVNKLSLKHILEKTGETLQWPQNGQFDEVDTTAGRISQWLHELSIAQFIQQALRHHQDATPIERVEKALRVVDRLDKDLSYNAPKYIKCFYDLVLYDAQRRGMQDLDTYEERIESFLFSIESGVSSFIGRFLFERGVSRPIAIKTNFLVEELAGGPVNLTFFEREDVVRALSEGLSRIAFDELMEHLNA

SEQ ID NO: 56328 - protein, 318 aa, Burkholderia sp. LK4; identical to SEQ ID NO: 56136

SEQ ID NO: 56329 - protein, 851 aa, Burkholderia sp. LK4; identical to SEQ ID NO: 56137

SEQ ID NO: 56330 - protein, 482 aa, Rheinheimera sp. KL1
MTAGALDDYKLDSIYILQTLSNDGHTKRGTCFSVAKDLLLTASHVVEGAKLIKVYLTSDVFAAGQHIEAECIYRNLDIDIAILRLPKDATSSVLELYSTSVSLDSELKICGYPVEKEHYPAPIKVKVTNSFEHMTSRQYSFEISQSDTVSKYSGMSGSPVLYKHYCIGILLVQQSTNTLYALSTKDLLSDISIREKIEAYGANIIVQEGIDYKAPPCPLSPFKYDIYCNAEHPNIKGVDIGFTMKQWNLGDFAESVYDWVVDYCLSYKDKANFKGSERRLFKYARANYPENNLNALADLCLHIAIRESYSTIPIMNKVFDINRKTFSCTHAVLNFDSIELWIGASSVSANVEEAVSVVVSNIEYILNIKNIKNRLIMLTTEIHDSWPHKEKLERLANSELELEERFDKIIIPVFIMHESEIITKYEKEKFKELFLESIQKFRYLFKLEANNRLDNLIDLRIFYFPVSDLIEVNTALLKELNS

SEQ ID NO: 56331 - protein, 723 aa, Rheinheimera sp. KL1
MSDWYQNAKTLLNDEFFTDWDDFLLSLVNEFNRHSNQPLVQDIAIRALERKNDMPNGFILNHILGELGLYPYVDKENFTSKDDFRRSIFTTPQDKSKTFHIRQAEVFHRIMSGENIILSAPTSFGKSLIIEAVVASDEFNNIVIVVPTIALIDELKKKLFKYKNKYKIVTQVSQKASARNIFILTQERVLEYDSLQGVDFFIIDEFYKLAPVSQVDERCDRLNLAFKLLYSKCSRFYMLGPKINGLVYGIENELRCTFLKFDTYSTVATNEFYYPLKVTGRDSVVDVERDSILYSILSSIGRKEQTVIYCKSPHRVSSLMCRLLKNGILTPDNSNNDLANWLAENFHSKWSLVEGVKHGIAYHHAQLPRAVSALIVDLFNDSKINILICTSTLIEGVNTNAKNIIIYDDCITKRTKLDMFTFNNISGRSGRMFEHFVGNVYIFGEKPQVELPLIDIPVITQSESASESLLLNLGDDVYEENKGRVKKFYEQKILPMSLLIKHQGIDPNKLIRFAEKLIENCNSWNKLMCWDGIYPTSKQLQHLSTILFENFNVSSMGGGTVRSASQLNRKLIDVINQVDDKELICQDYEYWIERDNNYSVDDAVQAVFNFKKNLVNYNLPKIIYAISDIQEIVFQRFEYSFGDFKPFASALENFYYPAAINSLEEFGIPSQVAKKIVVYNRNKIENIDSIDSVIDFLTTSGQSSYGELSEYELGFMKRALAYM

SEQ ID NO: 56332 - protein, 299 aa, Chania multitudinisentens RB-25
MDNHLQPQLKNPHELKNVLREVPVSYELSDGRVIKTLLVYLPTKDGVSYHSTLFEKIREGILYNFVFSCTEIQKKLGVDDNKSAEKLFEKAIRKISQHTAKGELGELLLFTLLDVYFKAPKILSKISLKTSRRMPVFGADAVHAQFHDGKLMLYLGESKLHADFKSAATKATNSIKSAKEKYVDEFDLLDSYIDFPNINPKLEAELLDLLDPFSSNDIASIIHSPCFIGFTEPGIISGAESEDEFLKKYTDLACDYISDFFGKAEKQGVDINETTLLMLPFSCVDVLVSEFIAYIGIEK

SEQ ID NO: 56333 - protein, 835 aa, Chania multitudinisentens RB-25
MSNFINKLAMRVIKSEGYKEASKSLFSSYVLNFTGQESKFDRKEISKLISSAQIFYKSELEEIKKEGAIILSMLLDICAADNQDLIPIANSIFSNSGDFPNIQLLTEKHPQLNFKYNFYTEAQMEFRQSLNTIEELDFPLTDYQRSLWHDLSSDKDVITAAPTSAGKTHIILSYLMKKITDSDGAFAAIIVPTRALISEVAGKIYQLAQESNNENEIEICTVPKEGYFGEKTFFVMTQERLHEVLQRGDVYFDYLFIDEAHNITDKNRGVLLHLTIEKMLEDSFPQVIVSMPSPSYQDSFTSIFKDIEFKKKLTQHSPVAKIVMSVVPKGQELIISRHNSSNVKHIKKGFTATHLADIVYKLGKGQSNIIYRNKTNYCEDLANEISKRIVEITRDPLLEEAADYVEKFVHNEFSLADNLRKGVAFHYGPLPSSIRIMVENLAKSDNIKFIACTSTLAEGVNLPAKNLFLKNPLQPIMNKPSERIENVKINNITGRAGRMLQHFSGNIFLIEPDSWTYKDYFNDVQEEEEKIPTYFKSLNEELDSVLLALKGSYAHNEKDQYRFYTIANKLIKEYSSHSLNNTLSAKELTLNEKERDSLVKYVKSAYDDLTVASFTLEANPTIGYIQQNKLFNFLSEQTHFDEWILPHPRSVNLYDVLLKVGNKLKEFGVYTPNEGYSLDYICVITKKWIQGNSLKEIISEQIDWDKKMAYDNNKSAPSINTSVRNVITVINNDVRFRLSNALRCYQVLLTNILLSRKVDLSSVKLHYFIEIGACDERMINLINMGLSREAAKEIDSKLHASVQITSTKDLLELNLSGKLESIHTITKKELLGLLT

SEQ ID NO: 56334 - protein, 300 aa, Enterobacter sp. GN02174
MLLPIRVHKRFLDLFKTVHIDSSPQQSTLNLHILNIESNQFIYPKLVEELRELIISYVHSNRRIEEFHENYSRYSPKPFFEAIQKFRNYSSNEGELGELLLYAFLEAGLNAPKLLSKMELKTDSNDYIKGSDGIHLLETDDSFQLIFGESKLYADLLEGAREAFDSIVDFKANGMGYERGLIDTHVINEMVSEDGYEKIKSILLPSGNDGPDLDLSFGIFLGFELPIDSSILSMKNKEFREWVNESVKDHASRAVKTIQRKIKNNNLFGHEFHIYIVPFTNIETTRKKLIRDMLTIEGNL

SEQ ID NO: 56335 - protein, 856 aa, Enterobacter sp. GN02174
MNELHSSKNVHLAARLAEDAFESPYFKETYKYIRTLYDETLFDWLSERKLEKTDNIKIAHALRFADILSHSSKEIYRTYAFEIISKIATFKKNDPYFKFVGLAVINRIGIYAAEKLISEGVILPLDREIDTIVKKSVQKTDEDGIYFTDRQYELYQLLKSSSTISFAGPTSMGKSFVINAYIKEIITSRTNKNIALIVPTRALISQNALKLKTEIINTSSINSYKVVTTSYMFDSNNPKGYIFILTPERLVSLISTIPELKIDYLFVDEAQKLTTKNDSRSLVTYSAIEQTLNSNPDTKLFFSSPNLSNPDIFNSLFRRKKSKTYKSTEGATAQNMYFIDLIKKDFSFVNTQERTLESVESDFSQFKIANDVIYKLNHGKSKIIYCGGIENTLERTREFIKYLKKRKNFKRQNTEIAAQIREFVHDNYELAEAINYGVAFHFGNLPQSIRDLIEHHFKMGNIDYLFCTSTLLEGVNLPARSVFILTHKKGISPLESVDFWNLAGRAGRLAMELSGDIFCIKDEEKTWDKKAIDNILLSDKNDISLIPSFYIEDKKRLNELHTIISTGETENIKNSEFLRTLGDMIRIDTMREEKHLPLIDYFSRSDKPEIILSAKKSTKNINIPLNILLANSHIAIDSQHHAFNKIKSMTINELKLPWKPTYEEIKSKLNLIFEIYQIDKFATGQNRLYSKSIPYYAVILSQWMYGNSLQEIISGAIIYKKNKYIYINKIKVPFDSSNPSHITALVNETIKDIELRVGYQLQNYISHYCQLMTHLLHGNPGANWSQFIEFGSNDPIVWHLQMMGFSRDSAVYLKRNFSKFLKINTESNKLTISNKSIIKDSIKKNRLYALEVQSLL

SEQ ID NO: 56336 - protein, 315 aa, Marinobacter subterrani
MEKLKAINWPSLVAGKHSWIEDHFKVHSVLEDKKTVCRFFSLDFSGTQQEMLSLTESLAESIEHYVFDKKQLASFHKEGKVPFQKAMRFFGKTNPDMDGKYGELLLYLLTEKFLHTPLVSHKLSLITNTNDQVKGGDGIFFGDYKDELAILIGESKIHQGAAGAMEDALESLDRFYDNYSSGQLGHEMFIARSNISENFSSLDDAENLYKAFTPGTEQYKGCVKAHPVLLVFESSKISTIEEKAKNKDEAEKMFSEWLTSRSKEIQNLLDDKLNKYPELRKIYIDVFIVPLTNVSKFKNALYREIHGVDYVSNEK

SEQ ID NO: 56337 - protein, 864 aa, Marinobacter subterrani
MTQIYSQAANHEDFVRVFDKLLEKLFLEDKVTDNVQVDLDNEEIKKATWLASIAALSDDDKERNMANAFGALLHLTDRENEIYKRACYILQSRTGNLITSSHIPKLFHKDNTLSEYGTLLNFELAAHRALLEHEFSDETKIFFTEFQKKLWESLNSGENIAISAPTSAGKSFIIKKYILELVESGAKNIVFIVPTKALINQVSNVLKSQLHEKAHVYTTYIENQKDDLATIYVLTPERCLKLLQDKNVAAPELMFMDEVHNIEAGSRGVIFENILYRVISIWASTQIVVAGPFISSLSDSIKKICNISIVDHQTLSSPVFQVRSALTFFPIKKIARYKISSPTGRTLSGEIKLKKSLYSKIKTNKGEALEVIADIFSPEDHNIYYAPKKNLAEKWANKIAPIIALKNPKIIEAADSRVKDLIDFLSEEVHPDYSLIRTLRLGVAYHHAGLPDIARQEVEELYSESIIKNIVCTSTLLQGVNLPADRLIVISPKVNSHDMPAFDFLNLLGRAGRANTKLYGEIYCIDVVDDEWGSKKLEAEVNKTVDTSSNLFLQKNEDHLSEIADMSEDQIRDMTDDKDIYSNLSYLRSIFRTDRNHFDRILSSSGISIESAEDFSKKLEAMYKCITMPQELIAKNPFIDPILQNKLFEAIQSEGIGNWLISKKPMTKGGSDLDYVTFQEKSYYFQLWSVFDRLNEIFNIEYELNNNGYAKDNYVNIGRLVRDAHRWMAGKKHKFFILDLIGENINDEAEVDKAARRVTSHISTNLTFISVKYLMLWSDMVSYFLSEEEIEENAYILNLHSMLEMGSYDPVVLELMSCGINRSVALSIASKIKKVGGSAEKALATINKDKLPNIFKRHLMKAGY

SEQ ID NO: 56338 - protein, 320 aa, Bacillus sp. TH007
MTSQIPTQEDYLKGYLNKMIRGDGSELDAYVSAVEKGKIVEDTHATARCYMINFNGQDFPRSKDLGKVLVEYLLDYSIPRHEIRKAQSKDFEMNTTKHIAALHQKARTLFTTVSKTGEPGEVLLYLMTQSILKLPQAIAKMSLKTSSQLHYNGADGVHLGYDSKNQKLNIYWGEAKLYQNHGEAIKNCFESLAPFLAADGSNRVRDLDLLTSNLSTLEEDFANALINYLDPDHPSYNSLEFKGVCLIGFDYTKYPKKQRLKKQQQILSEILKDLDNWINKLKTAINSHLDLNKMVIEIFIIPFPSVSEFRSAFLEVLNSD

SEQ ID NO: 56339 - protein, 847 aa, Bacillus sp. TH007
MIDITQLATRIYNLNGFQRMFEPLLKLSIQSQFTQIKNQNECIDLPYLLNCAGILADSNLAEHLDVAYRIAQFGIQQEDDELAVKSALILEKMTNHPSIELAINKGYIGVDYIDQLPLLTKLDLMRRNIKYSLWDETENKLVNINKFQYDVIEKSYNTQLLSISAPTSAGKSYILLNIIKETLLNKAQTTIVYVVPTRALISQVESDIRKKLRMPEFHNSFITSMPIMDELLEGYDKRVFILTQERLQWFINEKRDFNIDFLIVDEAQKVNDGSRGVILQNVVEDLIYENKDIKVIFSSPLTENPEVFLQPLYEISSMNTVQKELIPVNQNLLWVNPIYRKPREWEMKLCFKNGTYDIGKFNLKNKPKNTIERLIYIVYSLGDNSGGNLVYTKIPSDAEKAAEKLYEMLPNEESLDAELIELRKLIQEVISTRYSLCKLITKSIAYHYGNMPLIVKSEIERLFKAGKIKYLMCTSTLIEGVNLPAKTIFIRTPKKGNTIPFTEVEFWNLAGRAGRQGLEFQGNIVCIDTNDNSVWSNPPKMRDKYKIEFFTKKIIKEKFHELVEYISKDAFKEDIYNLDYEHTISYLLKVYSKNQSLITKSLSQLINEDQIILLEKTLEKLIEEIDIPNDILFKHSGVSPLAQQKLKNFFQKNVDILDMLEPINPTLPDAPDRYELIIHIIQKVIPFDHVNRARYLAFLVTDWMKGLPLNYLISKNQQYWDKNGGKNPQRVIRDTFKDIEEFARFKFIKYISCYKDILNMVRQQNNLDISDDTDMLKLWLELGASSKTVISLIGIGFNRSTAIEIAQQIDSEHLNRNEVLDYLLRIDTTGLNKIVEREVAQVIDFYN

SEQ ID NO: 56340 - protein, 286 aa, Clostridium sp. C8
MWTKGIDNYNRNKISLFLLKINANEFDYDLLVNNLLEPIADYSISRKVKEEYCDKPMKLSKKARERFVNYARNNGELGELLLYCFLETHLKAPKILTKLELKTSTSHYVNGADGIHFLKLQNGNYQLIFGESKTIEDLTAAISDAFKSIYEFKNEINEKGNSKSGINYEKGLISDNLIKETFSDDEKQFLEKLIYPKKDSNFEVDDAFGIFVGFQIQVTDEDKKMPNDMFRDKIKKQIEFEVNKRLEHINKKIDEYKLYGHNFYIYVLPFTEMSEKRKKVMEELTK

SEQ ID NO: 56341 - protein, 848 aa, Clostridium sp. C8
MKWIESLAQKAIQDPYFKELLEKIETKYAYKFLKVYFNINLSEKEYNDILRFADILCRSESAEAKNKSYKIVSLLYEFYKEDVQYKLYASKILTKLGNFPSLKLAIGEENDLGTTEIILEKYTKQVFQESPFEGVIFTDPQYRLYEELKKNNHYSFSGPTSFGKSFIMEAFINYIITERCGVDNVVILVPTRALINQVSNKLKAQIKNERYKVLSHPIVPIIYRKKEYKYIFVFTPERLISYFANRDNPIINYMFVDEAQKIISKKDSRSPLYYHSVLLAERKSVKLYFASPNIPNAEVFLQLFEKSSEEKMVIEESPVSQNRFFIDLIRGNVSFFSEYGKEIDLITGDIYNRASLNDILSYLGKGNQNIIYCNTVEDTIDFALSFAERLQESRDERLDEIIDLIKRYVHKDYYLIDCLKKGIAFHFGRLPQRIRERIEILFKDKAIEYIFCTSTLLEGVNLPAKNIFILSNAIGLTKFTDIDFWNLAGRAGRLNQELCGNIICLRAVDKLNRWDNLDKDLEVVKTKKIQKVIPSVISGEKNFYKNIALSLQNNEFTRKNASQTEKDIWNHYANITFIHQATSNESLLINKFLKKNKEAKQILEKVEKQNKIPQYILEQCSTIKPIYQNSIWNMDDKEILFLDDNLSVDSLKLALNKLYQVYNWGKEESGGRNPLVKDISRLNYFAVLMHNWMKGIPLNMMIINLIKYYSEKGAIWDQDQYVNFNRNSRRHINIIINNLISDIDNVLRYKLKNYFLNYYLIISEKYKDKKHISNWAEFLEYGTTDLSIIELQNIGLPRHLSLFILENYSQCLTFEDGKLVEFDENLLKTLITEEHKEEYIELKEYLNW

SEQ ID NO: 56342 - protein, 538 aa, Citrobacter sp. MGH103; identical to SEQ ID NO: 55084

SEQ ID NO: 56343 - protein, 729 aa, Citrobacter sp. MGH103
MTELYEQAKNSLQGEDFSSFNYLFAINKLLSNPVSYDLGRDLIVRALDSRERFSEHTTILKNMVRKSGLFPYLKKEFTGLTPDDLRVLDLYRTPFSDGYVFHSMQFHIFDLLKSGQNVVLSAPTSMGKSAIVDSLLGMGTLKRLVLVVPTVALADETRRRLQERFGDRYQIIHHSSQVCNSDQAVYVLTQERVNERDDIIDIDLFVIDEFYKLAFRQLKSGKVDHQDERVIELNIALSKLLKVSRQFYLTGPFVNSIRGLERLGYPHTFVSTDFNTVALDVQTFGIKASDDEAKLKALAKIAHACVGATIIYCKSPTVAGRVARELIRLGHGTLTESPHIDWVSQEFDADWDYTVALRNGIGLHFGALPRALQQYTADQFNAGKLRFLLCTSTIIEGVNTIAKNVVIYDNRDGPRSIDKFTHGNIKGRAGRMGVHFVGKIFCLEEIPEDSLNQEVEIPLGIQDIDTPINLLASVQPDHLSEFSQDRFDEVFINERVSIELVKKHSYFRVEQLEVLQSMFEMMDDTEFASLVFHWTPATNFLKTFAKIIARLVPSTFSRNGVPVNPTDVMVAKLACYSNAASYSEYLKNQIDRARQWVSEEEKRSLSIAINNDLKLITNTFGYTLPKVLSLMEDVVKYHALKRGIRSKVDYTHVKMTFENFHLPPGVSALEEIGIPIQTLHRLVDLLEFSDQADVDGLCQYLRDTQDVWSRTIGFVDQTFIRRALGIEQH

SEQ ID NO: 56344 - protein, 305 aa, Enterobacter sp. BIDMC87; identical to SEQ ID NO: 55052

SEQ ID NO: 56345 - protein, 676 aa, Enterobacter sp. BIDMC87
MNNEITSATDNDGEHVAHVFSKCKEINDLINSDKEDEARNSLILLLDYHKKHKIHYTPLVNHLIRCTGLYPYIQAETADWNERLIYDLFKVDVGLNTPITLHREQSLILKRLLNGESLAVSAPTSFGKSFIIDAFISLNKPTNVLIIVPTISLTDETRRRLHKKFAAEYKIITTADVSISQKNIFIFPQERAISYLDKINELDLLIIDEFYKASENHDKERAPALLKAIMKFTKIAKQRYFLAPNISTLKSNPFTKGMEFLKLDFSTVFLEKHDLSKQINEDPQKKSSFLLDILENTAGKSLIYAGTYSNINKISAAILNNHKKSEVKLLKEFSDWLRLNYSQKWMLADIIEKGTGIHNGQLHRSISQIQIKLFEENNGLKNLISTSSIVEGVNTAAENVIIWQSKNGNRNLKDFMYKNIIGRSGRMFKHFVGKIYLLSPPPKEEDNELDLTIPNALVGDIDETEFKNDLTPEQISAIIAYKEEMQSLLGFETFNRLQSEGAFKSNDPFLIRDIAVDISMNPSDWLSISYLNSENPESWDYFLYKIIKLKPAGWGVEYNKFVSYVKIASYNWKLTIPEILRKLSKHNITINELFELERNLTFKLSSLLNDVNVLLNELIPNRNTDISPFIYKTSNAFLPPIVYQLEEYGLPRMITKKIDDALNLVTCSPLISTPRC

SEQ ID NO: 56346 - protein, 278 aa, Shewanella sp. Sh95
MNQIYWFQQNISYPAGASHRGVSIKYVDIQERRSSFIRELKSTALNWVYSTEKYNQLFAQEMQARNGDVQNTCSYLMQVADHKFRKGCPQGQYGELLLFNFIQHFFRAPPLLRKMSLTTNPGLERHGADAIHYREDNISQCFILGESKCYESKYKFNEALQSSVNSIVTSFENIEDELILYQLDDFIDPNLQEIARKLKDGTLASPRFELVCLIAYEETQNIDGHSQAEIQENIEECLAYRWKNVNNNLYASVRSPIIERIHYVVFPTWSLSDLLNEF

SEQ ID NO: 56347 - protein, 834 aa, Shewanella sp. Sh95
MNFKVYELMTDRTIIRELLEIELNNFAIKINLINSEYKNIPYHLCIAALNLLKDISNKDDSDLNRQIAICIISLLWTHSEESIKDNLRQIITPILSTMGFSPSAMMLDKQLQEAGVYSPISSYIDKLRVLIHDRKNQINIGKKVYTLTGFQSELWRAIEDNKLIGISAPTSAGKSFLIYLKLIDMLKRGARKFVYVVPTLSLISQVTADISKLMREHEIIGIDVLNSYEEGLDEFIYVVTQERAISLFSESRVSNLNMLVVDEIQNIEKVANEGEDRSKVLYDVLIDVRNDADVDKIILSGPRLKNIGGLGFRIFGQISEEMQTDSPPVLSLTYSISEKKGTYLLNLYSTLFDVPLQKVIENSNHINGLGQVQYTQKFNEYLHKTISCLSDDVNVVFSPTSTQARKSAEQFSKYKNPSESNVLQSLSNYLKDSVHSKYELAKIVKSGVAYHTGKTPMHVRKSIEYATSSQYIKYLFCTTTLMQGVNLPAKNVIIRNPNLFTKRKQENISLSAYEFANLRGRAGRLLTDFIGRTIVLDEGSFSAANEESSSPSLFPEEYKDIRTGYQDIYAMHSDFVDDILYGDHVVDGAPSKALITHIRQILYRHGKEKGTSRLKDVGIYLPPDLAINVMDGLDKLKVERELVLANRYWDPVDLEKLTQIYHAHHQPLATNVFEPSMYQGFLHWMTVMRSEFPYYFNRYLGKVDNDLYMYGIAKSAENWVREKPLNEILHTRFSSNEESIDDKIDSEIEKLGKHVSYGLPMLLKPIADLGRQNSSIISIIELGLHTPLARYLSDRGVPRETAIKISRLHSSKNEFNKGRVRRMLNYWELQHVQH

SEQ ID NO: 56348 - protein, 538 aa, Pseudomonas sp. RIT-PI-r
MVSIPSPSNKGGPAARQGFKYQDHVAVAFILKMLRDSTYLQVECETADDIVAVSENAGETVNEYIQVKTTENDKKWNLTECITLEKQKADSSLFQKSLKCDVRPGIACFRIVSKRDIAKALEYFAKELSRRVTPDLATQRGLTLAKQLKTVSARGRDFSYWADNFVWQVCGDVSSLEATNLRVLAEVIDLYGETPSHRQQKDIYDAFLAWADDAATADVKTVPEKKIISRMAALSRLKALLGAAAQHSAAFAKPYKTKPDPFLVEFHTTTEDGLLRTLSGFDVDYDFEEWRSQQLAEHLLQWLPEFCLRASEIANFQIHHTPTALARSINTLTQAAVPRDRLIAELILHAILRSREHSEPIACKVFYAVNGKLSEFGNAHIVQKPGEADQLWLGLSRMISNGTMDQTLKEICDVLDATISRAALTEEREIIITLREPHHHLPTAEAFNKALHRNAPAQEMLSVLCFPILLAYDSDALSEGYLSDYLANLKTEVTQHYNALANTLPSKIKQVRVVVFLVPIESIHQLVQKFNVLCKAAS

SEQ ID NO: 56349 - protein, 714 aa, Pseudomonas sp. RIT-PI-r
MKYDLIKQQLEDLYDLKGDKSGLLMGMSSIVNKGHPEWEGRDLVIRALDKFELFDEVEQSLLLSLVRTVGLFPYITPHVESVSFPDRLAYEVHRVEGIEKGMVFHRLQAHVFHLLMQGRNVVLSASTSVGKSLVIDAVLAQGKFRKVVVIVPTIALIDETRRRLVRRFRQQCNIITHPSQAATDAPINVYLLTQERVLQRDDLGDVDFFVIDEFYKLDLASDSDEKNRSIDLSLAFHKLAKLNAQFYLLGPHIQNIQGLDGYEYNFIPSNFSTVAVDVTHYNLRTRGDTRKDKLLALCSQITSPTLIYCQSPASANRVAQYLIDEGDFSALDGTREISEWIADNYHPAWNVAKAISLGIGIHHGGVPRAIQQYFVKLFNERTIRYIICTSTMIEGVNTSAENVIIYDRRINNSPFDFFTFKNISGRAGRMNQYFIGKVHMLEEPPEEKSLIVEYPIGLQDGASPMGLLMKLEPEYLTDQSRQRLEAAYATPQLSVATLIENRHIPVERQVELADRILRELALGRVWLTWKGNPEQKQLEYLCTLIYEHLPHRLPEYGIHSGLQLAWHINALRAQKDFKAYLQQAIDEDGSDRTPSESIGQRLKLIRNVISYRLPRDIMALSKIQADVLTRRGIEPGDFGFFAEQLENLFHDPLLTALDEYGVPTQISSKFKGAILPSENLTQLLDKLRAWAPRIESAPLTHFEKSIVRWAVDEI

SEQ ID NO: 56350 - protein, 289 aa, Paenibacillus sp. A59
MNHVHIFNQSFNLLPDKNHFGTCINYVDLQEFREEFLEELVNTICEWVYSDEKSKSIINDVFIKEENRTVQNAQSKLRKIALKYFRDRDDRDLNLQGQFGELLLFNFVQHFFRAVPLLRKMPITTSTGHERFGSDAIHYKYENGKNLIFLGESKIYTRNYRFRQAFEKSVTSIISTYASHRKELGLYTYDDFLDKQLVEIARQYKRGVLKNTEIHMVCLVGYNETGHIGGDSEDAIKANIERVLIDKCNNLDKAFFDGVTLPLLNRISYILFPVWELDKLVESFQSEIR

SEQ ID NO: 56351 - protein, 845 aa, Paenibacillus sp. A59
MSISYLVEKHNLEIIKRMLLVEHENIAYQLGLINRPPAELEDEELSEVVGLIDELSREEVEESQKLTTLLCALLWKYKKDKWTGLREFFLVVLSRIGLSPTANMVDDEYDLESRKHNRLNSLISEIAVAINKLKYEVTIGRESFSLTKFQKGLWDKIDSHEVIGVSAPTSAGKSFTILLKSIEILMSQGGTLVYIVPNLSLVSQVSSDYRGMLNKFGLSDYKIMNTYYEGADNTKTIYVLTQERAIGAFAHKDNPFANLRLLVVDEIQNIERASSEDEERSKVLYDSLIEFRINSKPNKIIISGPRINKIQNVAEEIFGEEAAEEETTQSPVVNITYSINKKGEVYYLKQYSDALDEPTAIVITNIENINGLGQKVYKQPFHDYLKFILKGLGEDSINIIFSPTTTQSRKTALSLISEYPESNRKEVINLIKYIEATVHPNYDVVKTLRRGVVYHHGRLPHHVRRVIEKAVSYKLINNIVCTTTLMQGVNLPAQNVIIRNPNLFIRKKQDLSPKLSNYEFANLRGRAGRLLKDFIGRTFILDEGSFIDEDEQLTFFDDTVKDLEIGYSERFNQNKKAIINCLENNISPSSEMKYSYLLPYIRNCVLKYGPKSKKNLETVGINLSEDTLNSVSRNLAKLEVPIEVCISNRYWDPLVLDKLYKQRHAFNLPITTRDQNVVHKLFSAITLMEKSYKYYFVKYLNIDNPDLIQSFCINADKWLKETPLSEILDTPYHSNPDNIEKTISTLQNTVSFKLPALLKPIFDILHPENNFLSFVEMGAYRIKTRRLIEMGVPRETAIYLSTYLLQNLNDNDEDLEKNIISKLKANYMKLDFWVKAQLETIIPMM

SEQ ID NO: 56352 - protein, 326 aa, Pseudomonas sp. TTU2014-080ASC
MTADVENYFDALLEPVDGLENVLKEVSASPPLKQPRLLFVRFREHEPQTNEFVELLSDHLVDYAIPLTKRQQANAQGAKSNTGGSMAAASRLRREAIRLLVKYSKENSSRYGEIGELISYVVAVHFLRAGQVGAKMALKTSSEMPVHGADGLHVRANPDGTVTFFLLESKITPSAADASREMVDSVSEFQADRGRRLNELRLVSDLSNLEALQGEQREAAKSFFNVYSGNGNHLKRRDIHVGSLVFSEEAYNEKLERDAEQPITIHEDHFESQYSTKHPRFQKNLTNQAAAKNVDLGGCIVFLVAVPDVYKLKRIFAELNNEHICD

SEQ ID NO: 56353 - protein, 882 aa, Pseudomonas sp. TTU2014-080ASC
MNTFATEVARDIRREEAFWTDLAELRAVGIRSTLSAAAQAAEVKGPELEGATVARLLSSASIFAQANDEQSRDLAQQIAVFSSLASNDEAVHQAVVHVMSDLGNFPGLNKLEQATAAVENFQAYMRRHLLEEINTVEMAGKRVSLTEFQLDVWGSLKSSIAAAISAPTSAGKSYVVLEHLCERAITEANFTALYIAPTRALLTEIQGKLEKRLSQVSSELRITTIPVLDPSKRPKQIYVLTQERVQLLLSTVDLSGVIDLVVVDEAQAMGDDSRGMILQDVLEKIKISNHNARFLFLAPGASGFQLIGDSVGLPEIEVKETSLSPVVQNRINVRFSMQNENLVELELVTPKKLETIGSYVFKRGFALKEDAKLAAVAQEFGVSGRSLVYATGAANAEALAGLIALNRESKTTEALRELSKFIKQHIHKDYSLAEYVLKGVAFHYGSMPSLLREGIEDTFRKEDLDYLCCTTTLFQGVNLPARNVFIDTPTRGNKGEPLDEAALWNFAGRAGRLGEEVVGNVFLVNYENWESQPLTERKPFSVKVAFKQTIEDEFESVVKVLEFAATEAQDGSVRLGTDERITAAAGLVLYRSAQGSLGALLGRPSLQLTDAQKITLKSSAERALLELGLPEQVLTSSWMIDPIALTSLLQRLRQGVKKGEFEKLIPVNPSSDSYKVYNGIIRRLYKHLGGLTLSGEEGQRARGFVNHVTVTALSWMRGEPLTQLVRESVKYHLKKASEASKKNRNQAIIDAAIRNMFSLVEQTIRFRLVQWAKAYVDLLRFVLAEAGRSDLIGQVYDFSLALELGISTETGRSLVELGLSRITASVIASLITDSSLTPEQVKEWIRNQPNVQLLQLSSLVIAELRAKQLLTPEAELEVGTED

SEQ ID NO: 56354 - protein, 546 aa, Methylobacterium sp. GXS13
MKIDRGPGGWVTKGSTGASDAGGIAARRGFRIQDHVAARIALETLLDPDAVRLECETADDIVVRRSGAGGLINEYVQVKTTEADSKWNLTELAARTKGRKGSSVCERSLLCDTDGDTAWFRLVTTRAVSAKLVPFTRERGRRDGEAAFEALVGNFAKKYKDTKSNSGRTLADWSRHLLWEVEADERSIHARNTKTLLTLAQGRGLNPAFDMVEGVYERLVSKTRSMGDAPSSEIADKAWTRADIMTWWEERLAEMRADAADHVKVYQIVNVPAFFSELCAVDDGAVKRALYAYDVEYDGNVWRMDELTEHLLDWLPEVALSPRILATYNHLSARRLPGEALRALERRGPVDVPGLIAGLMLHAILRHHFGAEPIACRIFFLVGGAMRSTSAHIVPLAGGDEIWLGRSRLVAADSHRAVIDEVLAELRTAVTRDVLMEERDIIIQLREPRHLRADTLDGILVSTGKTSDLLRVVRLPILVAYDSATLGAGFNAAYLTLLKREVRDEYDQIKAGIDDELRDVEVSLFLVPVECAATLARTFEARLRRR

SEQ ID NO: 56355 - protein, 722 aa, Methylobacterium sp. GXS13
MEISLIRECLAEPARLAEVRFPVFREIAYLANHERTAALARDLVIRLLAVKHTLPKDYGALLDALVREVGLFPYADRTLHRSLEDQILIEAHRVHGVGEERFFHSLQLSVFQELAAGRNVVLSAPTSVGKSLVVDAVLATGQHRRAVIVVPTIALIDETRRRITASLGRTHDVITHPGQARREDGRPTVYVLTQERALGRDDLDDADFLVIDEFYKLDMRDGDDDERSIDLNVCFHRLAEKGAQFYLIGPSIASVAGLATGYRHVFIPSDFSTVSLDITYFGLKQDSSDRAAKLVELCRELTSPTLVYCQSPRSARDAARNIYLGCELPVCEATADAVRWLERHYPPEWEVIRALARGVGVHHGNVPRAIQQYMVRAFEEGSIRYLVCTSTIIEGVNTVAENVIVFDRRRNTRTIDDFTFRNIAGRAGRMNRYFIGKVFVIEEAVAEGDHTVDLPIGAQDGATPLSLLLALPTGSLTPGSRDRLAEVFRGSRLAEATIRANRYVPVGAQNALADAVSDLFDRDPRLLQWRGVPDSAQFRAVCDLIYDHVDQGTVLRRHGIHAGDQLQAVLTSLMAAGDFGAFIARRVQERWRGTSVSEAVEGALSFLRKYVGFTFGRQLMAVSRIQADVLARRKRGAPGDYALLAARADSLFLPAGVFALDEYGIPAEIASKLMAAWGEVADVDEGLRMLAALDLERLDLQPFEREVIRHVRKSLPSRAYEA

SEQ ID NO: 56356 - protein, 317 aa, Erythrobacter sp. YT30
MSTISPDDLQEIIAGDPEELDVHLSLIEKDLTVDSCSVRIHCHCLNIDGNGRVNPKRLAEFLRNAIADYAIPKSRMQAARERDAKFKSSSATTALHHEAVSTFTDLSKTGEGGEMLLYILAERFLGLPQVLCKMDLKTDSRMHYHGADGVYASVSNEGLLKLFWGESKVYGDPATAIRDCLNSLAPFLLEEDHEGSSRERDLVLLSDKADLNDPELTAAFRKYFDKTSTQSNRVEYCGVALVGFDADFYPGKDEKGVAEDIAKAAKAEMTKRLGNVSKRILEEKLQHFDIQFLCVPMPSAEGFRASFLEALGLKHEE

SEQ ID NO: 56357 - protein, 868 aa, Erythrobacter sp. YT30
MKSEELFDWLIDEALSSEIEAVTQITVALEIDNITEVDREEDGERTFDWNRLLLAASILAKSQTRKHQEAALRIATAAISLSAEIEVRDAGAVLLEKLSNHRAAKLAEDRELVKANRNERLGVSMRLEALRREMEDSVLVETDGSWLTVNDFQQKLWSGAKTEDTWVSASAPTASGKTFLILQWLNNYVRTSESRVAVYLAPTRALVTEIESELKTLLKDTENVSVHSIPLVEKYTEARAQDKKVIFVFTQERLHLLINMLKENCLIDLLVVDEAHKIGDNQRGVILQDAVERISRINPALKAVFVSPATQNPEELLTDAPDGIAQSSIDSDTPTVLQNVILAEQVRGKPKEWTLNLVREESDLPLGVLHLDNKAGTVKKKLAFIAAAAGERGGTLVYCNGAAEAEDVALLISQLLDEQDDKDQELLDLADLARKAVHRDYQLAPLVERGVAFHYGNMPALIRMEIERLFKSGKIKFLACTSTLIEGVNLSCRTIVVRGPRKGRGHPMEPHDFWNLAGRAGRWGDEFQGNIICIEPTHPTAWPMGVPGRSRYPIKRETDAVLGQNEDLASYLEARLSDDNSNISNSDEFEQVGAYLINTYLRLGSLSAAPLAKRHSAETIELLESKLTQIADEIDLPIELAIRHPGVNIIGLQRLLEAFRAYKNDPSNLLPVPSESVDAYDRFVTIMERVNVNVVPVFLPPGLIPLHSLIVVEWLKGYSLATIIRNRIDYQKRNGRSYRLPNLIRETLEIVEQTARFKAPKYLSSYVDVLNHHLVEVERSDLIDEEFDIGVALEFGVSSKTLLSLMELGLSRMTAVELYEKIAQDDLDRNGCVRWIQRYAPEFEGMNVPNLITKEVLEKVPLADTTRN

SEQ ID NO: 56358 - protein, 315 aa, Sphingomonas sp. Leaf9
MSTITATDLEAALTGDPEALDVHLTLIERDVIVTGQSVKVHCHCLAIDGNGRVQLRRLAEFMRNAAAIYALPRSKIAEAKARDARFNSTEAVAELVERAKRSFTDLATTGEGGEMLLYLLAERFLKLPQILCKMDLKTDSRVHYHGADGVYAGITSEGVLKLYWGESKVYATPAAAISSCLDSLAPYLIEPDHEGSERERDLLLLSDKADLTDERLTSALRKYFDRSSPMSNRVRYCGVALVGFGVPFYPAEGASALADEIAKAAKTALVEWVGKVGEGVVKNKLETLEIEFFCVPLPSSQGFRDIFLEVMGLAK

SEQ ID NO: 56359 - protein, 874 aa, Sphingomonas sp. Leaf9
MSLADLQAWLLKEGVGDEIAALTRMTVRSEFSGLAVDDGPGPEDFDWQRLILAGSILARSERRGDQEAALRIAVSAVSMVEDAQVRDGGAVLLGKLSNFRSVDLAVDRGLIAGRLDERLGLSLRIEAQRREMDRSVLVETTGRWIEVNEFQQRFWTGASTSAWLSASAPTASGKTFLVLQWLVDQMGTGGSTIAVYLAPTRALVSEIESNLETMLKGRPGIVVSSLPLRTKFDAARSGGSRLILVLTQERMHLLANVLGGDFSVDLMIVDEAHKIGDDGRGVILQDAVERATRLNPRLKLIFISPATQNPGELLADAPPDVQTVAVDSDAPTVLQNLILARQEKGKPRRYALAVRRGDAEVEVGVLQLPSTPATFSKRLAFVAAAATGARGGTLVYANGAAEAEDIADFISQLQPEADLGDVHPELAALADLARKGVHPQFRLAPLVEQGVAFHFGNMPSLLRLEIERLFRSGRIRFLVCTSTLVEGVNLSCRTIVVRGPRKGKGNPMEPHDFWNLAGRAGRWGDEFQGNIVCLDPENVTAWPSGVPLRARYPIRRESDAVLDTGHGLINYLTARLEGSPGELDGVEEFEQVGAYLLTTFMRLGSIAKADFAKRHDPAFIAKLDGVLETIATAIEIEPALASRHSGVSPIGMQRLLETFRRYPGEPENLAPVDVASDDCMDRFITIMRRINASLFPAFTPDKRVALYAIIVLQWLEGKSLARIIRRNIAWHEDVGKDYQLPALIRDTMALVEQIARFRAPKYLSAYVDVLHLHYLEIGREDLIDHNMDIGTQLEFGVSSRTLISLMELGLSRMTAVALYEKIARDDLDQTQALKWMADRSDRLDGMDLPVVIVRELRERLTLDDGVEPSNQTTT

SEQ ID NO: 56360 - protein, 315 aa, Sphingomonas sp. Leaf11; identical to SEQ ID NO: 56358

SEQ ID NO: 56361 - protein, 874 aa, Sphingomonas sp. Leaf11; identical to SEQ ID NO: 56359

SEQ ID NO: 56362 - protein, 315 aa, Sphingomonas sp. Leaf62; identical to SEQ ID NO: 56358

SEQ ID NO: 56363 - protein, 874 aa, Sphingomonas sp. Leaf62
MSLADLQAWLLKEGVGDEIAALTRMTVRSEFSGLAVDDGPGPEDFDWQRLILAGSILARSERRGDQEAALRIAVSAVSMVEDAQVRDGGAVLLGKLSNFRSVDLAVDRGLIAGRLDERLGLSLRIEAQRREMDRSVLVETTGRWIEVNEFQQRFWTGASTSAWLSASAPTASGKTFLVLQWLVDQMGTGGSTIAVYLAPTRALVSEIESNLETILKGRPGIVVSSLPLRTKFDAARSGGSRLILVLTQERMHLLANVLGGDFSVDLMIVDEAHKIGDDGRGVILQDAVERATRLNPRLKLIFISPATQNPGELLADAPPDVQTVAVDSDAPTVLQNLILARQEKGKPRRYALAVRRGDAEVEVGVLQLPSTPATFSKRLAFVAAAATGARGGTLVYANGAAEAEDIADFISQLQPEADLGDVHPELAALADLARKGVHPQFRLAPLVEQGVAFHFGNMPSLLRLEIERLFRSGRIRFLVCTSTLVEGVNLSCRTIVVRGPRKGKGNPMEPHDFWNLAGRAGRWGDEFQGNIVCLDPENVTAWPSGVPLRARYPIRRESDAVLDTGHGLINYLTARLEGSPGELDGVEEFEQVGAYLLTTFMRLGSIAKADFAKRHDPAFIAKLDGVLETIATAIEIEPALASRHSGVSPIGMQRLLETFRRYPGEPENLAPVDVASDDCMDRFITIMRRINASLFPAFTPDKRVALYAIIVLQWLEGKSLARIIRRNIAWHEDVGKVYQLPALIRDTMALVEQIARFRAPKYLSAYVDVLHLHYLEIGREDLIDHNMDIGTQLEFGVSSRTLISLMELGLSRMTAVALYEKIARDDLDQTQALKWMADRSDRLDGMDLPVVIVRELRERLTLDDGVEPSNQTTT

SEQ ID NO: 56364 - protein, 316 aa, Pseudomonas sp. Leaf127
MSTITPNDLESALTGDPEALEVHLELVERDVLIDGHLVKIHCHCLSVDGNGRVQPRRLAEFMRNTVADYAIPRSKLAEAKARDRRFNSTEAVAELVERAKRSFTDLTNTGEGGEMLLFLLAERFLKLPQILCKMDLKTDNRMHYHGADGVYAGVTPEGILKLYWGESKVYGDASSAIRDCFNSLAPFLIEHEHEEAERESDLILLSDKADLSNPALTDALKKYFDKSSVMSKRVQYCGVVLVGFDAPFYPKGDAKGVAEEIVKASRAELTSWSKSIGNRLKLEKLEQMEIEVFCVPLPSAEGFRAAFLKAMGIKDE

SEQ ID NO: 56365 - protein, 866 aa, Pseudomonas sp. Leaf127
MSLANLQSWLLQEGIREDLDAVTRFTVRNELDNLVLDLSAPTASVIDWPRLLLAGSILARSDQRGDQEAALRIATAAISLTDNQAFKDAGAVLLGKLSNFRAIALATDRGLVESGLDGRLGVALRLEAQRREMDRSILVQSSGAWLQVNDFQQRFWINAAGDRWLSASAPTASGKTFLVLQWLIDQVITGETRVAVYLAPTRALVSEIETNLKGLLGNTELIEVSSLPLADKYKAARTGGARVILVFTQERLHLLANVLNDVFSIDLLIVDEAHKIGDNQRGVILQDAVERATRANPKLKAVFLSPATQNPEELLMDAPVGVQTIAVDSDSSTVLQNLMVATQMPRKSKLWTLTLRQQGSTLPVGTLQLASTPDGLKKRLAFIAAAAGERGGTLVYTNGASEAEDVADLISQLLPKLGFIDWELSQLAELARKGVHQDFRLAPLVELGVAFHYGNMPSLLRLEIERLFRTGKIRFLVCTSTLIEGVNLSCRTIVVRGPRKGKGHPMEPHDFWNLAGRAGRWGDEFQGNIICIDPEDRQAWPSGVPSRARYPIKRESDAVLELGDSMADYLLRRGQSDLSSIEDADTFEQVGAYLLTTFMRLGSISAASLAKRHDAASIAKLDEALSALVTQIEINIDLAARHPGVSAVGLQRLLEAFRSYEGDVENLLPAEVASNDSYDRFITIMTRINKHLFLAFTPENRIRLFALIIFKWLKGYSLARIIRDSIEWHQDVGRSFKLPELIRSTMELVEQIARFKAPKYFSAYMDVLHLHLNEIGRKDLIDDGLDIGTQLEFGVSSTTLLSLMELGLSRMSAVALYEKIARDDLNKEGCVLWISERVGQLHVMDIPAIIIREVRERLALPGDVAT

SEQ ID NO: 56366 - protein, 312 aa, Chryseobacterium sp. Leaf180
MATPFNSENIITHKINETGLSTFLVGFDIDDKGISQYRLNPLIQKLCDVIQEFAFGFHEGDSTDNTKTYSKLIEAAQSIYKIDAFQKVKDLYENNGSITDDVEDKFLRRGEFGELILHLLLRDFHNTIPLLSKVYFKDSLGHAVHGFDAVHIEPTTKTLWVGESKLYTSGKAGLKALIRDIEEHFKSDYLTSEFMLISKKLTQIDNIPDKDYWLDLISKSKKLVEQLNTINIPLLCTYHCDLFTSHTDENNHVFIDEYIKEMRLLKTYFDDNNNHALKSKLNIILILFPVQNKVELVKGLHNKLSLIQQLGE

SEQ ID NO: 56367 - protein, 756 aa, Chryseobacterium sp. Leaf180
MIEDLLLEIESKDSFNYEETFTLYKKCSELIIEDEITAQRLVVNILAEKNKFDTNLNLILTDLIEAVGFYPYLEKENLPLDSTDALIRQVYHHSDNLNKFLHEDQKHLLSLLNSDKNVIVSAPTSFGKSLLIEEFVASKRFKNIVIIQPTLALLDETRRKLKKYDENYKLIVKTSQVTSIEKGNIYLFTAERVNEYKEFIDVHLIIIDEFYKLSSKRDDERADSLNNAFHYILKTFKSKFYLLGPNIDGISIGFEEKYNAIFYKTQSSLVDVKTIDLYTSNKEIFDKTTHHSKDGYKEAILVKEKKLFELLLQNSDEQSIIYCSSPNRVRYLSQKFCNFILNKNIERTNSDLDIVEWISQNISEDWSLISLLKNSIGIHDGALQKHITTTIIDYFNKGKINFLFCTTTIIEGVNTSAKNIIFFDSTKGVNTKIDYFDYSNIKGRAGRLMIHYTGTIYNFNPIPPNEQILIDIPFFEQNPISDEILIHLDENEIKDIDSTQYKKIKKIPSEEKGIIKRNGVQVDGQLSIFDAIRDDISSKYHLISWNRTPEYEQLKYCLNLGWKYLLKKGESKSLGINRLINKTFNYGLHQSLGRVISNDIDYIIKSVEYYKKHINSEDGEINTNMFNFGKRYSVFSEQDILEEVIMTNFQIQKHWFQYKIPKWLSVLNSIQEYVCAEKGLKPGNYTYYSNLIENEFLRENLAILSEFGIPSSAIRKLEKLIAHDISQDEVIKIIRNSKLYNNNIFIEYEKNKLKET

SEQ ID NO: 56368 - protein, 308 aa, Rhizobium sp. Leaf262
MSVKVDFEVLVDTSLSTVCSSEQLKTALNKRFISLINDYEDGKWRFAKFQTYLWDNIAQTALSQRERDSLAGKSHSQLVEAARNLRFSDADEVGEGSEIAEIFLYGFMKDHFGALPVVPKIFYKQNAQDNAKGADSVHIVVKDDDFTLWFGEAKFYNSIEDKRLDSIVTSVLKSLQTDKLKKENIIVTNVSDIYQLPIGSDLQARIVAAIRPKESIDKLKSRINVPIMILHECDITSKNIDLTDSYRKLISSHHMERVEAYYKKQLAKSTSVFKYSDVKFHVILFPVPNKQAIVKAFVSGVQFYKSQG

SEQ ID NO: 56369 - protein, 699 aa, Rhizobium sp. Leaf262
MDVFDVCQEVNELIFSGDQVSARNKLIALLAELSAEKAEYPEVLNYQIRETGLYPYLQTDHASWQQKFIIEAFKVDVGRAHATLHREQSLVLSHLLEGTDIAVSAPTSFGKSFIIDAFIAAKEPENVVLIVPTIALMDETRRRVFKKFSDKYNIITTSDMPLGKRNILIFPQERAFGYLNKLSTIDLLIVDEFYKASAVHDKDRSPSLVKAILKLSKIAKQRYFLAPNIKRLEESVFTRGMKFIELLDFNTVFLEIFEIYKHIGKDEAKKSEELLKIISPRTSKSLIYAGSYPQIDKVANLVVGNLGVLDRPLLNHFSRWLADNYDPNWQLTNLVRRGVGVHNGRMHRSLSQIQVKIFESKHGFDSIISTSSIIEGVNTSAENVIIWRSKVGSSNLKNFMYKNIIGRGGRMFKHFVGKIYLLEAPPKDEDAQLQIDFPDTILGDIDEELHRESLTHEQVQKIVEYKSTMGNILGPDEFARLSKSNVLQNSDSDFIMRVAENMKAQPEEWRGLAYLNSDNPDHWDRLLYLIINLSPAGWDVKFSKLVSFVKILSRNWRREIPDLLLELDDEGIDVELFFQLERTVTFKLTTLLSDANELHKVIVDPNVDVSPFIARLGHAFLPGAVYQLEEYGLPRMISRKIHRSGAMNFNDPSLDLPTAIKAFQSIGLETISKIPSLSRFDVYVLKFFYEGITQDPIKS

SEQ ID NO: 56370 - protein, 539 aa, Methylobacterium sp. Leaf399
MTDGSTDALRASDAGGISARRGFRIQDHVAARIALEMLQDPTIHQLECETADDIVVRRGAAAARVSEYVQVKTTESDGKWNLKELTARDKGRKGTSICERSLLCDAGGDEPWYRIVTTRAVSAKLVPFTRDRARRSGEAAFEALVQAFAKRYPDVKSLSDQTLAHWSRNLLWEVESDERALEARNTTTLLRLAHGHGLTPAFHIIDEVYARLTAKTRAMGDAASSDPAEKAWRRSDCVAWWEGELNLMRAAVAAHVKVYQLVDAPSFFSELCSVADAAAKRALYAYDVEYDGDAWRKDELIEHLLDWLPEVALPPRMLATFNHLSARRLPGEALRALDRRGPPDMPRLVAGLMLHAILRHHFGAEPIACRIFFLVAGELRSTSAHIVPLPGGDEIWLGRSRLVTAQSHRAVIDEVLSELRTALTRDVLVEERDIILQLREPRHLRADTLDRILSATGKTSDLLRVIRLPILVAYDSDTLSAGFNLAYVPLLQAEVRDEYERIKARIGDELRGVEVSLFLVPVECAGTLERDFTTRLRGR

SEQ ID NO: 56371 - protein, 721 aa, Methylobacterium sp. Leaf399
METDLIRACLADPDKLAAQRFSIFREVARLANDERTVAMARELVIRLLAHKATLPEGYNALLDALVREVGLFPYADHAKGRDLEDQILVEAHRVHGVGEERFFHSLQLSVFQELVAGRNVVLSAPTSVGKSLVIDAVLATRRHKRAVIVVPTIALIDETRRRIASTLGQSHDIITHSSQTRLEDGRPTVYVLTQERALGRKDLGDVDFFVIDEFYKLDVREEDDERTVDLNLCFHHLARQGAQFYLIGPNISSVGGLAADYRHVFIPSDFTTVALDIQHFNLRQRGEERVGKLVELCGTLAGPTLVYCQSPRSARDAARHVYVGCDLGTCDATRDAADWLAHYYPPEWEVVQALRRGVGIHHGNVPRAIQQYMVRAFEQGKIKILVCTSTIIEGVNTVAENVVIFDRRRNTKTIDDFTFRNIAGRAGRMNRYFVGKVFVLESAVEPGDHTVDLPVGRQDAATPLSLLLDLPEDSLSEVSRDRLAQAFGGSMLDAATIRANRYVPVERQDATCAAVAEILDRDPGLLRWRGVPSSPQLRTVCDLIYDHIDRGNSLRRHGIFAGDQLQAALTALMAADDLRQFVDRRVRERRDDVGISEAVEAALSFLRNYVGYAFGRQLMALSRIQADVILRRERGAPGDYGLFAAQADSLFMPAGLFALDEYGVPAEIASKLMRAWGRIDDVDQGLRMLAGADFDAINLHPFERELLLAVRTYLPSRAYAR

SEQ ID NO: 56372 - protein, 297 aa, Chryseobacterium sp. Leaf404
MIEKNIKEDFLELFYNDLCNEALENNNTLNLFTLKVKNNAFAYDELISELGNKLCYFALSRNQINQLKKDDKLNDLVKKAKSKLKHHADNEGELGEILLYCLLESHLNAPKILTKLELKTNSNDYVKGADGVHLLKVSDSEYQLILGESKLNSDIGRGIYEAFGSIDKLLKSTSKMEFEIDLINSELVKEAYDEDSYELLKKIIIPSAKEDETYLDYSFGIFLGFNIEISADESKLSNSDFRKNIRERIKQDVIKAKNSLNFQLRKSGYSGYTFYVYAIPFSDLKNKRKHIIEKIVE

SEQ ID NO: 56373 - protein, 850 aa, Chryseobacterium sp. Leaf404
MKLIDKLTEDILQDKYFCNLFYKSLQITAEHIFKKQTRLILTNKELKDLLRFADILSNSTNSISRNKAYQIISALNHDYKDNEIYRTISKAIFSKLGNFPAINYLESKNNNLATLPLFREIEAETKKLIQVAPDGNGMIFTDTQFELFNKLSNSQEFSFSGPTSMGKSFIIKSFIKKVIKNTPPENIVIIVPTRALINQFFVDLKLELDELLEIYKYKIFINSNVTDILTEEKFNYIFILTPERLLSYLSQDTNPSIGFVFVDEAHKLANEKDSRSITTYSAIEKAQRKYGNIKLYFSSPNVSNPEIFLKLFNRDFKNSFRTDESPVSQNIYYVNLINQEVEAHTNNSIIKLDNILNPNNDYNLIKFIKFIGTGKNNLVYCYSKKNVLEKATELSKSLKKIDQTSLIEKAIKNIKDYIHPEYFLVDFIEKGIAYHHGKLPQLIRNLIEELYQKEEIRYVFCTSTLLEGVNMPTQNIFIIDNRSGSRTILSPIDFWNLSGRAGRLTRELEGNIFCVQHDSFKWDNTDLLQKKEITLQPTILTKIDRNLQKIEKALKNEEIKTGSETEKEILKYIANIIKVDTLETDANYKSPIIDKLIEKNKQKIIDLARAGVINYDIPKSILKFHQTINFDIQEKIYKAVQKSKKSILPTGNDINYESILNVLENFHNLYAWDKTEKKLSNKNSLKYYAVLMNQWVKGFPLSQIISQAIDYNHDTSQKIEVNFREFETFKKSNRRHINLLIEKIIDDIEYVLRFLLEKYFNHYYQILFNIVGEQKAGENWATLLEYGTQIPQVIALQNIGLTRNTAIKIFRDHRKTLVLRENKLIGVDKAQLLNQFRRSSLEYDEIKRSL

SEQ ID NO: 56374 - protein, 307 aa, Caulobacter sp. Root1472
MTGLVFDVLIDDALSNITSAAQLKGLVKKRVLSLVNDFEDAKWRYPKFKNFLWDNIAQTALSQRERASLVDQSHSSLVAAAKNLRLTDKDEVGQGSEIAEVFLYGIMRHQYKALPVVPKIFYKQNVQDNAKGADSVHIVVDGDDFTLWFGEAKFYNSIEDYRLDAIVASVMASLSTDKLKKENAIITSVSDLDGLQIDPTLRENIRAALSNRESIDNLKSKIHIPILILHECDDTAKSKDSSDEYKAQIKLTHQDRAEAYFAKQMAKASNVHKYDDISFHIILFPVPNKKGIIDAFVKTVAFYKEQG

SEQ ID NO: 56375 - protein, 695 aa, Caulobacter sp. Root1472
MEVFETCHEINNLLTARNELAARNLLIRLLADLEQAGTPYPQVVNHMIRETGLFPYLQLDGASWDVKYVHQAFEVDVGRRVATLHREQSSVLAKLLDGTSIAVSAPTSFGKSFIIDAFIAAKKPDTVVIIVPTIALMDETRRRIFKKFSKDYTVITAPDTALGAKNILIFPQERAFGYLDLLNKIDLLVVDEFYKASQKHDKERAPSLIKAILKLSKKATQRYYLAPNIKKLGENAFTKGMEFIELLDFNTVYLDIKDHYSAIAGDEKKKGEKLIELISAGDQKALIYAGTYADIKRVSDLVIDHLPKVDNPYTKPFAQWLRDNYKPDWILADLADRGVGVHNGRMHRCISQLQVKLFEYDNGFNNIVSTSSIIEGVNTSAENVILWRSKIGKNNLKDFTYKNIIGRGGRMFKYFVGNIHLLDVPPVSEDAQLEIEFPEEILGTLDEAGDAEQLTDRQVEKIIEYKVQMSSIVGEENFARIKRENLLHDSDADFLLRLATDMRDTPEDWRGFAFLNSSNSSNWESTLYKVLKLKPNGWDAPWSNVVTVTKAIANNWKQDLSQIIRSLEESGIDIEEFFKLERAVTFKLSALLSDTNELHKLIINPSVDVSGFVGRMSRAFLPSAVYHLEEYGLPRMISKKIHRAGLVNFEDPDMDLLVALERFKQLGEERVLAAQELSRFDRFVVKFFFDGITVD

SEQ ID NO: 56376 - protein, 293 aa, Nocardioides sp. Root240
MGDASTTLSVLVHDFACSPSVTGLCAGYEDGTWRLEHLARSIVKAIPEFALTYSELQHLDGDTAVEMLGRAVRSLYSTDKYEKRGEFGEVLLHLVLREVFSTIPAISKIYFQDNDNHVVKGFDAVHVVASSDDLELWLGEVKFYDNRSSAVSAVKAELHQHTDGNYLRREFAAITGKIDPAWPHGDRLKLLLHENTSLDDVFDRIVIPVLLTYDSPVVADRIVQLSTATDRGKSTASRYAEDFEKEIRDGLSTFAEGIPTGVLIRLILVPLHQKKALVTELHTRLKSIQRATQ

SEQ ID NO: 56377 - protein, 681 aa, Nocardioides sp. Root240
MYNGREADGRESLIRVLDRRELFEPLEAMINSLLARYGLYPYMAGVDDTATTADALLYELHRPLDYDNDVVLHRVQADIYRRILDGESIILSAPTSFGKSLVLDAVAASGRFENIAVVVPTLALIDETRKRLSRLRDTYKVITHPSQTLDERNILVMTQERLLDVAELPRLDLFMIDEFYKLDSRNEENRPVLLNHALHRLMTHSRAFYMAGPNVRDLAAALPAQFTATFTSTDFKTVVSNLRVMPKPARGDEIAALVEVCRELEGPTLIFCSSPEKTRKVAEALLTAGLGDQSPEMAPVATWVAEEYHPDWLVARALTNGVGIHHARLPRWLGQYTVGAFNSGILQFFVCTSTMIEGVNTSAKNVVVFDHKIKNRNIDYFTYSNIAGRSGRMRQHFVGEVIVFREPPAEELPIVDVPVYNQASDTPLSLLIQLSDEELTEESKRRLEGMLANATLPLAVLRESRGIDPERQLALAREIARMAPSEAVLLAWNGYPTWEELLACCQLIVTHLRPIRGRENGVSSARQLTFRLRLAQTTQGDVRQLVNNELSGTSSTTRDDPDAAVEEVLGFLRQWVGFDMPRLLSCLQRVVNHVLPQRGIARRANYSPYVAACESMFLPAHVALLDEFGMPPSLVDKLRPHLPPAGSGIDAVLAEIRRLDVKSLQLDQTEQSLFDELRRTI

SEQ ID NO: 56378 - protein, 312 aa, Massilia sp. Root351
MTITATDLESALTGDPETLDVHLTLVQRNISIDGHLVKIHCHCLSVDGNGRVQPHRLAEYMRNAVANYAIPRSKLDAAKARDIKFNSTEALAELVERAKRSFTDLAKTGEGGEMLLYLLAERFLKLPQILCKMDLKTDSRMHYHGADGVYAGVTEEGILKLYWGESKIYENAADAIRECLRSLAPFLIELDHEGAERERDLFLLSDKADLSNPELTEALRKYFDRSSRMSKRVKYCGVALVGFDAPFYPKQSDQAVAEEIVKASNVALSGWSAKIGERLKLEKLNQMEIEFLCMPLPSAEGFREAFLAAMGN

SEQ ID NO: 56379 - protein, 870 aa, Massilia sp. Root351
MDLENLQTWLLNEGIKDDLNDITLLTVRTEIDNLLPDESTPLISSLDWPRLIFAGSILARSNRRNDQEAALRIATAAISLADDLSLRDAGAVLLGKLSNFRAVALATNRHMLAANLDSRLGIALGLEAQRREIERSILVQSSGIWLQVNDFQQQFWNNATGEQWLSASAPTASGKTYLVLQWLIDQMVTARAQVAVYIAPTRALVSEIEDNLKELVNKLPPGTDQVDVSSLPFPDIYRTAKSGKTRAILVFTQERLHLLANVLGPAFSIDLLIVDEAHKIGDNQRGVILQDAIERVTRANPKLKAVFISPATQNPEELLADAPLGVQTVAVNSDSSTVLQNLITATQVPRKSKLWALNLKQQALDIPLGTLQLASTPAGIKKRLAFIAAAAGERGGTLVYANGAGEAEEVADLISQLLPAPESIDIENAQLAELARKGVHQGFRLAPLVERGVAFHYGNMPSLLRLEIERLFRSGKILFLVCTSTLIEGVNLSCRTIIVRGPRKGKGHPMEPHDFWNLAGRAGRWGHEFQGNIICIDADNKDAWPNGIPSRARYPIRRESDVVLDLGDAIVDYLSKRSQPGLSSNEEKEQFEQVGAYLLTTFMRLGSIASANIAKRHDKTLIARLDEGLAVLAQQIEIDVDLASRHPGVSAVGLQQLLDAFRNYIGDVENLLPAEVASNDSYDRFVTIMRRVNEHLFVAFTPDSRIRLYALVVVKWLKGFSLARIIGDSIDWHQEVGRAFTLPELIRDTMQLVEQIARFKAPKYLSAYMDVLHLHLREVGREDLIDEGLDIGTQLEFGVSSRTLISLMELGLSRLSAVALYEKIARDDMNKDECIQWISDRVDHFTSMGIPALIIREVRERLTLSSNIST

SEQ ID NO: 56380 - protein, 500 aa, Bosea sp. Root381
MLEDRRIEQVECETSDDIVLRWAVDGNRHIEYVQVKSNDVDRWTLGLLTKRDIAASPTSIVEKSLLCDKGPEVGRFRIVTRNGVHAILAALTVPVSKRGQNDLDDLAGRLMKKYATVSGRGSDLEYWARNAFWEAMSSEDDLRSKNLWQISRLCDGDGCCLRPEQILAIYRDILELVERAAAADRRVSADKILTRERMRLWWRDRLHALIASRPGSALPYRITAPQFLVKLHEFTDPTRPRATTGYDAEYERKQWRSAQLAAHLVRWVPELVLKASEIAQTNHLTLADRTGQGLRRLRELRHRGVERLLAETLLHSILRTFFDSEPIACKLFYRTEAASGVVNNAHIVQHHEGDQIWLGRTHVFRGPDPDALIEAACAELEDALATPLLRAEREIILELRQPEYLRRDDVEQALENGAPIDRFLRILRFVILVVYDSSVLGAGHCDDYRTRLVAELTGHGNAYHARLPSSVEEIQVHLLLVPVESLDALTRDFEAAAGMT

SEQ ID NO: 56381 - protein, 711 aa, Bosea sp. Root381
MSYDLIRAELDAADFGADRMFAALRGAARLANNPATLGEGRDIVIRLLSKVSLCGEFERRILISLVRTVGLFPYMKEQLAVAEDDDLLAYQFHYMAELDVVFHGLQARIYDLLMSGSNVVLSASTSAGKSLLIDAMIASGKFRKVVIILPTLALIDEIRRRLTGRFGRRRQIITQPSQQAAAGAKSVYVLTQERARKRDDLDDVDFFVIDEFYKLDIRKGDDDERRAIELNLCFHKLATRGAQFYLLGPNIHSIRGLDRHEVHFIPSGFATVAVDIVHHDMSISKPERLERLVEILGGKTGPTLIYCQSAASAATIAEHLIGNEIVEPPAATIPTAEWLSENFHAEWIVAKAVRAGIGIHHGALPRSVQQLMVRLFNSGAIRLLVCTSTLIEGVNTAAETVIIFDRRKRSTFDFFTYKNIQGRAGRMGRYFIGKVHVLEKPPAEEPFVVEYEIGRQDDETPMELLLQLPEEDLTEDSSERIKNELSRSLLAEETIRANASVSVEIQNDIAREIEHRLKQGSELYGWSGLRCSHPQLAAACELIVGHIRAPGGLAEHRVFSGSQLAFKLRQLEYDGFKSFLDAFVKEEYPNSTLGSRIEVVLRFVRRVVCYQFSQDLMVIDRIQRDVALRLGVAPGNYGLYAEHAENLFMPASLNALEEYGLPLQIVRKIANALAPHEDFDGVLTRLKRLDSGELDLTQFERDWLVDTQLAI

SEQ ID NO: 56382 - protein, 283 aa, Rhizobium sp. Root564
MNVYAEKPERLLTQIELGSAILSQSSYCAGFELKAWRCNALADHLIEWIADYALKEEELSGSHGNMYIRLKQAAARIYSTEKYERRGEVGEILLHAICRDFFSTIPLAPRVFYLTSSNEVVKSFDLVHVRPLGEETFEIWLGEAKFYKDADDAIRAAITSVESHIDQGFLNNEKLILGPQISKDVPHWAEIRKILSSRTSLDELFKAAVFPICIACDSAAVNGHEIHCESYSAAVLNEIDSLNSKLVNSGLNQKIAIQLIYVPLASKDLLADAFDKRLKGLSP

SEQ ID NO: 56383 - protein, 695 aa, Rhizobium sp. Root564
MTLPRPDWQTLGALRGAELKGQVFSILQRASLAIQEAELDEPALLEFVPRLADVINERPELETFKEPFSALARSTGLWNYIDRDYADTSDALLAESVTISELGNITLHREQIGVLNDILAGKNVILSAPTSFGKSLLIDALLATGRYRRVAIILPTIALLDEFRRRLRRRFEDTFSIIMHPGEVVSKDHAAIFLGTQERLISRADLGALDLTVVDEFYKLDPERQDDRSVTLNAAVYRLLSKSKQFFFLGPNIDNVRISNDSKWKFEFIRTRFSTVAVDTFDLTRIENKQDRLFEEIAEDRNWPALVFVSAPDKANRIAKDASKEIAVSDDSSDFADWLNDNVGSNWSLVKTVRFGFGVHHGRIPRAIASQMVRMFNEGSLPVLFCTSTLIEGVNTAAKTVLIYDKKINRTSFDFFTFSNIRGRAGRLGQHHVGQVFLFNAPPAREEMEVSPTLFGEDDEAPDSYVVYLDEQDTNEETELRVANLRDDLGLDSEGLRLAASVGLDVAHALRREVAAEFHRGSRRLAWSGYPDYKSILALVEIACTTKRPREFGAVSASQLTLFISRLRQNRELKGFLLWFNDNFRGEDTEFDNVFKFLRACEYGLPQVFALVELFAKAYWPQTDYNLFLRELSRWFRAEELKNLDEEGIPIQISERFYALGDDRASLLKKLKDAVKDLSDELSVFEHRWLTASLI

SEQ ID NO: 56384 - protein, 316 aa, Pseudomonas sp. Root569
MSIITHADLESALTGNPEALDVHLTLVERDVLVDGHLVKIHCHCLSVDGNGRVQPNRLAEFMRNAVVDYAIPRSKLTDAKARDNRFNSTEAVAELVERAKRSFTDLANTGEGGEMLLFLLAERFLKLPQILCKMDLKTDSRMHYHGADGVYAGVTAEGTLKLYWGESKVYGDASAAIRDCLSSLSPFLIEADHEESGRERDLMLLSDKADLSDPVLTDALKKYFDKSSVMSKRVQYCGVALVAFDAPFYPKDNAKSVAEEIVEASRTALIGWSNRVGERLKLEKLDQIEIELFCIPLPSAEGFRAAFLKAMGIKQE

SEQ ID NO: 56385 - protein, 866 aa, Pseudomonas sp. Root569
MSLADLQSWLRLEGIREDLDAITLLTVRNELDNLAADTSRSSAEPFDWPRLLLAGSILARSDQRSDQEAALRIATAAISLTKDQTLQDAGAVLMSKLSNFRAIVLATDRNLLKADLGGRLGVALHLEAQRREMDSSILVQSSGIWLQVNDFQKRFWTSATGDGWLSASAPTASGKTFLVLQWLIDQLIAGETRVAVYLAPTRALVSEIETNLKALIGDTGLVEVSSLPLPDKYKVARAGGTRLILVFTQERLHLLANVLHDEFSVDLLIVDEAHKIGDNQRGVILQDAIERATRTNPKMKAVFISPATQNPGELLTDAPLGVETITVDSDSSTVLQNLIVATQVPRKSKLWALTLRQPGSALPLGTLQLASTPAGLKKRLAFIAAAVGQRGGTLVYANGAGEAEEVADLISQLLPKLDTVDPELSQLAELARKGVHQDFRLGPLVELGVAFHYGNMPSLIRLEIERLFRLGKIRFLICTSTLIEGVNLSCRTIVVRGPRKGKGHPMEPHDFWNLAGRAGRWGDEFQGNIICIDPEDSTAWPTGVPNRSRYPIKRESDAVLELGDGMADYLARRGLINASNLEDADKFEQVGAYLLTTFMRLGSISAASLAKRHDAASIAKLDQALAILAKQIEIDVELAARHPGVNAIGLQHLLDAFRAYPGNVENLLPAEVASNDSYDRFVTIMQRVNEHLFLAFTPESRVKLHALIIVKWLQGYSLARIISDSIEWHQNVGRAFKLPELIRGTMELVEQIARFKAPKYLSAYMDVLHLDLNEIGRKDLIDDSLDIGTQLEFGVSSMTLLSLMELGLSRMSAVALYEKIARDDLSREGCMEWIAERIDKFQAIGIPGIIIREVRECLRLSDKENK

SEQ ID NO: 56386 - protein, 289 aa, Pseudoxanthomonas sp. Root630
MLFVRFREDEPQLREFIDVLSDQLVNYVIPLAKRKAANAAGAQSSTGADTALHTRLQREATNLLIRYQEENKARYGEVGELISYAVAVRFLDAPQIGSKMALKTSSQMPVHGVDGLHIRLEDDGTATLFLLESKLSPSSSDATREFCDSASKYQKDASARKNELRIITDLSNLDSLPEPLRSEIKDYFDPYAESGASLKRRERHVGSLTFSESSYAQRIPVEQGQSISAHEDHFSSLYAEKSEQISKLLAKQALAKGLDLAKCEVFLIAVPDINGLKTAFAEANSGHIR

SEQ ID NO: 56387 - protein, 703 aa, Pseudoxanthomonas sp. Root630
MSAMSAAKFTAIYVAPTRALLSEIQETLERQLEAISDSIRVTTIPVSDPLNRQRQVYVLTQERLQLLLSTMSLTNEVDLIIVDEAQAIGDDGRGMILQDAIEKLRRANPSARALFLAPGVEGFEDLGAAVGIEDLSIRETGLSPVVQNRIIVNFDYADEKRLELELIAADGSNERIGFFNSSRGFGVSEDKRLAAVALELGQTGRSLVYATGAARAETLARQISNNSSDRQTDDAHAQAREKLAKFIEKDVHKSYSLAKFVRNGVAFHYGNMPSLLREGIEGAFREGHLDFLCCTTTLFQGVNLPARNVFIDTPTRGNKGEQLDEASLWNFAGRAGRLGRDVVGNVFLVDYHKWDTHPLSTRKRFAIKIAFQEAVNQDLEAIIDTLQSTADLRVPIEKHSARTASASGLILYRASQGDLAKLLSRPGLDLDPSQRERIEKIAKHALEALGLPTSVLAANWVVDPLSLARLLNRLRTKIAKGDFKNLIPVNPAFDGYEVYNAIIRRMFKHLGRMELSGPNAEGARRYANHVTATALKWMRGLPLSQLVGESVRYARNKSGEARKKPEEQVVDSAIRSMFELIEKVIRFTLVQWAKAYVDLLRLALEEAGHTARASEIYDFSLALELGVATDTGRALVELGLSRISAAAVASIILDSKLSTSEVKAWIQSHTLELESSLSGLVLGELVTKGLLIPTTIPEAPAVR

SEQ ID NO: 56388 - protein, 293 aa, Nocardioides sp. Root79; identical to SEQ ID NO: 56376

SEQ ID NO: 56389 - protein, 681 aa, Nocardioides sp. Root79; identical to SEQ ID NO: 56377

SEQ ID NO: 56390 - protein, 315 aa, Enterobacter sp. 50588862
MDSVEKLKSINWKELITNNHKWIESRLVNHPCDSQAKIVSRIFTIPFSGVIQEHHHLVESMADAIEHYVFDKEALAKMKADGVTPFRKAAQFFGDTNPVKDGKYGELLLYILSEAILNTPMVSHKITNLTNLNDQVKGGDGVFFGVYRENLSILIGESKIYKSFSGALESAFDSLDRFTKSYTSGALGHELFMARTNISSNFDFETMELIYKAFTPGDDIYSECVKTHPVLLIFEDAEIKSIEEKAINKAEAERLFDAWLTKKKEAIKSDIDAKLIKYPNVKPCFLDFFLIPMTDVGEFKKSLYRAIHGIDYKEN

SEQ ID NO: 56391 - protein, 843 aa, Enterobacter sp. 50588862
MIRRATWLASLGSSGNETDKNIASAFGTLLYLYDTSNDLYLKVCYILQSRAGNIVSAKHLEGLFSQGNIIKHFSSSLDFELTSQKFLLEKRVSNNNYIYFTHFQRSLWDKLERGENVAVSAPTSAGKSFVIKRYIYDSVISANDGYFVYVVPSKALINQVGNEMSRELKDIATVMTTYKDSENDDLKIVYVLTPERCMRLLNENGNKAPKIVFFDEIQNLEDKSRGNVFENVIYRMTSLWQSTQFIMAGPYIINLHHSLNKIIDLNLVEQTTSTTPVLQLKVVLTVHKNKKTVNYKLISPVGDAVLGEYDIGKALYSKLSSSKGAALKHITSILDADEQNIIYAPKKNLAEGWALAIAQTNNEDSELDEDNTDLVYDSRIDSLCSFLENEIHPLYSLVRCLKKGVAFHHGGLLDVARLEVEDLFADGAIRNLVCTSTLLQGVNLPADRMIVISPKIGDYELSHFDFLNLIGRAGRISTSLYGEIFCIQLVDEEWAEDKIESNETKEIQSSVLRKLNEYGESVVSYIDVYTKDIVDTQGELHAVNLASYLRGQFLVDREHYEKIISNSNLTLNQIRVMTNRLEALEDILNVPKDIIYKNPFIDPLLIDQLYFLVESEGVNKWMIDKYPRVKSGVADPNAEFQHMNYYNQYKSIILRLNDIFEIEKEINYKEDGVSRKSSHFVSIFKLVNDSHKWMQGRNYRFFIDDMVTKKLINKGIPVDYKKVDGITNFVTTHINTNLTFILVKYLSLWADVVSSFMSEEERTLNAFFLNLSSMLEMGNYDPQVLEVMAYGINRSTAIELLKKQKINNEQTTWQYLVQYNLDKLSPLHRKYLQRAGFGSSKPA

SEQ ID NO: 56392 - protein, 319 aa, Agrobacterium sp. R89-1
MRFSLSEINADDLVNILAGDPEELGVHLQLVERDVVIDGHNVKIHCHCLTVDGNGRVRPKRLAEFMRNAVADYAIPRSKLQQARERDFKYRSSSAVAEIHRQACTVFTDLEKTGEGGELLLFLLAERFLKIPQILCKMDLKTDTRMHYHGADGVYAGVTAEGLLKLYWGESKVYGDATTAIRDCLASLAPFLAEEDHEGAERERDLVLLSDKADLSDKSLTEAFKLYFNRQSPLSNRVQYCGLALIGFDADIYPADGSKIVSEELVVAAKKELIRWSTNVGNRLKLEKLDQFEIEFFCVPIPSADEFRANFLEALGGTR

SEQ ID NO: 56393 - protein, 868 aa, Agrobacterium sp. R89-1
MSQEDLQQWLLEEGVKEELAVLTKLTVVAEIDNLIAEENIAENAQIIDWERMLLAGSILARSKSRACQEAVLRIATAALTLETSSVVRDAGAILLDKLSNQRTIDLALGRERLVPDLEGRLGVSQRLELQRRKIANSVLLEATGARLSVNEFQHSFWSGATGEKSWMSASAPTASGKTFLVLQWLIDRIRVNEANIVVYLAPTRALVTEIEESLKSVLKGMGLDNIDVSSLPIRQKYLDAVAKKNGLVLVFTQERLHLLANLLGDEILVDLLVVDEAHKIGDHQRGVVLQDAIERVSRANVSMRVVFISPATQNPGELLDDAPIGIPTLAVDSDVPTVLQNLVTATHVPRRPKEWHLHLRQGLEHRSLGILRLPNKPDGLRKRLAFIAAAAGARGGTLVYTNGAAEAEEVAFLISQLVEQTDTVDVELSALADLARKGVHRSYGLAALVEKRVAFHYGNMPSLIRMEVERLFREGKLRFLVCTSTLIEGVNLSCRTIVVRGPRKGKGKPMEPHDFWNLAGRAGRWGDEFQGNIICIDPDDTDAWPTGVPSRARYPIKRETDAVLSAGGRMVDFLSNRAMATERELLDHPQLEQVGAYLLTTYLRLGSIAEADFAKRQNPDDLTNINAQLGILAAEISIPADIAIRHPGVSAVGMQALLAAFRAYSGDVQNLLISPPGSADDYDSVVDAFTLVNEHLYPAFQPPGLLKLHALIVIEWLKGLSLSAIIRKRIEWHQRNGVEYKLPKLIRDTMDLVEQTARFRAPKYLAAYLDILQLFLNEVGRSDLIDNDLDIGVALEFGVSSKTLLSLMELGLSRMSAVALYEKIVRDDFDKSGCLEWVQTHNRELDGMDIPVIILREVREKMLGMGTT

SEQ ID NO: 56394 - protein, 307 aa, Rhodobacteraceae bacterium O3.65
MLDIVSGDPDELDVHLQLVERDISIEGCSIRVHCHCLTVDGNGRVRPQRLAEFMRSAIVDYAIPKTRLDEARARDLKFKSGSAVSALHHEALGAFTDLSNTGEGGEMLLFLLAERFLKLPQVLCKMDLKTDSHMHYHGADGVYASVTDDGLLKLYWGESKVYGDVTAAIRECLASLAPFLNESDHEGSSRERDLILLSDKADLNNPTLTAAFKKYFDRKSSMSNRVQYCGIALIGFDAKFYPEDGIKAVADDIAQAAKDEMKKWLKNLETRISVEKLETFDLEFFCVPIPSAEGFRDAFLEALGLKL

SEQ ID NO: 56395 - protein, 748 aa, Rhodobacteraceae bacterium O3.65
MRIEAYKRKFDDSVLVEATGKWLGVNEFQKEFWTGASSENSWLSASAPTASGKTFLVLQWLLDRLITTDTSVVVYLAPTRALVTEIEASLNDLLADDKTINVTSLPLAEKYLSAAAGVTKTIFVFTQERLHLLANILSDELSVDLLIVDEAHKIGDNQRGVILQDAIERISRSNHKMKAVFVSPSTQNPDELLQDAPIGTDRVSVDSDIPTVLQNVILAQQVPRKPKEWALGLVSGDSSIPIGVLQLANKPAGLRKRLAFIAAAAGARGGTLIYCNGAAEAEEIALLISQLDIREKTDDKELLDLADLARKGVHRSYQLAPLVERGVAFHYGNMPALIRVEIERLFRIGKIRFLACTSTLIEGVNLSCRTIVVRGPRKGRGNPMEPHDFWNLAGRAGRWGNEFQGNIICIDPNDESAWPIGVPKRSRYPIQRETDAVMTSKDGLVEYLDGRDIESLSDLEGAEHYEQVGAYLLDTYLRLGSLANAGLAKRHDSKLLEKLDACLERMARKIDIPAELSIRHPGVSAIGLQRLLDLFKNYEGDVENLLPAPSESVDAYDRYVTVMRRINSSIFPVFLPDGLVPLHALIVVEWLKGLSLAVIIRKRIEYHQRNNKTFKLAVLIRDTMDIVEQTARFKAPKYISAYMDILHMHLLEIKRDDLIDEDFDIGVALEFGVSSTTLLSLMELGLSRMTAVALYEKISKDDLSRDGCVRWITDHAPNFEGMDLPNIIVREVLERVRPPRSLQEQFTD

SEQ ID NO: 56396 - protein, 301 aa, Bacillus sp. SDLI1
MIKPLVKKKFLDHFYHEVKDHVLEDDRSRLNLHIIRILNNQFAIKPLMQELLNHMISFCLSKKEYKNLIEEERFGELAELAQERFRDYESNEGEFGELLLYCFLESHLEAPKLLTKMNLKTSHNDYVKGADGVHLLKLSENNYQIVFGESKMYKTFKEGLRKAFSSINSFINHKKNNIHFEINLVNTHFDQEIEDEQTYEEIKKIIFPSAQEDEINTDNAFGIFVGFNLELDSQIKRLSNSDFQNTVRGMVKDVVKKEYKYIESQIDKYELYGYTFYIYCIPFVDIEKVRKEAIKKLKGEG

SEQ ID NO: 56397 - protein, 854 aa, Bacillus sp. SDLI1
MKILERLAMDVAKDSYFNQLFNEISEMFFKNVFQEKQDLITKKKLTDIMRFCDILSNSTSTEHRNLSYKIITLLYPFFQEDYSFKLVANAVLSKLGNFPALQLLNYNVSLPFDRRLETKVKRIVQRTNTFDNIYLTDTQFALYQKLINSNVFSFSGPTSMGKSFMIKLKIAELMNEERRPNIAVIVPTRALIHQFASEIKIDLKKQVNEKNYTVLTHGNLEGLDIENTKLILVLTPERLLSYLSEFTYPRINCLFIDEAHKLASEQDKRSVTLYTAIERAMFSNKHIQLFFASPNVSNPEIFLKLFNKEANYVYQSSESPVAQQLFYIDLIERCVIHYTELKDIMYKPNILKEQTDCLKIINYLSKDYANLVYCPSRREAVTKAQEYSERFPTKDMSIETKKRIQEAIRIIESVVHPDYYLIDCLKKGVAYHFSNLPQVVRNNIEKLFKDGIIKFLFCTSTLLEGVNLPAKNVFILKNKNGTRNFKKVDFWNLAGRAGRLKYELSGNIFCIRNEDRDWKNSDDFLKGKESITLNPTVSKNLNNNISEIENAINNKELTKLKATEKDIVKYLANIISINTLDLAEGYQSPIIEKLIEIDQSSLIEKAKEKVDLIKIPKKILKINQFIPIEQQESAYQYVLENKLKGKDVTFPSTIDYEHCLNILRLFYKIYQWNDYEQKKSLGNLNSLNYYAVIMNQWINGMSLNESINRSIFFHQDKKRKIYVYRNKKNQPEYFDSKNRSHINILINNLVEDIENILRFSIQTYVSHYYLILQDIYGEDKAGVNWSNFLEYGTRNPIGIALQNMGLSRYVSNYLIKNYKSLFDIEYGILKVDKETLLDKLEFGSIEQQEVQMFL

SEQ ID NO: 56398 - protein, 279 aa, Burkholderia sp. LMG 29315
MAGPFFKIVVNDLARTPRLTGICAGYELGAWRADQLSKLLFQSLPDFCLRYSEYHSIDAGNAAERLGEAARKIYQTDAYRNRGEFGELILHVALKKVFATLPAISKIYFKDSSNHAVKGFDAVHVVPTQAGLELWLGEVKFYQNIGKAITDVCLELDAHFEREYLRDEFLLIKGKIDETWPHAQRLQQLLDETVSLDAVFDVVVVPVLLTYNSPTTALHNQSTDEYLRLLTAELEKHYQTFISKNNLTHIEVRLILFPLSEKKLLVDALHKRLEIYQCL

SEQ ID NO: 56399 - protein, 709 aa, Burkholderia sp. LMG 29315
MPLSFTEIRAKIATAALAGISDPFSLLQDVSSFLNVSRGTSEEHFGQELVIRLLDIRHMFEAHAVIIDALVRESGLFPYLNPDRLGIADALAYEMHRPAANSDTVFHRAQAQVFDHIMSGRSVVLSAPTSFGKSLIIDAIVHLGRFRNIVIVVPTLALLDETRRRLAAHSTRYKIITHSSQTPADRNIFVHTQERVIQNEHIQKTDFFVIDEFYKLNPGEDDGRAQMLNLAFHKLSKQASQFYMLGPNIQNIPDGFIEKFQCRFIRTDFNTVASEIHRFDVQDDTTHAVDLCTRLKEPTLIYVRSPARAHALATKLANALGDVGAASAKETSQWVKERYHSDWSFAKALSAGIGIHHGKLPRSLTQLMVRRFNEGAIRFLVCTSTLIEGVNTRAKHVIVLDNKINNRKFDYFTFSNIKGRSGRMLKHFIGHVYLYHEPPQAELPLVDIPVVTQSDDASDALLIQLEPTELTASSSGRVRQYYEDPLLSLEVLRENAGIDPAAQLAVAQAIVRDLRRAHTMLSWRGFPSFEELAYPCDLLWKHFTEGRPRSGATTARHLAFLLRRLLRARRFSDALALFHRDGRHVDDAIETLLDFQRQWAEFRAPNLLSAVDRIQRHVFEKYGLAAGNYEAFIGRVENVGRPPVVNALDEYGLPTQIGQVVWKELGRPDTLDEMLEALRSRDLYYLELTGFENRFVQDVRNSLMPTRVA

SEQ ID NO: 56400 - protein, 297 aa, Idiomarina sp. T82-3
MNGRLEPQLQNSSEIKELIKRLNVNVKLEDGRSVKTLIAYIQPSAETAYLDKFFEIIKKGVLANFVFTCKEIERKLGLPRQDNEAKLFEKAVRKLSQHTAKGELGELILFTLLDVYFEAPKLLSKIASNSSRRMPVFGADAVHGKFDGDKFELFLGESKLHQKFSPAATDAVKSISSAKENYQNEFDLIESNITLLNIAPSLEEHLIKILDPFSNENVEDLISSACFIGFSEPHLFQCSPDVFEKQYIELAEKHINDYYEKAEQQDLDIEKTYLMMLPFSCINELVEGFIQYIGIPK

SEQ ID NO: 56401 - protein, 310 aa, Idiomarina sp. T82-3
MSEFIRKLAETALNSEGYIHSSNELFRSYVKKMTGDSYDIDGSDVRKLASIVQYLYQLSDRNFREEGNAVLSMLLEVCGNQHPEVVGIARRIFSDSGDFPNINLINRTFPKFEFKYSFLTEAEMEFKSELNSVKELDFSLTDFQRLLWEDLTTEQDVLTVAPTSAGKTHVILSYLVNTILRSDGAFAAVIVPTRALITEVANKLHEITSAYGSAEKIEICTVPKEEAYGDKTVFVMTQERLFEVLQRGDVSFNYLFIDEAHNISDNSRGVLLHLTIEKRECKNICVNGILSNIEEGYQNANIRQTHRSAA

SEQ ID NO: 56402 - protein, 308 aa, Colwellia sp. Phe_37
MSSLNNINQYASTSYSDYAECIDVVEHEYSINSVKSQIRMHYLKLDGNGQPMVKALANILYTYIIDYCISARNREEPLTTRQSTKLTKEARNLFRHPDITDDSPDKTGEAGELLLYFLMESVLKAPQVVSKMELKTNHKDEVKGSDGIHAKFNNEKGVVDFYFGESKLYKDSAAAITDAITSVEQFHDIEMYQHEFTMVTKHFKYADDVTKDAITSLIVHGEPGPNACINHACLIGYDFKGFDNLAGASSNELLQDFLAKFHKDGERLTKLLQKRFDKFNKKHLCFDVFFIPFPSVVEFRNAFNKALD

SEQ ID NO: 56403 - protein, 701 aa, Colwellia sp. Phe_37
MSIIQNEYINKLLNRLEVASVLLQLPASFHPDKVVDFDTREINSLVGYSSILSLSEKPSDISLSYEIITRLLEYTDGKSDRVISAAEVVFARIGNFPGRSLLRTRHSDAIKFDISAPLKLECVAREAENTVYFEQENSVLLTDFQYKFFDSLNEETALSVSAPTSAGKSFVLNLDLIRQIKNKVGQSIIYIVPTRALISEVSFRIRSTLKDSGLGDVIVRTAPFPVDMSKIKQSVVYVFTQERMMSFINSQEGKPYVTSLIVDEAHEIQNGKRGIVLQNAIDITLSRFGNIKILFASPLIKNPSYFLSLFRQNANGRFFVETISPVSQNLILVNQVHGKPLELDISVLNQNKSTTVARVKTGFKFRNGLILQRANLAYSISAMNDSVISFSNGPSDAEKTACYIADLVSDFMPSEDILSFVDFIRKEVHPEYPLIDCVLKGVAFHYGNMPSLVRSGIESLFKKADIKIICCTSTLLQGVNLPAKHIIIENPMSGQSNPMSRADFLNLSGRAGRLLHEFHGNIWCIRPEGWQQDCYKGDKLQEITSAISKIMEDGGTLVQELLADSNLQNDEAEAAFGKLYHDYLVDPGLAFVEKYRSENNSEVLDKTFESIEKIKITVPISILENNQSLRPDHLDRLYQHLNDDKDLPNAFPMFPYKEGAKARMEAIFETITTCFNWELTDAYKSWISYLAYQWIWGEPIG

SEQ ID NO: 56404 - protein, 313 aa, Grimontia sp. 96-237
MDNGPFGSRCVIEEKISDSTVRAYLVGFDLKDDGSSQYRWKEFVQRVLSVIHEFSFGYHEGTSTSNTETLDKVVEAANAIYKIDEFQKVKDIYNNGGFIEDDVADKYLRRGEFGELILHLLLRDNFETVPLLSKIYFKDSLGHTVHGFDSVHIQPETESLWLGESKLYLDPKKGLTELVKDIKEHIKLDYLNSEFSLISKKIIHFEENNEIKKWKTALSSTTKLKDKLKNINIPLLCTYSSELFTKYDDEELDEFLSEYKNEIINLKEYFDKKNDHPLKDNINIILILFPVKCKIELVKRLHNKLSIIQMIGD

SEQ ID NO: 56405 - protein, 724 aa, Grimontia sp. 96-237
MLDLIKKIKQTNDFSFSETFSIYNNCSRMIMKDQNEGMKVLIYILEQRRKFDHSLDEMLADIVESVGFYPYLIKEKLTLSSTNSKVRLISNTSIKIPGKVFHDEQMYLSRLLSTDKNLVVSAPTSFGKSLLIEDIIASFEYRNIVIIQPTLALLDETRRKLKRYQDNYKLILRTSQNPDQDKGNIFLFTAERVNEYSMFESVDFLIIDEFYKLSSRRDDERSDTLNNAFSYLLKRFNPKFYLLGPNIEGISEGFEEKYNAKFFKTDYSLVACEEHNIYENYKNKFGERGEKKAIKERVLFDLLLKKRNENTLIYCSSPYRARYLSKAYLEYLIEKGVTHSDVNIDIIEWIERYVSKDWSLIKLLRMGIAIHDGALQKHITSTIIDYFNNGTIKQLFCTATIIEGVNTSAKNVIFFDKKKGANTFVDHFDYSNIRGRAGRMMEHYVGKVYNFNPVPTYDEIIVDIPFHEQNPISNEVLINIEEDEVIDKNSEQYQYIKSLPKNERELFSNNSLYIKGQKDLLEKIRSEVHSHHELLCWDSTPTYDQLSYCLGLAWDFLTKPDTVYRPMTKSRLVKITFDYGWNKNINELVRNTYSYILENQNKNKSDAVDDAIRDSFQILRHWFQYKIPKWLIVVNEIQKFVCLEEGKRPGNYLYYASSIENDFIQENLAILSEFGVPRSAIDKIKDKIPVNLNQDEVIKEIRTKKLFLMEDLLDYERKKLSENL

SEQ ID NO: 56406 - protein, 319 aa, Bacillus sp. P003; identical to SEQ ID NO: 56152

SEQ ID NO: 56407 - protein, 716 aa, Bacillus sp. P003; identical to SEQ ID NO: 56153

SEQ ID NO: 56408 - protein, 284 aa, Achromobacter sp. 2789STDY5608622
MKAYENLPERLLTCLYDSTHDAGAQALYCAGFELQEWRCNALAAHIMEWIADYALVEDELDVSHANMYVRLQQAAVRIYTSDNYKKRGEVGEITLHAICRDFFGTIPFAPRVHYLTASNDVVKSFDMVHVKYLEEDNFELWLGEAKFFKDANEAITSAIASVTAHIDAGFLKSEKLILGPQISKTIPHHEKIRALFSQNTSIDRLFATAVFPICIAANSDAAANGKSHDGTYVSAVRQELAKLEARLSASGLQEKIRVLLIYVPLGSKDALASAFDKRLKGLQV

SEQ ID NO: 56409 - protein, 693 aa, Achromobacter sp. 2789STDY5608622
MNVSQDEWHELANLTSTELKARVFRILQKAAISIQEGDADDPRLLEVVPRLADLFLSKPELDGLREALSSLARATGLWNYIDKEQATTADLLLAESVTVPELGGVTLHREQIVALNDLLAGRNLILSAPTSFGKSLLIDALLASGNYSRIAIVLPTIALLDEFRRRLKKRFSERFELVMHPADRSQEEKPTIFLGTQERLISRNDLGILDLTVVDEFYKLDPNRRDERSITLNAAVSKLLNKSRQFFFLGPNIDDVRFSSEGRWKFEFLKTRFSTVAVDTYDLGGVPDKEARLFEELAEERHWPALVFVSAPDKANRLASKAAEQMAVSDGSAEFAQWLSDNVGPNWSLVRTVRFGFGVHHGRLPRAIASQMVRMFNTSDLPVLFCTSTLIEGVNTAAKTVLIFDKAINREAYDFFTYSNIKGRAGRLGEHHVGQVYLFNRPPDHQSMEVAPTLFGDQDEAPDDYVVHLEEQEVTRKTDTRVARLKMDLGLDTAGLRLAASIGLENSLALKETVSNALRKKASLVWTGLPKYGEIRAVIDVICSVRRASEFGAFTPSQLTYLINALRLATSMREFLLDYDKKYNGKAEAHDNVFKFLRACEYGLPQHLAAVDMFVKQRSPQSDYSLFIQSISRWFKPEALKNLDEEGIPIQISERFYFNESKHALAQKLLLLARRKSERLTEFERKWILSALE

SEQ ID NO: 56410 - protein, 324 aa, Sphingorhabdus sp. M41
MSLYINGDRSLPEFTSDDLEGVLSGDPDELDVHLVAIDQDIEIDGLAIKIHCHCLTVDGNSRIRVERLIEFMRHAIVDYAIPKSKLKEAQERDAKYNSGSAVAALHHQAMGTFTDLNNTGEGGEMLLFLLAERFLKLPQVLSKMDLKTDSRVHYHGADGVYAGVDDDGLLKLYWGESKVYGGASDAIRDCLASLALFLTETDHEGSSRERDLVLLSDKADLNDPALTAAFKKYFDKTTALSNRVQYCGVALVGFDAGFYPANDTKAVAEEISNAAKAEIENWVKQIRNRISVEKLERFHIEFFCVPIPSADGFRSALLKALGHR

SEQ ID NO: 56411 - protein, 867 aa, Sphingorhabdus sp. M41
MSLPDLQNWLVNEGINADLIKLIKMTAAAELDNVNTEFDIAAETNNVDWQQLLLASSILARSEKRDQQEAALRIATAAMTLETPPQIRDAAAVVFEKLSNRRAVQLAEQRGYLEPNLEDRLGVSMRLEASRRDATQAILVQSAGEWLPVNDFQSEFWEKAGQKGSWLSASAPTASGKTFLVLQWVVDQMRVGLAQITIYLAPTRALVTEIEDSLREILSQSDNIEITSLPLADKYTAAIKEGRKLIFVFTQERLHLLANMLENKLTLDLLVVDEAHKIGDHQRGVILQDAIERVSRNNLELKIVFVSPATQNPGELLDDAPANITPLSVDSDKPMVLQNIIVAEQVPRKPKEWNLTLRTGHKEHDIGRLQLGSSPAGLRKRLAFIAAAAGQRGGTLVYTNGAAEAEQVAMLVKQVLPKESEIDPELAALADLARKGVHRKYQLAPLVESGVAFHYGNMPSLIRMEIERLFRMGKIRFLVCTSTLIEGVNLSCRTIVLRGPRKGRGKPMEPHDFWNLAGRAGRWGNEFQGNILCIDPIDKTAWPSGVPARARYPIKRETDSVLDDAKDMVDYLERRKNNLIQDLEGSDKFEQVSAYLLSTYLRLGSVSEAAFAKRHNATEIEKFDQILSELASTIDLSVDIVVRHPGISAVSLQALMNTFRRYEGDVENLLPAPADSIDSYDRFVTIMRRINANLFPAFQPDGLVPLHSLIVLEWLKGFSLSSIIKKRIEYQENSNKTYKLPVLIRETMEIVEQTARFKAPKYISAYVDILKIFLKEVEREDLIDDGIDIGVALEFGVSSLTLLSLMELGLSRMSAVAMYEKIARDDLDKNGCIAWFQEYNSQLEGLEIPTIIVTEIRQKIEKLQIET

SEQ ID NO: 56412 - protein, 316 aa, Methanosarcina vacuolata Z-761
MEKKKPFNSAKIIEERISEANLKTYLVGFDIDDNNESKYRWKELVNLLQNVIFEFAFGYHLEPDKTKLIDQLSDAAKSIYKIEEFKKAKEIYVDNCSFIDDSDEQRKSFLKRGEFGELILHLILRDFHSTVPLLSKIYFKDSYGVPVHGFDAVHIQPENKTMWLGESKLYMDGKKGVEALIKDIKEHFQRDYLNNEFVIISKKIEPYDNIPEKEEWLELMDGKSKLKDVLSSITIPLLCTYSSDNFTKYDDENQSEFIESYEKEVRNLKNNFDNINDHPLKSNLNIVLLLFPVPCKNELIKRLHKKLYTLQELKDE

SEQ ID NO: 56413 - protein, 734 aa, Methanosarcina vacuolata Z-761
MSEASPKLIDEIIDQIRNSESIGLEESFQFAKDCSELLRGNESEQQYGRKVIINILDNCGKLESSTYDIWADLVEAAGFYPYLEKEKCILQIKNTGEKIRKEFHFCYDLDKYFHEQQKALSELLRSDKNVIVSAPTSFGKSLLIEEIVASKRYKNIVVIQPTLALLDETRRKLFKYTKDYRIIIRTSQKYVEEGRNLFLLTAERVMEYQNLPNIDFFIIDEFYKLSARRDDERSDILNNAFNLLVNKHKSRFYLLGPNIEGISEGFTEKYNAKFFKTNYGLVDCVTVDCYSEKFGERGKKGLLKEKELFELLLKLRDEQSLIYCASPNRARSLSKKFQEYLVRKEVIFPEKRLSIIEWLKENINEQWDFIDCLKYGIGIHDGALPKHITATVIKYFNEKKLNYLFCTTTIIEGVNTSAKNVIFFDSHKGNKKSIDFFDYSNIKGRAGRMMEHYVGRIYNFNKPIAEEKIIIDIPFFEQNPVSDEILVQINDKDIKYKNTNQYKELKNLPLEEKELFKKNGVSIKGQKQILDFLMENINQCYSLIYWKGYPTYEQLRFTISLAWAFLLKSGESGSPMTSKKLVKVTYDYGLHQNMNYLIKSEFTYLASTNKNKTKNEILNAAIQNQFQIQRHWLHYKVPKWLNVINELQKYVCEKKALDPGNYLYYATQIENDFIPDHLSILAEYGVPTSAINKLKSKVPNEIPEDQLLETIVKNSFYKVNLLEYEKEKLLENFT

SEQ ID NO: 56414 - protein, 303 aa, Haloarcula argentinensis DSM 12282
MSQLPDDHWASKTVIQESELLEHIFEVDEKTSDNMKVSRYCVSPGVDTLDYTSFIDFLRKKFKYYVLSEEEVKQTEDAHYEAQTKSAYKLNAENEGIYGELILFAFVEALLDLPIASHKVAWTQNANDEVKGSDGLFYGYFDGEKSLAIGESKIKGQRSEAIKESLNSINRFYSPEGTQMRKHELTVASNNLPQDLNKEEIKELSKVLTSGPGEHRTIHPMFICYESAKLQNAQESNLTRSDLRDELIAEIKKHDVGEYIEEKIEENYPNVNKHWAIMMLMPVDDTTNLQETLKQQIYPYANQ

SEQ ID NO: 56415 - protein, 395 aa, Haloarcula argentinensis DSM 12282
MVPKIAREEIERIYREEDSLDTIVSTPTLLQGVSLPAEKIFLVGDKKGQDDLTSFDFNNLIGRVGRLDTKLYGSIYCITTEDDEWAQEQFENAEEKEVEPVTENALNRPDELIDTLTKENIIEEDDGSLRYTGILLRNRFLRDPDSVDRYLEENGVNQNDREKIQLILEETLESIEIPKEIAKKSPTTDPILQNQLYKKVERNPTDWIVATRRSGFSYEKLEKICKELNRIFKFTYDRSNGIDPPENEAENQIGPIIFAANQWLQGKSYKRMVQNRIDSDAVDDKGVNDSISNLFELVDNDIQFVLVKYFSILVKILESLDRDDTQWMEKFDQMLDLGTMDTNEIALITKGVDRSVAVDIYIPSNVDDVTQYLNSNKDKIPDFYETHLKKQGILK

SEQ ID NO: 56416 - protein, 305 aa, Natrinema sp. J7-2
MENEIEVPWSEHTVIEESELLDNLSDAGEWREDKIKASSFIVSPSYGTLDYDGFVSFLRNKFMFFALSEEEIQESERPHLEAQQLSDYKDDAKMDGKWGELILFTMVEGFLDIPMMSHKLGWKQNPTDQVKGSDGLFFGEYEGTPTLGIGEAKMYTDLDSGIEEALDSTNRFHGEDSQLRNQHELTVAMGNPSDNLSKEKIELLSSLFTGESQDYQMLHPIFVGYEDEELEEFQTKPVEDDQELVDQLQDHVEDTDLLSKVTDSLEDDYSHLRKHWLTFFFLPLEDKDRFVENVKTAIYPWTTNH

SEQ ID NO: 56417 - protein, 859 aa, Natrinema sp. J7-2
MSTTYENAADLEFFNECLDTLIKDLLYNDLGVTDYRWDHNSESKLQKSAWVASLLASSDDEEHQSKALSFAILAYIEKRGTDDEEMYERYLYIVLSRIGNLQTFNTVRREQADVSFEERLISSLDSALGLELSSDLQQHELGDGTVLSSFQKDILNALQAGKDIAISGPTSSGKSFILRKYIQRELENQDGFEAIYVVPTRALIAEVSEKLSSLNDYLEGEQEIEVRTGAYFEEGSEDPDTDSNSFLVVTPERCLRLIDEDTRARIDPDLIFFDEIQNIQDGQRGVLFEDIIQLLSESWPETQIVAAGPYLEEPQDTLSNLTDREVVQIKTAFTPVLQMKAIMRFKSAKNQSGSRRMVDVVLYSPSGDKLEFTIAEPDDLTYTTVNKSKTRALTTIIDEYGQNSQNLVYASKTNLAEDRADAIANNRDREITSARIDDLTEFLKNTIHENYPLIDHLKKGVAFHHGRVPKIAREEIEDLYRSKVGLDTIVCTSTLLEGVNLPAEKIFLTSAYRGDDELSELDFQNLVGRVGRVDSRLYGSIYCVEAEDDEWVDEKLNSDTEESVNPATSQATDNPNKLITALGSNDLRQLKDASTRYTSILLRSRYLKSDYDVDEYLSNKGLSDSDISSAKDELDRTLEDIEIPEKLLRRNPTVDPVEQNTLYRLVMQNPERWVIGENTTEYSYDKLMRITQQLNQVFKFTKDDEYGIDPPNRETKHGALEPIVVVANQWLRGETYHSMIDSRQANVEDEGLSKCIRTILDLVNDDVRFILVKYYGMLVDILEESDYEMGKWASNFDQMLEMGSMNFGELRLMSKGVDRSVALQLGIPPGVDNVEDFLENRRGKIPEFFTRHLQSQGVL

SEQ ID NO: 56418 - protein, 243 aa, Haloferax sp. BAB2207
MFFALSEKEIQEYDRPHLEAQQLSDYRDDAKMDGKWGELILFTMVEGFLDIPMMSHKLGWKQNPTDQVKGSDGLFFGKYEGSPTLGIGEAKMYTNLDDGIKEALDSTDRFHGKDSQLRNQHELTVAMGNPSENLSKEKIKLLSSLFTGESQDYQMLHPIFVGYEDEELEEFQTKPVEDDQELVDRLQDHIEDTDLLSKVTDSLEDDYSHLRKHWLTFFFLPLEDKDRFVENVKAAIYPWATNH

SEQ ID NO: 56419 - protein, 214 aa, Haloferax sp. BAB2207
MSTYENAADLEFFNDCLNTLIKDLLYDDLGVTDYRWDQNSESDLQKSAWVASLLASSDKEEHQSKALAFAILAYIEKRGTDDEEMYERYLYIVLSRIGNLQTFNTVRREQADVSFEERLISSLDSALSLELSSDLQQHELGDGTVLSSFQKDILNALQAGKDIAISGPTSSGKSFILRKYIQRELESEDSFEAIYVVPTRALIAEVSEKLSSLN

SEQ ID NO: 56420 - protein, 304 aa, Halobacterium hubeiense
MSDSTTDPWAESTLFDQEELLDHVFEVESWQFQSLEVSTYCIKPGMGTLDDAAFIQFLGRKYPYFVFPEDEVDDYDFPYREAQRRADFDEDSKYDGKLGELVLFVLVDALLDLPLVSHKIGLMQEPVQDQKGADALFYGLYDGNEALGVGEAKIYTRKSQGIDSAFESTDRFHGAQGDAKTRHELRVARNNLSANLDEDQFKRLLDVFSPGKSQHLHVHPIFLGYQADWLTEKQKECNSPQELEEEIVTEIKDSEIQKDVQESLSEDYPNLEKYETVFMLFPLEDVDEFRERLQEEIFPHSVNH

SEQ ID NO: 56421 - protein, 867 aa, Halobacterium hubeiense
MDTYSVAAELESFNRCLDQMAENLIRDDLGVRETGGLSNWGNQTISPHGDLTQENVEKSAWVASFLASSDDSEHKRKALAFGILSYLHYNDTEYEEMYERYLYIILSRVGNLPAFRNVKRSESRVNFKADLIHSLDSVLGTELGTNSSRYSLENGDVLSEFQKEIYEHLLAGRNVAISGPTSAGKSFILRRYIEEMARQPGNFEVIYVVPTRALISEVSQKLTDLNDSLDSPENEFDVLTGAHFPEDEDRSDNSFLVVTPERCLKLIDPDVRKEIDPNLVFFDEVQNIEDDERGVLFENIVRSLEDYYSSAQVVAAGPYLENPQETLEDLTSNEVAEVKTGFTPVLQMRCVLRFISQNRSKNRKLEVRIHSPSGNIEEIEVPEPESMTYSEVKGNKKKSLRKIVRRFGSDSKNLVYSSRKDYAEDRAKYIAQDKEKQTSSEELDDLINFLEETIHEDYSLIDCLQRGVAFHHGMVPKIAREKIEEIYSNQAVIDTIVTTPTLMQGVNLPAEKIFLVSSNRGQNELSDFEFGNLIGRVGRIDTKLYGAIYCIEGEDEEWADNKLENTGDKAVEPATNQAVDDSDELINALQQEDLGSVEEPSVKYTSVLLRGRYLKDQEISSYLSNKGMEEGEIERVNSALERTLSDIEIPNSLLRKNPTVDPIKQDILFNVVQSNPEQWIIGTNSRDFSYSSFLRITRQLNKIFKFTNDDVAGVDPEHVETDYGALEPIVVTANHWLRGDTYHAMIESRRDAENVNDGSLDKSIRNVLELVNTDIRFVLVKYYGILTTILEYLDYETPEWMLNFDQMLEMGSMEFNRIHLMSRGVDRSIAVALYLPQSVDDPVAYLNENSGRIVPFHRSHLENQGIL

SEQ ID NO: 56422 - protein, 165 aa, Halostagnicola sp. A56
MHDGEESLALGESKIQKRRSDALRNSLDSINRFHDPTGDTKTRHELTVAADNLSSNLSEPELDKLRNLLKEGEKSYKQVHPIFAAYDESWILDVQADAQDEDEIRELICEKIDNSGVNEYIFDKLEEDEYKKLKKYELIFFLLPLEDADSFREQLQHELYPYINS

SEQ ID NO: 56423 - protein, 283 aa, Halostagnicola sp. A56
MTNSENSTYEIAADFEVFNKCLDALAINLIKKDLGVDQQKQTGLDEFFVEESSQEISDGDIEESAWIASVLASSDNDVHKRKALSFGILAYLRNRDEDQESLYERYLYIILSRVGNLPAFNNVRRAEGQLSFRHQMMQSLDSILELELGSNLDKYEIDDGKIFSEFQKQIYDLLVDGKDVAISGPTSSGKSFVLQEYIDYRSKSDESFEAIYVVPNRALISEVSRKLSNRHEDVEVRTGAYFDDPGLDSPDETEPDSFFHTHIRSEQSSRPSFHRLSHSNSAE

SEQ ID NO: 56424 - protein, 237 aa, Haloarcula sp. CBA1115
MEEMFEEGTWPFKEAQKRSDFTDDPSNDGKLGELILFLFVDAVLDIPMVSHKIAWTQEPVQEVKGSDGLFYGIYDGKESLALSESKIHKRRHDALRNSLESIKRFHDHRGNTKTNHELNVAAKNLSSNLSEAKIQKLMDLFTGRDTSYQQIHPIFAAYNESWMLDIQAESDDEEELRERVTSELRDSGVKQYLINKLNEDEYQSLKKYQLIFFLLPLEDVDSFRKELQHAIYPFKNS

SEQ ID NO: 56425 - protein, 871 aa, Haloarcula sp. CBA1115
MTETGKSTYEIAEGFDVFNDCLDALTANLIQEDLGVSEHNQTGLDTFQEDRNSETITDEDIRQSAWLASALASSDNDTHKLKALSFGILAYLRYQGNEQESLYKRYLYIILSRVGNLPAFENIRRAEDQLGFETQLINSLDSVLGLELESNLDEYEIDEGKILSEFQMEIYNLLIEGKDVAISGPTSSGKSFVLQEYIDHQITREEGFEAIYVVPTRALISEVSRDLSTRHEEIEVRTGAYFEKGDIDDTDEDNADVFLVVTPERCLKLIDPSTRHQIDPSLVFLDELQNVEEDQRGVLFESIIQYLTDYYPSAQIVAAGPYLDNPGNTLESLTGRDVEEVSTAFTPILQLKTTLRFISQKSKINRELELEIHSPSGDTMSIRVPEPESMTYSEVKGNKKKSLRKIIETFGKDTKNLIYSARKDYAEDRARHIASFRDTQPVEASVQDLIDFLSDAIHKEYSLIECLEKGVAYHHGMVPKIAREEIEQIYDNSAFLDTIITTPTLMQGVNLPAEKIFLVSANRGREKLSDFEFNNLIGRVGRLDTKLYGSIYCIETEGDEWADDKLGNDEKKEIESATSKATNNAKQLIDALQRDDLSQIDDDAIRYTSILLRGRYLKDQDTVAAYLQNKGFDKENIQAAEEALQSTLVNVEIPESVLRKNPTVDPIKQNTLYQNLQQNPDPWIVAPNRHEYSYEQFESVTSRLNSIFKFTNDPEMGIETEVRETENWGLGPIIYAGNEWLRGYNYNTIITGRQESEAVNDGDINTSIRKALQTVRTDIRFVLVKYYGILTTLLEHGDIEAPDWMLRFDQMLEMGSMRYNQIRLMSMGVDRSVAVSLRIPEDVDDAVGYLNENRGNIAPFYKRHLKNQGIL

SEQ ID NO: 56426 - DNA, 822 bp, Planctopirus limnophila DSM 3776
atgccgtggtcaaatcagcaccttggatggttagtccaactctcgccgccgcagaagacagcggatgggaagccgattcatgtctgggcgtttcagtacgaccagacggataaagcgctgatgtcgtcttgggcaaagcattttcgcaaccactactgcctcgatacgcagatcgatgcccttcgcaaggggactgggcacacgagaagccagtatctactcacgatgaagtttccgagcaaaacgatcgctcctggccccagtatccgatcaggagatttctgcgaaatccttgtggcagatttcctgcaatacaacttgaattacttcgtaccgcgcactcggtattcatcgaaaacgattaaaaatgaatcaacaaagggcggagacatactcggattcaaaatcctgaagtcgggtaagcattccaaaaacgatgagcttgctatttttgaagccaaaggagcactttcaggggcaagaaagcccccccggcttcaggatgcagttgacgattcaatcaaagatgagattcgcaaagccgagtccttgaatgcgatcaagcaacgttatctggatgcaaatgctgtgaatgagatcgcgacgatcgagcggtttcagaacttcgccgatcatccatacaaggaaacgtacggcgcggtcgcgatcttcacgagcacggcgtattgccaaacaactctctccaagacagatgcttcaaagcacccgaaatcctctggattatcgcttatggtgattaagggcgatgatctaatggcgttggtacataccttatatgagctcgctgcgaatgaagcctga

SEQ ID NO: 56427 - DNA, 3099 bp, Planctopirus limnophila DSM 3776
atgaagcctgaacaagcctcagaaagtttgcttggagcaacgcgtgcgcgggccaagatgcacgaatacggtgtgccgagcgaagatttcatcagaattccgagagacccagcccatcttttttcgctgacaatcggaatgcttggtgatgtggccgcgggtacgtcagtcaatcacaagacgtcagagcgacttgctgaaacctcaaagcacctactgttctgtgcacgcttcttcgattcctatttggaatcgaaactcgactcacaacttgacgcgtacatgttgctccttgcaggagctacgtactatctcgcagcacttccaggaagttcatctgtcatcgcttcgcgaatccctgaaccatgtcccgatttgggtgcaagaggacttgaacagctactgtcgtggagtttaagaggcgattttcaagtcgctcccgcttttccgatcgaaacgtacgcggaaattcgaaaccttgcagatgctctgggaaatttcaattcgacgggagaaggcattcaagagctggatctagcgatccgtactttaagaacgtcagcctatgctgaaggtagcccccgtgaagtcttgttcgctgatttgattggtgccatcgcccgaacaaggcaagccaagtcaacctggacaacgcttccccgctacaccgatgttagcgaaacactttgggctccaataattcgcaagagtacctttatccgtgaagtgtggccagcgcagcagttgctcggggaccatggtctatatcggggtaagtcggcggttgtgcaaatgcccacaagcgccgggaagactcgatcgctcgatttggtgattcgtggcgcgttctacgctgaacgaacctcgcttgcgattgttattgcccccttcagagcgttgtgcgaggagattcgacaagctctggcacgtagctttagtggcgaagcgattaacgtagatgcgctctcagatgtttcacaagatgacttcgatgtctctgatatcttatcagcgaagcaagtgctggtgatgactccggagaagtgcctgtacctgctgaggcacagcccggaaattgcggaggaattgggattgttgctctacgatgagggccaccaatttgacagcggcagacgtggagtgacttacgagttgcttttaacgtcgttgaaatccgcagtcgcggaaacgacacagacggtgctagtctccgcagtcttaaacaatgcacaagcaatcgcagactggcttcttggatctggaggcgccgtcgtctcaggcaacggacttcttccaatgacgcgttccctagcattcgcaagttggaaagatcgactcgggcggctcgaattcacagattccaatgatcctgatattggcgaattttttgtaccacgaattattgaaaaacagtccttgaatctgttccggcgagaacgaaagcctcgagagttccctgaacgggacagcacttccatcggactgtatttgggaatgaagttagctgcctccggcggagtggcgattttcgttggcacaaaatctacggctagctcaattgctcaaagtgcagttgaggtgttcagtcgcggcttagcaatggcatctcctgacacatattcagatgcaggtgagattcagcggctcgtctatcaaattgagaggaatctgggagactcggtcgcatcttcgaaggctgcaagacttggcgtatttacgcatcacgggaacaccccgcatggaattcgactcgcggtcgaattcgcaatgaaggagggcttaataaaagtcgtcatctgcacatcgacacttgcgcaaggtgtcaatttgccgattcggtatctgattatcacgggagccaggcaaggtaacgagcagatcaaaacacgtgattttcacaatcttcttggtcgtgtcggccgctccgggatgcacacggaaggaaccgtgattttctccgatccgaaaatttatgatggacgaaccgacgcgagcgaacggtggagatggccaaatacaaaggcacttttggatccgtcaaagtctgaggaatgtcggagcgcattactctccgttcttgatccggtgtactcaaaagatcgcgagatgagtctccgtttatctgtcggtctgatggtgcaagcgcacaagaaaggtaagaagggctggcacggtgtagccaaccgactcgctgtgaagtatcgagagaataacttcgacgaggcggatctcgaaaatcaactggaagcgaaatctgacatcatgtcagcgattgaaagttttcttcttgctaattgggaagaaaacagtgacgagttgagcgcttcgattgagtcgctcgccgcgtccacccttgcatatcacattgccgaagaggatgagcgcatcaagctggtcgaattatttgagaagttggctgagaacgtagcgacgaatattccagacttggcaacacgtcgaatattttcgcggagcctttttggattggctgataacctcacaattcagaaatgggtcacagacaatctgagtgagctgttaagccgttccgatacagcttccttattgcgtgacatctggccgctgtttactgattttgtcaggaataaatcattcgtcggttgctcaattccgtcatcggtgagtcaggccgcccagagttggatagagggaaagcccttcgaatcaatttttgcagacatatcgggagccggatgccggttcagtgccagaaatctacatccgacaatcgaacacattgtcgacttatgcgagagcggtttcggatttgatggaatgctgattgtgggagctgtggctgaagtcctgacaatccaagaatcgactgcgaccgacacgatcgagttgctacgccagctccaaaaggaactcaagtacggacttccctcgtctctatcgatcaccatttacgaattgggatttgctgatcgcgtgcttgcgcaggagttggcagcaagcttgattggtgcgagtgaacgtaaaaaggtgaaacgacgattgctcaacaagaaggaaactgcccggtcggttttacaggcctttccgagctattttacgtcagtgctcgactccctttga

SEQ ID NO: 56428 - DNA, 837 bp, Leptospira interrogans serovar Lai
attcctgagcacattaattggctaaaagatactggcaagcgtttaaagacaaatgatggtaaaggcattgaagtttgggaacttgaatacgcgaatgaagaaaaagtattaatcgattgggcaaattatcttagaaatcattattgcttagattgcgatattgattttttacgtggagaaaaatcgaaaaaagaatatttagaaaatattaaatttccttcaaagactacccctcttggcccaagtgtcaaatctggtgattttggggaaatactagttgcagattacttagaatggaaactgaatttctgggttccaagagttagatggaattcaaaaatttcacgagacgattctccgaaaggttgcgatgtgattggttttcaagtgactaaaaaggatataccttctaatagcgataaactagcagtttttgaatcgaaagcaggatttagtaaatcaaacggcaatcgacttcaggatgcgattaaggattcagccaaggatcttgttaggatagacgagtcactcaattatataaagcagaaactctatgaaaaaggcgaaagagcactggctttaaaagttcaacgttttcagaacccaatagatttaccttataacgaaatttttggagctgcggcacttttaacaaatgagtattacgatgaatctattcttgttgaaacggatacaaaaaaaattcaaaaatcattagatccgccgatatttattacccatcctaatagagataaattaaacttaatagttatcaaaggaaaacaaatgatggacttagtttataaaatatatgatttagcagcaaatgaagcctga

SEQ ID NO: 56429 - DNA, 3129 bp, Leptospira interrogans serovar Lai
atgaagcctgaggagaaatctcaattacttcttggtgttactcgctctaaagcaaaaatgtttgaatataatgtttccattgatcatcatatcaacattcgacaagatccgatcaagttacttactttatcgattgggattttgggtgaacttgcggcaagggaaaattctgaagatttttcagaagcaaatctagttgatttacgaaagaatcttcaattctctgctagattttttgattcgtactttcattctcaattaaataaacaactggacccatatttattattacttggttctgcatcttattatctttgtgatttaccaggtagttccttagttctagcaactaatatagatagttggaatatcgagttaaactcgaacagaattgatcgtttgctggcttggcttttgcaaaataactataaccaaaatgctaatattcagtatagtttatatgagaaggatattaaaaatattattaatagtatgattgaattcaatcgtactggattggaaggcaatagtttaattgctgtagctaaaaatttgagaaaaaaagcttatgaattcgggacacctagggaattacttttttcagatgttgtgacagcgatcgttcggaaaaaatatgaaaattccagttggatttcattgccaaaatattcttctttagataaaaaaaagtggtatagcttcttaataaaggcaaacgcaattaaagaattatggcctgctcaacaattgcttggtgacgctggcgttctaaaaggaatttcgtcgatagtgcagatgccgacgagtgctggtaaaacaaaatcaacggaattagtaattcgcagcgcttttatttctgagagaaccaatcttgctgttatagtagcacctttcagagcgctttgtcatgaaattcataataacctattatcttccttttctggtgaaactgtaaatgttaacgaattaactgatgttttgcaattcgattatcaaattgatgaatttattaatcaacgtcagattttagttgtaacacctgaaaaatttatctacttactaaaacaaacacctgagttggttgaaaagatagggttaataatttttgatgaaggacatcaatttgatagtggaacaagaggtatcaaatacgaattacttttaacatctcttaagacaatgttaaggagcgattctcaaaaaattttaatttcggcggttataaccaatgcacaagcagttaatttatggttaaatggagaaaatgcaaagattgtttttggcaaatctcttacgccaacattccgtacatttgcctgtgtaagttgggtcgatccattaggacgtcttcttttctttgatcaacagaacccggacattgaggaatttttcgtaccccgagttatcgagtcatatgaattaaagttacgtaatagagagaggacagttcgcatgtttccaatgcgtgatgatgagcaagcaattgctttggaactcggcttaaaactctctaaaaatggtagcgtagcagtattttgcggtaagaaagatactgccacgaaagtatgcgaaaaaataatcgatgcttttgaacgagaattacctctatcgcccccttctcagttttctaacggttccgagattgaaagattatataacctttattcggcaaatcttggggattcgtctatcgtaaccaagtgcgctaaaataggaatttttacacatcatggaaatactccacacggaatacgtttggctgtagaaaacgcaatgaaactagatttgatacgcttcgttatatgcacttctacattagcacaaggagttaatttaccaattagatatttaattgtaactagtgtttatcaaggtgcagaaagaattaaggttagggattttcataatctaattggaagggcagggcgttcaggaatgtatacagaaggaagtatcattttcgctgatccagttctttatgacacaaaagcggaagctcaggaaaattggcgttggaaagaacttaaaaaattgttagagcctaataattcagagccttgtgcaagtacattattaacattgtttataccttttgaaaatgaaacaaagtcaaggcatattcaaatggagccaatggactttgtgaatttgtatatagcaggtagtactgaggtagaacgatatattgaaaatatagtaaataaatatgctgaaaaaaaatacactaaacaagatttgcagagacaggtaaattggaagattaatatcatttcctcaattgaaagttttttgctttcacaatggcccgaaggatcaaacgaccagagtagtttaggaagtataagcgagttagccaagaatactcttgcctatcacttagccgacgctacagaaaaagagcaaataattgaaatatttactattatagcgaatcggattttgaatgaggttgctgattcaaaaaagaggaaaatttatggaaaaaccttattagggataagggaaatacaagagatagaatcctggattcagttaaatatagaaacattgaataatgtaaaagattatagattattgttgcagaaactatggcctattcttctcgtacatactaaaaacaatgtgttcgttaaatgcagttcgcaatcaagcttactagcgttggcatatggttggattgaagggaaaccattttatgaaatatttaataatttcatttcaactggagtaaagctagttagcgggatacaaagacgaaattataaacttgagcatgttgtcgaaatttgtgaaaacgcaatttcctatgaaggatcagtaatacttggagcggttgttgaaattatagagtttttatttcctcaagaaatggttgaacttatagaaagagtaaagattttgcaaaaaagtgtaaaatatggattgtcgtctttaacttcaataaatgtttacgaattaggattcgcggatcgtgtaattgctaaagaattttcgattttgatgaaaactgaaaaaagtaaaagtaaaattagagagtatcttaaggaaaatgagaatgcttttagaacaatacttttaaaatatccaattctttattcgcaaatatttgaaagtatattagaagcgtaa

SEQ ID NO: 56430 - DNA, 831 bp, Campylobacter showae CC57C
atgaatttgttttttgataatagtaaatattttaaatttgataaatctatatcttctaaaaatggaaatggaattcgggtatttagacttgataaagacttattagatgacaatagtctaaataactgggcatctggattaagaaataattatgttgaagagagtttgttagagccgctaattaaaggaacaggattaacaaaacaagaatttttggagaagaatatatttcctagccatcaaaatagcctaggcgcttcaactatgtctggtgaatttggagaaatattggtatatgactatataaatttcactttaaaacattatgtcaccaggactagatatttggaaaaagttaatcccaatatgccagtatctggaagtgatgttataggttatcaagtgaaaaatattgataagccaagcaagacggatcacttaatagttgctgaagtaaaaactcgttcaagtaaatctggaaataaaaaaaatttgtgtgaaaagactgttaaagatgctatagaacattctgttaaagacagagttaggctaggagagtctctaaatgctgagaaaagaaggttgcttaaccgttcaagaattaaagaagctaaaatagtagaaagatttcaaaataaaacggataatccattcagattagacttttttgcagttgctgtattggataatgaattgtattcagaccaagtagttttggatgtggtcaatagtcagcctgaaaatgtaaaatccacgaatgtattgataattctttctaaagaattgaagctcttcttaagagatttatataggagggcttgctcatgttga

SEQ ID NO: 56431 - DNA, 3099 bp, Campylobacter showae CC57C
atgttgatagaaggtacttcaaaatactatttgaaaaaagttcgagcaaaagcaaaaatgtatgagtatggcgtgccagaaaatctccatatagaagttgaagaacaagcaaatgatcttatattacttagcattgggatagtcggagacatcgctaatgaaatctggaacatgaaacaagctcctataattcttcctaaggaaaaggaagaagaattgtactttgtatcaagattttttgattcatatttccaatctaaaatgagtatagaaatgaatccgtattacattttaatgggagcagttacttattatttctgcaatatgaatggcagttcaaaagtaatgatgagtattatgccagatttaacaaattttgaattttctgcttctggattagaaaatataataatatggctgttagatggcaactataaatttgatgtttccgatatagatgaaaaatacagaagctatattatccaactaattaattatcacaatagattttttgatagtgagaaactagagaaagctcaatttgaagaatttagaaactatgtttatcattttgggaatgatagagaaatattatttacagatattattttggcaattttgaagaaaaaaatttacaattcatgtattaatctaatgccactatattctggaattgataaggataattggatttcaacatttaagaataatgcgatgatgaaagaaatgtggtcatctcagcttttgttgggagaaaaaggaattttcaaagggaaatcaggtattatccaaatgccgacaagttcaggaaaaactaaatcagtctctcttgccgtacaatctgcatttttatctaaaagaacatctatagtaattgttgtagctccatttagggcattatgtaaagaaataatgtttgatatggaaaaattttttgcgtttgataaaaatataactgtaactgagttttctgatgttcctgagcccagtgaaatagaattagtcacatctgagtcaattgtcaaaaaaataattgttatgactccggaaaagttggcgtatattttaaaacataatacggaaataattgaaagtattaacatgattgtttttgatgaagctcacttgttcgatgatgagtcaagaggaacagattatgaactcctattaacaactattaatagttatcttaaaccagatgcacagaaattattagtttcagcagtaatttctaatgctgatcaattaaatttatggattaataatgatggtattgttatagggaatgataccattaaaacatcagaaaagacggtggctttcaacacatttatgtcatccaatattaataatgcctatagcaatcttcattttgtagagcctaatagaaacttagaagaagaattttatgtgcctagagtagttcaaacaaaggaattaaataaggtaggcaatgagaaaaagcagagatattttcctgattttaaaagcaataaacaagatgtaggtatttactttgcaatcaaattgattaggaatggaagtgttgctattttctgttcaaaaaaagacattgtaaataagatattactaaggtttattgaattaaaagagagagggctctctcttgatgattttagttttttgtcagatgatactgaatgttcaaaaatttcacatttaataagagaacatttgggtgaaaataatttatatatggcagcattaaatggtattttaggtcatcattcaggtgtgccgaatggagtaagaattgctgaagaatacgccttaaaaaaatcattagtgcgttgtgtggtttgtacttctacattggcacaaggagtaaacttgccgattaaatatttaatcgtatcaagtgtttatcaatcaaaacatgtaattaaagttagagattttcataatttaattggaagaacggcaagagcaggaaaagagacagaagggacaatcattttaacagaagatgtttataaaaatagtaaggaaacttataagctaaataattataagcgattacttaatgctgataattctgaagagtgttctagtaatcttttgaaattagtcagagaagttgatttgggaaataatagagtaatttcttttgattttttgaaaaaatatattaaatccagatattctaataaggcagaatatactgaaataaaaaaaggcattcttaaatataaagagcaaggaagagaatatggtgaagaaattttctataaaatggatgaaatagaacatattttagtgtctttggaaaattttatacttggctttgcagatattgaagatgagagttttgatattattcaatctacatatggatactatttggcaaatgaagaagaaagggaagaactgaaagccatatataatctcattaaaagtaatattgatacacttgatgttggtgatagattgctttatagaaaaagtatgttaggtatactgacaatgaaagaactatctaaattcatagatgataatttatatgaaatagcaaatgcggattttgatacattgattaacttgattgctaataaattgaaagaatctgaagattgcaagattatacctaaatttattgatgacggatatgtttatgaattattaaaaatgtggattaatggtaaaagctatattcaaattttagactattcaaagtcagtagatttactaattaagtggggtaaaaagagtagagatatatcgttggaagacataatagctttgtgtgattcagactttggatatacttcattaactataatacaggctattatagaggttttaaatacaaagaattgcaatgaaaacacaaaggaagatttaagtgatataatttataggataagatacggattaccaaacaaagagtctgtatttatatacgaacttggatttgcagatagaattatttcgcaaaaaattgctaatgaaataagtgattttgactgtagcacaaaaaataaaataaaatctacaataaaaaataataaagagaaactacgaaaattattggcgaactatccatcatatttcttggatagactgcaaaaattacgataa

SEQ ID NO: 56432 - DNA, 897 bp, Pseudomonas aeruginosa BL04
atgccggagtcgaatgagcttccagcctcaggatgcagcagcgtgcccgttttgactcattcttcggccgtgccctcatcgagggctcccgactttttatcttgtctttcaaagtgcccgggctttctcaggtctgccgatggggctcctatcgatgtctggaagctctgtgctcctccttcggaggagcttctgagtgcctgggcatcacgttttcgagagcattattgttccgaagcagaaatcgacatgctcagagagggaacggggctttctcgcgcagaatatcttcttcagcttgtttttccagataagagtgcagctcctgggccgggtattcgtgcgggagactttgccgagatattggtatccgattacgttgagtttgtgcttgggtactgggtgcctcggggtaagtatgcggaaaaagctagtcgtgatgagtcggtcaagggcgtcgatattctcgggtttcgtgtttgtgacccacaggctgcgcattcttctgacacgcttatcgcgtttgaggtcaaagcacaggcctcgggaggtaaatacaccgggcgcctgcagaccgctattgatgattcgtcaaaggactatctcagacgggcaatgacgctcaatgcgacgaagcggcggcttcatcgtggagggcaacaggccgaagctctccttgttcagcgttttcagaaccagtccgaccacccgtacatatatcgctctggggctgctgcaatgctatcggacgactcgttcgatgaggctctgctcaaaagctccactacggttgctaagcaccagaatgccgagaatctcgagcttgttgtcatacgcggcacggagttgatggcgctggtacatgccttatatgagagggctgctaatgaggcctga

SEQ ID NO: 56433 - DNA, 3144 bp, Pseudomonas aeruginosa BL04
atgaggcctgagatcaacagccgtcgcttgttcggcatcgcccggtctaaaggaaagatgtacgagctaggagtgccagaggcgtctcatatcgctgtaccaccgaatgttgaacctcaggagttgttcctactgacggtggggactttgggggatgttgctgcgattattggtagcgcggagaacgtagacgtaccacttcctccaggcatgatggaggagcttgggttctcagcaagcttcttcgacgccttccttgagtcgcaattttcccaagccattgcgcgtgacacggctctcctcgctgcatccgcgtactacctggctcgtcggccggggagcagcctagtacttgcgcggcaacttggggacgctcatgaagatgatcctgtagataggttgctgcattgggtgttaacggctcgctgggagcgctatccgctcagcaatcacccattcttcggtaagtccctagagaatgtagccaggctgctcgcaaatcacttttacgatggctctggattgaccgaattggcgttggagcttggtgcgttaaggagtcgagcctatcaaagcggcaccccacgagacttgctgttcatcgacatcatcgtagctactgtccgtctgcgtgttgcggtgtcagcgtggaccacgctcccagggtttactggtatccctgctccacagtgggcgatggctattcgaaggccggagtttcctaaagaactttggccttctcaggttctcctgggtcgtgccgggatcttctctggatcgtcaggtgtggttcagatgccgaccagcgcgggcaagactcgttctgtggagattgtgcttcggagtagctttctcgctggtcgaaccaagttggccgtagtggtcgcaccatttcgtgcgctttgtcatgagattggtacttctttgcgccatgcgttcagggacgacgatgtcaaagtcaacgagctttccgatgcactacaactcgactttttgcagcaagtttcagagttgcttggtacccaagcacctacctctcagtacattttggttttgacacctgaaaagcttctttatgtattgcgacaggctcctaccctagtgactgacatcggcgtagtggtctatgacgaagggcatcagttcgattctggcagtcgtggcatcacttacgagctgttgctaacagagattaaggcgctgctttctcctttcgcacaaacgatcctagtttctgcagtcattcaaaatgcacaagaaattgggaactggcttattggtgatggcgcacgcgtagtcaacggcagcagtctgctgacgacagcgcgggcagtagcatttgctagctggatagagcgtctcggtcaacttatgttctacgagtcgagtcagtacgatcaggctgactactttgtgccacgggtcattgagcagcaattactgcagcggcttggacgggagcgttcagatcgctatttcccagctaaggagagctcaaatgatgtggctttatatctcggtatccgattagccccgcagggggccgtagccattttttgtggacggaaggatacggcttctaacatggcagcacgcgctgttgatgtgtatgagcgtggttttgggattgcaccgcctgcggcatcggcagatgccgatgaactgcgacgaatgaagcgtcttgtcgatgcgcattttgggagcctatcagttcctagtcgagcggcatcacttggagtctttgtacatcatggtacaaccccacacggtttgcgtctgtccattgagtatgcgatgcaaaaaggacgtataaatttcgtcgcttgtacctcgaccctcgcgcaaggagtcaatcttcctattcggtatctgattgtttcgggtattcaccaaggcggagagaagataaagactcgagattttcagaaccttgttggtcgtgcaggaagatctggaatgcatacggagggtcttgtcatattttccgaccctgacgtctacgacaagcgtatgcgacgaggcgagtcttggagatttcagtcgtctgttgagttgctgtcgccagaactttcaggtagtacgacaagctctcttctggggctgcttgctccagtgcagagcagcgatgggaaggccgaatttagatattcggcagaggttatgtgtggcctcttgttgtcagatgaaagcgcgtgggtagcatgggccaatgaagttgtacgacaaaatcctcaatataagtttgacgcgaaagcattggttgcggagattagatatagacgccgcttagtgtttgccattgagagttatttgatggcaaatcgtggcgcctcttcattcgatgagtttctatcttcggttgaggatctggctgcttcaacccttgcatatcacttggcttctgacgaacaaaaaactgccgttaagactctgtttattgctgtggctgagtacgtgcaacagcaggagcccgcgccagagaagcaggctatttactcgaaaacattgcttggcgtgaaaagtgccaaagtggtggaaaattgggttgctgcaaatagcgagtctttgcttgcgttaagctcaaatgccgattggttggtgaaattatgggggctgctcgttacccaatccgatagtaagtttttccatacggttgaaccaaaaaccttaccgcttctcttggctaaacattggcttgcaggtgctccgtatagcgctctatttgagtcttcgcatgctcagaatggaaccaaaccatggggcccgactaagcgacggtctttgacagatgacgacataatagatttctgcgaaagcacacttggatttgagtgctcgctgctgttggcggctgttgcgcagtttctttcaggagaaaactcctttcaagatgagaatgcagaggctttgcagctctttcagaaatcgttgaaatatggccttcccgatatgctgtctataagttgctacgagtgcggtttttctgatcgtgctgtagcccaggaacttagagacgtagtgcgcgctgctggttttactgagggcacattctctcttgcactcgagtctcacggtgagcaggtcaaagtagcgctcgaaaattaccctagttatttcgagtctgtcctaactgcttggcggtga

SEQ ID NO: 56434 - DNA, 795 bp, Pseudomonas aeruginosa VRFPA05
atggatgatctcggtttcgacttcagtaatgctgttccgtggttcccacatgaacaggagcagccgtacgtgctggtcaggatgactgcccagcaggtggcgctcctggaggaggccatggccgagccgttgcgccgatgctacatcaccgatgaggtgcttcaggctgctgcggatcgccatggtctcaccctttccgatgttttggctggaaagctcccggatgccggggcaaccatggctggggatttcggcgaggtgctcggctacttttaccagtcagccatggagtatccgggaaacgccataggccccaagaaatggcggctcaagcaggacagaaccaaaccggcgcccaagtcggatgtcattcacttcctcatgccccaacgtcctgccgccagtgctgctgaccaagttctttgctctgaggtaaaggtcaaatctacttccgcctcctccgatccaatcggctctgcaatcacagactgcgcaaaagatcgcaccagtcggctcgcgagcacattggtgtggctacgtgagcgtgccatgactgaggatctcggtgacgtcgacattccgcttctcaaccggtttatcaacgcagttgatcatccgcctgcttctcggcgatacagagctgtcgctgtcatctgtgagagttttgttactgctgaactcagcaatgcgcctaccacggccagtgacgattacacactcgtcgtgatctcagtgccgaatctgcataccacctacaacgcggtctttgaagccgcgcgagcgtcggtacgctga

SEQ ID NO: 56435 - DNA, 2217 bp, Pseudomonas aeruginosa VRFPA05
atggcccggcacctgggtcagttttccgtagcagcattgcccctcgagctcgcccagatcgggagtcgcctagcagactattacatctcgctagtaggagaactgttcgacggaatccactccatggatacccccagcgacgactgggcgcagttaggaaatgcctttctccagttttcgaaagagacacccgccgagcaacttgaagcgttgggtatctcgaaggatgaagcagcgttgtttgcagctgcagctttctactttggagactttccagcgtccgcctgcctggccatgcggcagtcagctcggccatctgatccacagagctcatgggctgcgtgctatgacttcctggctcgtccgagcaacctgggctcccaaactgcaatcgacgtgcaagaacaccttcgaagtggggacttggtcggtcttagcgacaaagtagaggcgagcactaccgcagcgcagaatgcgttggcggatggaccggatgtatgggtggcagcggccttgctcaaccgactattggcccgcttcgagagatcgaatattcgggctgtgctgccggagggaaaaactgccttctggacccctcttatcaattcctttattgatcgtaaaccatcgacttgggaattctttccctctcagatacaggccatcgagagaggattgctgggcaacgccgagagctattcgctacagatgccaacaggggctggcaaaaccacgctctgcgagactctgctgtattggcacctgaagcgaaatccgacccatgtcgcgatcatgatggtgccgtaccgatctctggcttcggaactccgaaactctctggtgcgtcagctgaaccgattggggatagcggcgcgctgtgcctatggcggcacgattccatcgggagacgaagtgcatggccttgatcacatcaatgcgctgatcgcgacccctgagtcgctgtccggaatactcagtgctgacccagcattcgcccagcggatatctttggtcatttgcgatgaagggcatttgctcgacagctcgggtaggggtattggcctggagctgctattggcgcggatgaaagcacgcctggctaatccgatccgtttcgtgttcatgtctgccatcattccgaacatcgaagaaatcaacgcatggcttggcggcgacgagaatactgtcattagaagtacctatcgaccggctatcgctgaattttccgttcttcgatcctccggtaccggggtaaacaagtccgtacgtcttgacatgcatccgcatgctcagcagcggcactacgcgatccatggattcttggatcggagcagctttcagtacgtgaatccccaaacgggacgcacaaagacctacaccttcacgtcaaccaagacgctggccgtgggcgctgcgagaaaggtgttgtcgatgggaacgacggcgattttcgccgctaacaagcgtggtaaccaaggtgcgatcggcttagcggaggagctcatcaagcagctcgagtgcccgctaccattacccaggcctgtagattatgcggatatcgaaacactccggacacgcgttgattatctcgaaactgaattcggtgcaggttggatcggcgcgatgtcgctgcgcaatggtgctgtactgcaccacggtgatatccctcaagagacacgagaggttttggagcagctcttgcgggagcggcgtatccaactggtcatctgtaccagcacccttgcggagggggtaaatctaccgatccgctcgcttgttctttattcggttcagcgacgcgttggcagcggacagccggagaacatgctagcccgtgacatcaagaacctggttggccgagccggtcgtgccggcgcgaataccagaggcttggttatctgcgcaaatcccgatcagtggtggctagttcagcccgtcgccactgctggtgcaggagagccggtgagaggctcactgcgtaacttgatcgaaaatctagagacattcctgagatcacaaaatctcgctctcgataaccaattcttggagtaccaagctgtcattcatccgctaattgatggggtggatgcaacgcttatcgagttgattgcggatgagatcggagatgctgagtttctgaggcaggctgccgacctgtctgaccatactttcgcggcccatcagcttcccccccggctccgccgttacgctgcgtaa

SEQ ID NO: 56436 - DNA, 795 bp, Pseudomonas aeruginosa BWH058
atggatgagctagggttcgacttcgaagatgccatcgcctggtttccacaagatcaggatcacccctatgtcctaatacgaatcagcgcccaccatgtcgctgagctatcagccgcaatgggtgtcccactgcgacgctgctatatcacagatgcagcactccaacaggcgatggcacagcacaacctgccgccagttgatatcgtgcgtgccatgctcccggacgccggtgctgtcatgtctggcgactttggcgaggtgctgacgtatttttatcaggccgctgccgaactccctgccaatgccatcggaccgaagaaatggcgactgaagcaagaccggaccaaacccgcaccgaaatcagatgtagtccacttcgttatgccaaatcgtcctcacgccagtgctgaggactccgtactgtgcgccgaagtaaaggccaaagcgactgctggcagctcaacaccgattgccgatgcgatcacggattgcaaaaaagacagaactagtcgcttggcaagcactttagtctggctgcgcgagcgggctatgaccactgatctaggggatgtagacatacctctactaaatcgcttcatcgacgcggtagacagcccgcctgcggcaaagcgtttccgtgcggtggcagttatctgcaatgaccttcttgataatgaacttgcttcagcacctgacaacgctgatccggagttcactttggttgtaatcggtgtacccgaactgcgcacaacctatacggcggtatacaccgcagccatcaattcggtagtttga

SEQ ID NO: 56437 - DNA, 2976 bp, Pseudomonas aeruginosa BWH058
atgcgtgcatcattgcaaaactggatcaacaacgccgacaatttcagacacctgcggcatttcaatgttgtgcagttgccggtcgatctggctcatataggaaaccgcctggatgattactacatttcgttggtgggcgagctgttcaataaccttcgtgggctaaacgtcccaagtacggattgggcgcagctcggcaatgcctttcttcagttttcggttgaaaccactgatgcacagctaagggagcgagggatatcgaaagacgatgccgcactgttcgcagcggcatccttttactttggcgatttcccagcttcagcatgcttggccatgcggcagtcctctcgacctgccgatcctgcagctctgagagcagcatgctttgactttctggcccggcccgcaaacttgcagtcggaattggtacggacgctgcaaaacgagctgaaggacggggcagtcgctcagattgcagtacgcgttgaagagtcacaagaggcagtccgagaagcgctggaagatgggccagaagcttggatcgtggcaacactaatgagtcgtcttctagcacgcttcagccaaaccaacctcagggcagtgcttccctatggagcacatccattttggacgccattgattcgatcccttgtagatcgccagccttctacttgggagtttttcccatctcagattcaagcgatccaaggcggccttctagaaaatgcagacagctatgccatgcagatgccgaccggagcgggaaaaaccacgctgtgcgaaacgctgctcttctcccatctatccgcgcgtcctcaagacgctgccgtcttgcttgtaccattccgctccttggcttcggaactgcgcggaaccctagttcgccgactcaacgcaatgggattaccagcgcgatgtgcgtatggaggcaccgtccctactggcgaagagatccatggcctggaccagattcgagccattgttgcaacacctgagtcgctttcgggaatcctcagtgccgatccgaccttttcgcagcgaatttcgctagtgatctgcgatgaaggccatttgctagacagcggtggccgaggcattggtttggaattactgttggcacgaatgagatcccgtccagaactaccacctcgggttgtcttcgtatcggccatcgtgcccaacatcgaagaaatcaacgcgtggctgggagggaatgacaacacggttatccgcagcacctatcgcccagcgaccgccgagttcgcggtgttgcgaccgacggggagcggtgcagggacgtctattcacttggatatgcatccacacgaagtcgtggaacggaaattcaccatagaaagactcttaagtagcgacaactttcgctatgtaaatccagccacagggcgctcaaaaacctattcattcacatcaatcaaagcccaagccgtggcaacagccagaaaagtcatgcctatgggcatgactgcgattttcgccgccaataaacgtggcgcccaaggagcggttggcctcgccgaagaactcgtgaaacaattgtcacttcctttgactcttcccactccgctcgcctttgctcgaaatgataacctgcaacgcagtatcacctatctggaaggcgagtacggaaacgcctggattggctcccaatccgtgcgtcatggtgcggtgctccatcatggcgacattcctcaggaaacgcgggaggtgctggaaagtctcattcgcgagggggatgtacgcttggtcatttgcaccagcacgttagccgagggggtcaatcttccgattcgcagtcttgtcctttactcggtacagcgtcgaaacatgagcggccccccggaggccatgctcgcacgtgacattaagaatctggttggtcgcgcaggacgggctggagccaacaccaagggacttgtgatttgcgctaaccccgatcaatggcatctggtgcagccagtggcgactcaaggtgctggcgagccggtacgtggatctctacgcagccttatccagcaattgagctccgctctcacacagcaaggattagcactcaacaatgaaatactagagggaagttccccaattcaccctgtagtcgacggtgtcgattccacccttatcgacttgatttccgaagaagtgggggaagaagtatttgtagcgcacgctcggcaactcgccgagcaaactttcgccgctcggcagcttccgcaaggacaggttgatctgttgcgcaacgttttcgaactgcgcgctcgtcggcttattgctttgcgccagacagggcagctctcctgggtccgtgatacaggggccaaagttcggcttctggactcagtggaacggatcctgctgccggcacgtgaacgctggcaggattcgattgaccctctggacaatgaattgcgcacagccattcttgagtgggcatggacgcaccgcgagcttcaaaacgatatcgtgcagaccttccgcccggcagggggcgacccggagttagttaaagatgtattctttgaactcgtccggcgctggatggcaggcgtatctttcgtagacttggctcagcagttgctgctgagcatggatgatctgctcgctatccatactcgggtgattacgttcaccctccaatcgctcgtagaccaaggccttagcctgcttacacgtcgtctacaggccgacggtattgagattgcagttggtgtcacgaacttcggtgaacagctccgctttggtgctcccaatctagcggcacgtgtgctagcgtcgtctggcgtgcgacatcgaaaggcctatgtggcgctgggcaacgcaataacccagcaaggccctgttctgaatgtcgctacgatcaagagccaagccctggaagggttgcgccagcatgcacccggttggcaagcacaactaggcgatctggtttatgccaacacttttaaggatctatcctaa

SEQ ID NO: 56438 - DNA, 783 bp, Pseudomonas aeruginosa C2773C
gtggggctgtataagaggtggtgcaagtccaccaaagaaaaggacaagcgcaagcattactggacctatgtcgagaaggatggtggccgcgacgagatccgcgatgacctcgccaagaccatccgctctcactacgatcgactcgaactcatcgccgaagacgtgaagcgactgggatacgaagtcgccagtgaaattctcagcgccaaaatgcctcaaacggccaagggccgctccggcgatctcggcgagattctcgcgaccgagctggtcgaggaagagatcggccttcgcgtccccgtgcgtcgacttcgctacaaggacgaccgcaacatggccatgcgcggcgatgacttcatcggcgccggatacgatggggccggcgagaagctctggcttctgaaaggcgaagccaagagcaacaaggtactcggcaaggccacggtcacgagcgcccgcaaggtgcttaaccgcgataacggccgttgcacgcccgactctctgctgttcgtcgccaaccgtctactggagagcaacgaccctgacgacaacgtactgggtcgcagcctgcgcgacgaggtcggcctgaagtcactgcgcgccgatcgcatcgaccacatgcttttcacagtttcgggcaacggcccccacgcctcgctgaaggaggacctcgacgccaccgggaccaatcgggaccattacgtcgtgaacatccacgtcgaagaccaccaagacttcatcgcggatatgtacctggaggcagaaaaccttggagacgattga

SEQ ID NO: 56439 - DNA, 3498 bp, Pseudomonas aeruginosa C2773C
ttggagacgattgacgaactgaccgcgttcctgacgaccgcgaccgtcgacggcatccttgggcgcctcctctatcgcggcgcggcctggtcgctcatgcgcgacgagggcgtgctgccaccgaacgcaccgccccttggcgcgacaattgaaaccgatctcgccgaacacggcttcgccctgctccgaggcgcgatggccctgcgcgctcaggctggcgcttcggcgctgaccagcaaggccttcgagcgcgccgccaacgcatttgaagccctagtgcgcaacggtgaccccgaggcgcctgatcgcggtttccgccgcaccatcgccgccgctgcctaccatctggccggcttctcggccgtcgcctattcgctcttcaacgagacggcggacgacctcaacacctcgccgggcgaaacggcgatccgccatctgattcttcgagatctcgaccagttgcgcggcttcgttcgcgaatggctcggcgacgcggctcatggcgacgagcagatcgccgaggcgctacgaggcgaagaccctgacgtcgacgaggttctgtcgaccatcctcaatacgacgatctgccgggccctggcgtttttcgacttcgcgcttgagacgggcgagcccgagccgattgaaagcgcacgggccttgctcgccacggcagtcagcctggcaggcaacgccgagaatgttccgctgtggtggatatcgaacctctgtcaccacctgatcgacgacctgtggcagcactctttgcaccagaacctgccgaccgagccgcccgagggtacggaggaaaaatatccagacctgcggcggctgttcatctcctcgctctatgcccgcaagacctcggaggtagagctatggccctcgcagcgcgaagccgcccagcgctccacggacgtcagggacgacttggttgtcgctctgcccaccagcgcgggcaagacgcgggtagccgagatcgcaacactgatgaccctgtcctcggtgcgccgggtgctgatcgtcacaccgctgcgcgccttgtccgctcagaccgagaggtccttcaggaagaccttcgcgcccctcggcttcagcgtctcctcgctctacggcgtcagcggtctttcggccggtgatgaagacgccctgcgcacccgcgagatcatcattgcgacgcccgaaaaactcgacttcgcgctgagaagcgacccgtcgctgatcgacgatgttggcctgatcgtcctcgacgagggccacatgatcggtccgagtgagcgcgaaatccgctacgagacgctcgtgcagcgcctgcttaggcgcgcggacgcggccgaacgccgaatcgtctgtctttccgctatcctgccgagcggcgacgaactcgacgatctcaccgcctggattcgttccgacgaaccgggtgagccggtgcgttccgactggcgccccacgcgccagcgcttcggcgcactcacctggcgcggcaaagacgcgctgctgcggcttgaccttgatgacgatggccccttcctcgacaagttcgtcgtggagaaaccagcgctcgggagggagacgaagccctatccacgcaagaactcgcacctcgttttgttcgcggcgtgggagttcgcgagccagggcaagcgcaccttgatcttctccacccaggcgaactgggtcgagagctacggcaaacaggtcgtggacctctgcaagcgtggctatctggacccgctgctagatgacgaggcgtcgatcgcccgcgccctcgaggtcggcaaggaatggctcggcgaggatcatcccgccgtggccagcttgaaggcgggcgtcgccatccaccatggccggctgccgagcccgttcctgcgtgagctggaaattctcctgtccgagggcgtgctgaaggtgatcgtcgcctcgcctacgctctcgcagggcctcaacctcaacgccgccgtcctgctggtgcccacgctctatcgggcgggggagaagatcaaaggcgaagagttcgccaacgttgccggccgcgcggggcgcgccttcgtcgacgtcgaagggttgatcgtccatatcatgttcgaccagatcgactggcgaaagcgcgaatggcgcaggctggtcgcctccgccaaggcccgaaccctgaagagcggcctcatccagatcgtcaccgagatccttgagcgcctttcgcgcgagggcgtcctggatcgcgccgacgcctgggaatatctcgccaacgcccgcgaggcctggagatcacccgacgaagaagtcgaggtggccgagcggctggcagccgccgtgaaatacgacgctgacgccgatgacgccgatgaagacgacgaggaggaacccatcgacgaggagccgctgtctcagctcgtcgaacgcctcgacgcgaccgtgttcggcctaatcgaagcgcttgacgccgatcgcgccgatctacccaagcttctggacgaggcgcttaagggatcgctctgggcccgccagattgcccgtgagggtgaggacgtcgcccctctgcacaagaaagtgttcgaagcgcgcgccgacctcatctggaagaccaccacggcgcaagcgcggcgcgggcatttcgccatgggcgtcgggctcgaagcgggtctcactatcgacgccatggccgacgagctggccgaactgctcgaccgggcagacgaggcggcgctgagcggcgacatcgacgaactcgtcggcgcgctctgcggtctcggcgaacgcctgctgttcatgcggcccttcatccccgacaaggcgaacgcgctgccggcgaactggaaggccatcctgcgcagctgggtgtccggcgaggaggtatccaagatcggaccgcagaacatgcgcgcggttgaagaggctttcacctatcgcttggtctgggcgctggaagccgtccgcacccgccgcatgtccctcggctggtcgccggagacggtggcgggcggcgcagcggcggcagtcgaaaccggcgtcccgcgattcatgatggcaatgctgatccgcgcgggcctgccgtcacggcgcgcggctatggtagccatcgaggacgccgagccggtcttcgtcaccccggcggaaatgcgggcctggctcgaatccgacgagatcacggcctacaccgacgccggcgactggccgacgcccgtcaccgccgcgctatgggcgcgcttccgaaccgaggctctcaacgacggtatccagaagtggtcggtcgaacgctacaagcgcctgctcgatatcgaggccgccccgcccgccggcctctatcggatcgtcaccgacgagggggacggacggacctggctggcaaccccggactaccagcgagtcgccgccttcaagaagccggcggtcgatcccaaacccagcctcttctcgggccggctaccgggcaaaactaggctcgtggaagccttgcgcgtcggccgcggaaaactgcgctggccgcccgcagatgcgtaa

SEQ ID NO: 56440 - DNA, 762 bp, Pseudomonas aeruginosa
atgattaatcttgcgaagtggtgcgttgaatctgaggagacatttgcgaagcacaagttacgccgaatggccgttaacgcagcgacgcagacgcaagcggtcaacgcaatcgcgaaggctatacctgactactacacagatccgcagcgcgttgcgtctttgctgaagaagctaggtaaaccggctgctgctgcccatgtcgagcagaagctcccgacgaagatttccattcgctctggcgatctcggcgaaattctttgcaacgcttacgttctcgaagctacgtctttcagcctcggcatcaagcgcctgcgctggaaggatcatcgcaacatgtcgatgcgcggcgaagacgtgcttgcctttgagctggggccgaagaacaaccgcttgaaaatcctcaaggctgaagtaaaaagccgggccgcaatgagcaccgccgttatcggtgacgccagagtagctctttccgcaaatagcgaacttccatcaccgcatgcactcgccttcgtcgctgatcgttcgcaccagaccggcgacacaatcctcggcgatgctctggacaaggctcaactagaggacggtatccgaccgtcgcaggtgtctcacatgctcttcacgttctcgggcaacaacccggtaaagctactgaaaacgaatctccaagcctattcgggttcagtgccgcagcactatgtgggccttcatgtccaagggcaccaggacttcatcaaggcggtctttgcggcagtgagcaaataa

SEQ ID NO: 56441 - DNA, 3498 bp, Pseudomonas aeruginosa
atggccgcgacacttgaagaactcaggacgagcatcgatgcagccacagtgccaggattccgtgcccgtctgcttgcacgggggctggcacgcgggatgatctggcgcgagggcgtgctgcctgaggaggcgccgaacttcggtctagagttgtcggatgacctgttgtcctacggctactcactgctgctgcatggcctccgctacaccgacttaggaggtgatgctgcgacagcgcgcaaggcattcgaggtgtctgctgaggcgcttgaagctgtggtcgaacggggagcggcctatgccgagcgtgactttcaccgccttgtcgccgcagccgcctaccacctaggtcgattctcggctcgggcctactcgctactattcaaaggactcgccaagacaaatctttcaacgatggagaaggcgctggccaagctcatgctccgtgaccttgatggcttggctgaggatattggtgcatggttcgccgctggtcgaggaagtgaagaggcacttgtcgccgcgctgagccagtcgaacgtgcaagacaacggcgtgggtgcaatagaggaagaagcacatgacgggagaatcgacgttgtgctcattgccctcgaagacaacttcatggctgcactggcgaccgcgacgctagcgctggagcgcggcgatgaagcgttgctgtcacgagcacgcgagcggctacagaacggcatcgaggttgccgctgacctcgaactcgtacctgcgtggtggattcatcgcctgactatccacctgctgggcgacctctgggacaccagcttccacaaggtattaccgctgggaggactccctggtagcgatgtcggcgattgggcacgattgcgcaagctctttatcgcttctctctatcgcagaagcaaagccgagatagaactctggccatcgcaacttcaagcagcgcggcgcgtgctcgatacaggcgtgaacctagtgctatcgctgccgaccagtgccggcaagacgcgcatcgctgaactgtgcatactggctagcctcgcacgcggcaagcgaatcgtcttcgtcactccacttcgggcgctatcggcacagaccgaggccgggctacggcgcacgttcgccccactgggcaagaccgtttcgagcttgtacggcagcatcggcgtcagtggagccgacgtcgatgcgttgcgctcaacggacatcgtagtcgccacacccgagaagcttgacttcgcactgcgcagtgattcaacactgctagacgacgtaggcctcgtggtgctcgacgaagggcacatgattggtctaggcgagcgggaagtacgctatgaggctcagattcagcgcttgctgcgacgttccgacgcggccgagcgacgcatcgtgtgcctatcggcaatactacctgatgggaaccagttggaagacttcgcggcttggttgacatgcgaccaagctgacggactaattaaggacgactggcgcccaacacggctacgcttcggcgaggttgaatggaagggccagcatgcccagctcagcgtgagtgtgggtgacgagaagcccttcatcccgaagttcatagtcgcgaagaagccaagtcgcggtcgtgccagaaagctgttcccatccgaccaagcggagttgtgcatcgcgacagcatggcgactagtggaggaaggccagactgtcctcgtgttctgtccgatgcgtcgatcagtgctgccgttggccgcgaccatcattgagatgcacaaacgtggacacattgattcggtgcttgagcaacctgtgtctgcgcttactacggcactggcggtcggcgcggagtggttcggccacgatcatgaccttcttgcatgcctgaggcttggcgttgcggtacatcatggcgcgctacccacaccgtaccgcaaagagatcgagcgattgctacgtgagggtgtactacgggtaacagtatcgtcaccgacgctggcccaagggctcaacctcgctgcgacttcactcatcttccgcggagtgaggcgaggccgggatctcctcgacatttcagagttccgtaacgtagtcggcagagctggccgagcctatattgacgtcgaaggacttgtgctatatccgatgttcgatagacacaggcaacggcgaaccgattggcaggatttgatcgcgaatcagggcggtcgagaaatggaaagcggcttactccggctgatagtggctttactttcccgcatggcgaagcaaataggcacgagcgatatgggaaaacttctcgaatacgtcgccggacaggccgtgtgggaattctcagcaattgcgtcggaaacggctgaagaggcgactgaagaacgacaacgatgggatcggcatttggcgagcctggataccgcgatctttagcttgcttggcgaatccgttgtgtcctatatggaggtgggagccaaacttgatgagatgctagtagcctcacttttccagcggcgccttgtccgctacagtgaagacgttcgcaagctgttacctgcgggtcttcattctcgggccaagtacatctggaacaacaccactactacgcagcgacgtggttacttcctggctggtgttggattcaccgcaggccaagctcttgatgagcatgcatcggagttggagcacctgcttctcgcggccaacgtgaacgtcgatctcaacgacgaagacgaggcaataacggcgatcacggctttcgccaaaatcgtattcgacatcgcacctttcaaaccagaaagattggtcgctaactggcagtccctgctcaggcgatggctccttggacagtcagtggttgatgcctcgtccaaggacaacgacgaggacatccagttcatcgaacaggcgttcgtctacaacctaccctgggcaatggaagcggtccgagttcgggccgaggcacatgaggatatatcctctgacgaggtgaaattatcggagtacccgcgagcgaacgcagttgccgcagttgagacgggtactctatcagttgcggctgctacgctgatcaaagctggctttggctcgcgtcttggtgcgattcaagctatcacgtccaccggggcgagttttgattcaatgcgcggtctgatggcttggcttgcgtcggaggatgtagtaaatctttctgctgctttggattggccgacaccggaatcgcacgcactatgggctgcgttcaacggccccgatggggtcgagaccacgcaaacctgggatgcgactgagtacaggagcaacattaagtggcacggcgttccaatgccgcctggtacccccttgcgtattggcggtgggcctgggcgggagtgcagcgtattcacagccgatttccaagagattggtatgctcagatggacacccagtagcaagggcttgattgttgcaacagcgactgcaaacgctgcgaagttcgatcttgaatacctcggccctggcaaagtgacaagaaaatga

SEQ ID NO: 56442 - DNA, 780 bp, Pseudomonas aeruginosa
atggtgcagttcaacgattggtgcgactcagcggacacgcccctgggaaatcatcacgttcgggtcatgacgggccggccggcggacgctgcgaccggcatccaggtgacggccacggccgtccccgcccactacgccgccgaggaacgcatcgccgcagcgcttgcgaggctgggcaaggtcgctgccgcgcagatgatcaccaatcttctcccgcaaacgccgcagatccgatcgggcgatctcggcgagatctacgctacggaatggatcgacgcgcacagcggctatcgcgcccccatcaaacggctgcgctggaaggatcaccgcaacatggcgatgcgcggcgacgacgtcatcggcatgcttctcgacccggcaacacagcgcctccgcttcctgaagacagaggccaagagccgcatcgacctgcgcgcccaaacgctggaggaggcgcggaccggcctggataaggatggcggccttccctcgtcgcatgcattgtcctttatctcagccagactgatggagctgggcaccgacgcgccgctcgtcgacgccatcgacgaggcgctctatcggcacggtattccgcccgagagcgtgaaacatctcctcttcaccttctccgggaactccccgcaagcgctgctgacacaggcgctgcaggcctatcctggttcattcgaacaattgggtatcggtctgcacgtcgacggccatgccgcctttgttggggccgtctacgatcgggtcatagccgatgccaaccacccctga

SEQ ID NO: 56443 - DNA, 3522 bp, Pseudomonas aeruginosa
atgccaaccacccctgacgcgatcacagccgccatcacggacgcggcgacggcaggctttcgcggcaggctcatcgcgcgaggccaggcgcgcgccatgatctggcgtgacggtgttctgccccctggcgcgcccgccttctcgccgcagctcagcttcgatctccacagttacgcctatggcttgcttgggctggggctgcgcctcctcgaactcgatggcgacccgaaccaggcacggatcgcattcgaacaggcggcgaccgccctcgaagcggttatggccaagggcaaccgcgacgaagcagaccgcgatttccatttcgtcatggcggcggccagctatcacctcgcacacctgtctgcccgagcctattccctccttgcgatcgtggccgccgaggagaatttctccccgatcgaacaggcgctcgcgctgttgatgcgccgagacgtcaatgagctgcgcgcacgcgtgtacgccttccgcctggatggtcgaggatcggacgcgaccattgcagcgctattccaacaacgacttgtggagcctgtcgccgccgacgcgccggagcgcgatggtcaggacttcctcttcgagggcctcgatctcgccctgaccgatgccttcttcggcgcattcgcgacattcctgctcgcgctggatcgcggcgagagagccctagtcgaccgggcgatcgcgcagcttcgggaaaacctcgacatctgcgcggaattgaaccttctgccgcaatggtgggtgcatcgggtcgccatccatctgctctccgacctctggtcgaacactttccacgagaaggtcccgctactccccgccggtggcgccgcggcgtcatggcccggccttcgcgagctcttcatcgccctgctcgctcgccgcccgagagccgaggtcgacctgtggccttcgcagaccgaggcggcgtcgcgcgccgtcgatcagaccgacaatctcgttgtctcgctgccgaccagcgccggcaagacccggattgccgaattgtcaattctgcggtgcttggctggtggccagcgagttatgttcgtgacaccgcttcgcgctctgtcggcgcagacggaaaccacgctccagcgcaccttcggtccactcggcaagaccatctccgcgctctacggcagcattggcgtatccggcttcgatgaggacgctatccgcgagcgtgacatcgtcgttgcgacccctgagaaacttgacttcgcgttgaggaacgatccgtcgctcctcgacgatgtcggcttgctcgtgttcgacgaaggccacatgatcggacctggggaacgcgaggttcgatacgaggttcagattcagcgcctcctgcgccgccaagacgccggtcaacgccggatcgtttgcctgtcggcgatccttcctgacggagatcaactcgaggacttctcggcatggctgcgtcgcgaccagcccggaggcccgatcaagaacgactggcgacctacgcgcctgcggtttggcgaggtaacctggaactcgccaacggcgcgtctcaatcttcgcgtcggcgatgaaagacccttcgtgcctcgcttccttaccggcgcggcgccgccgctgttcgtaccgccgaagaaattacgcactcggctctttccggacagccaacaggaattgagccttgcaacggcgtggcggctcgtcagcgatggccagacggtgctgatctactgccccgagcgccgaagcgtcgagccgttcgccaaggttgtcgtcgacttgcactcgcgcggcgcgctcgcgtccctgctaacggttgaccccgccacactccaaaccgctatcgcgctcggcgaagaatggcttgggccggacagcgacatcctcaaatgtctgcggcttggcgtggcgcttcaccatggggccttgccgaccgcctatcgcaaagaagtcgagcgactgctgcgcgacagcgtgctcaaggtaacgatctcatcgccgacgctggctcagggcctcaacctgtcggccacggcggtcgttatgcattcgctctatcgccacggcgagaagatcaaggtctctgaattcaagaatgtcatcgggcgcgccggccgcgcctatgtcgatgttgaagggctagttctctttcccattttccaggattcgaggaacaagaagcatgacgaatgggtcgcgttgatcgaggatcttggcgcccgcgagatggagagcgggctcattcagctcatcctttcgcttctcatgcgcatgcatgcacggcttggcggcaatctcgatcagctaatggactacgtcgtcaacaacgccgcggcatggaccttccccgaggtcgccggcgagaaggccgacaagcgcgagcgggcgctgaaagagtgggagcgtcatatggcgacgctcgacaccgccattctcagcctcataggcgaggccgacgtgcccgatgaccagatcgaggccgcgctcgacaacatccttcaatcttcgctctggcagcgtcgcctgcttcacgtcgacgacgcatcacgcgccgcctatcgcgccacgctgctcacgcggagccggtatatctgggcgaattcgactgccgctacacgacgcggctactttctggccgggctcggcctcgaagctggacatgcgctggacgcaattgcggctgaggcaaacgaccttctcatacaggccaacgcagccctcgcagcatcggaccatgaggcggcaatcgctgcgatcaccggcatcgccgaacgcgtgttcgccttctacccgtttgagccggatccattcccggcgaattggcgcgacatcctcagatgctggctgctcgggcagccgttggcagcgatcgtcgccggacaggaagctgaggcattgccgtttattgagggtggcctggtttatcgcctgccttgggccatggaggccttacgcgtccgtgccgccgccaatggtgatgtcgtcggcatgttcgcactggcgttggacgactatgagctcggcctggctgtgccggctgtcgaaacggggacgatgaaccgctccgcctcgattctgatccaggcgggtttcaattcccgactggcggccataaaagccgtcaccgacacggccgccaccttcacgactggcgcggaattgcgcgcgtggctgcgctcacccggcctcgcggtctggtcggcgcaacccaactggccaacggccgagacgcgggccatatggctcgaattcatccaggagttcgccccgtcagacaatcggacctgggcgcgatgggattatcttggaaacgtccagtggttcgccgcacccgcgcctcccggaacaccagtcagcctctttcataggaacggacagccgctggtgctggcgcccgacgggcacgcgatcggtctgctacagcacccgctcaacccgaatcggcgcggtcttgtgcgagcgactgtcgctctgaatagcggccagctcgatctgagttatctcggccccgatgacttgtgggagggttag

SEQ ID NO: 56444 - DNA, 780 bp, Pseudomonas aeruginosa
atggtgcagttcaacgattggtgcgactccgcggacacgcccctgggaaatcatcacgttcgggtcatgacgggccggccggcggacgctgcgaccggcatccaggtgacggccacggccgtccccgcccactacgccgccgaggaacgcatcgccgcagcgcttgcgaggctgggcaaggtcgctgccgcgcagatgatcaccaatcttctcccgcaaacgccgcagatccgatcgggcgatctcggcgagatctacgctacggaatggatcgacgcgcacagcggctatcgcgcccccatcaaacggctgcgctggaaggatcaccgcaacatggcgatgcgcggcgacgacgtcatcggcatgcttctcgacccggcaacacagcgcctccgcttcctgaagacagaagccaagagccgcatcgacctgcgcgcccaaacgctggaggaggcgcggaccggcctggataaggatggcggccttccctcgtcgcatgcattgtcctttatctcagccaggctgatggagctgggcaccgacgcgccgctcgtcgacgccatcgacgaggcgctctatcggcacggtatcccgcccgagagcgtgaaacatctcctcttcaccttctccgggaactccccgcaagcgctgctgacacaggcgctgcaggcctatcctggttcattcgaacaattgggtgtcggcctgcacgtcgacggccatgccgcctttgttggggccgtctacgatcgggtcatagccgatgccaaccacccctga

SEQ ID NO: 56445 - DNA, 3522 bp, Pseudomonas aeruginosa
atgccaaccacccctgacgcgatcacagccgccatcacggacgcggcgacggcaggctttcgcggcaggctcatcgcgcgaggccaggcgcgcgccatgatctggcgtgacggtgttctgccccctggcgcgcccgccttctcgccgcagctcagcttcgatctccacagttacgcctatggcttgcttgggctggggctgcgcctcctcgaactcgatggcgacccgaaccaggcacggatcgcattcgaacaggcggcgaccgccctcgaagcggttatggccaagggcaaccgcgacgaagcagaccgcgatttccatttcgtcatggcggcggccagctatcacctcgcacacctgtctgcccgagcctattccctccttgcgatcgtggccgccgaggagaatttctccccgatcgaacaggcgctcgcgctgttgatgcgccgagacgtcaacgagctgcgcgcacgcgtgtacgccttccgcctggatggtcgaggatcggacgcgaccattgcggcgctattccaacaacgacttgtggagcctgtcgccgccgacgcgccggagcgcgatggtcaggacttcctcttcgagggcctcgatctcgccctgaccgatgccttcttcggcgcattcgcgacattcctgctcgcgctggatcgcggcgagagagccctagtcgaccgggcgatcgcgcagcttcgggaaaacctcgacatctgcgcggaattgaaccttctgccgcaatggtgggtgcatcgggtcgccatccatctgctctccgacctctggtcgaacaccttccacgagaaggtcccgctactccccgccggtggcgccgcggcgtcatggcccggccttcgcgagctcttcatcgccctgctcgctcgccgcccgagggccgaggtcgacctgtggccttcgcagaccgaggcggcgtcgcgcgccgtcgatcagaccgacaatctcgtcgtctcgctgccgaccagcgccggcaagacccggattgccgaattgtcaattctgcggtgcttggctggtggccagcgagttatgttcgtgacaccgcttcgcgccctgtcggcgcagacggaaaccacgctccagcgcaccttcggtccactcggcaagaccatctccgcgctctacggcagcattggcgtatccggcttcgatgaggacgctatccgcgagcgtgacatcgtcgtcgcgacccctgagaaacttgacttcgcgttgaggaacgatccgtcgctcctcgacgacgtcggcttgctcgtgttcgacgaaggccacatgatcggacctggggaacgcgaggttcggtacgaggttcagattcagcgcctcctgcgccgccaagacgccggtcaccgccggatcgtttgcctgtcggcgatccttcctgacggagatcaactcgaggacttctcggcatggctgcgtcgagaccagcccggaggcccgatcaagaacgactggcgaccgacgcgcctgcggtttggcgaggtaacctggaactcgccaacggcgcgtctcaatcttcgcgtcggcgatgaaagacccttcgtgcctcgcttccttaccggcgcggcgccgccgctgttcgtaccgccgaagaaattacgcactcggctctttccggacagccaacaggaattgagccttgcaacggcgtggcggctcgtcagcgatggccagacggtgctgatctactgccccgagcgccgaagcgtcgagccgttcgccaaggttgtcgtcgacttgcactcgcgcggcgcgctcgcgtccctgctaacggttgaccccgccacactccaaaccgctatcgcgctcggcgaagaatggcttggcccggacagcgacatcctcaaatgtctgcggcttggcgtggcgcttcaccatggggccttgccgaccgcctatcgcaaagaagtcgagcgactgctgcgcgacagcgtgctcaaggtaacgatctcatcgccgacgctggctcagggcctcaacctgtcggccacggcggtcgttatgcattcgctctatcgccacggcgagaagatcaaggtctctgaattcaagaatgtcatcgggcgcgccggccgcgcctatgtcgatgttgaagggctagtcctctttcccattttccaggattcgcggaacaagaagcataatgaatgggtcgagttgatcgaggatcttggcgcccgcgagatggagagcgggctcattcagctcatcctctcgcttctcatgcgcatgcatgcacggcttggcggcaatctcgatcagctaatggactacgtcgtcaacaacgccgcggcatggaccttccccgaggtcgccggcgagaaggccgacaagcgcgagcgggcgctgaaggagtgggagcgtcatatggcgacgctcgacaccgccattctcagcctcataggcgaggccgacgtgcaggatgatcagatcgaggccgcgctcgacaacatccttcaatcttcgctctggcagcgtcgcctgcttcacgtcgacgacgcatcacgcgccgcctatcgcgccacgctgctcacgcggagccggtatatctgggcgaattcgactgccgctacacgacgcggctactttctggccgggctcggcctcgaagctggacatgcgctggacgcaattgcggctgcggcaaacgaccttctcgtacaggccaacgcagccctcgcagcatcggaccatgaggcggcaatcgctgcgatcaccggcatcgccgaacgcgtgttcgccttctacccgtttgagccggatccattcccggcgaattggcgcgacatcctcagatgctggctgctcgggcagccgttggcagcgatcgtcgccggacaggaagccgaggcattgcagtttattgagggtggcctggtttatcgcctgccttgggccatggaggccttacgcgtccgtgccgccgccaatggcgatgtcgtcggcacgctcgcactggcgttggacgactatgagctcggcctggctgtgccggctgtcgaaacggggacgatgaaccgctccgcctcgattctgatccaggcgggtttcaattcccggctggcggccataaaagccgtcaccgacacggccgccaccttcacgactggcgcggaattgcgcgcgtggttgcgctcacccggcctcgcggtctggtcggcgcaacccaactggccaacggccgagacgcgggccatatggctcgaattcatccaggagttcgccccgtcagacaatcggacctgggcgcgacgggattatcttggaaacgtccagtggttcgccgcacccgcgcctcccggaacaccagtcagcctctttcataggaacggacagccgctggtgctggcgcccgacgggcacgcgatcggtctgctacagcacccgctcaacccgaatcggcgcggtcttgtgcgagcgactgtcgctctgaataacggccagctcgatctgagttatctcggccccgatgacctgtgggagggttag

SEQ ID NO: 56446 - DNA, 780 bp, Pseudomonas aeruginosa
atggtgcagttcaacgattggtgcgactccgcggacacgcccctgggaaatcatcacgttcgggtcatgacgggccggccggcggacgctgcgatcggcatccaggtgacggccacggccgtccccgcccactacgccgccgaggaacgcatcgccgcagcgcttgcgaggctgggcaaggtcgctgccgcgcagatgatcaccaatcttctcccgcaaacgccgcagatccgatcaggcgatctcggcgagatctacgctacggaatggatcgacgcgcacagcggctatcgcgcccccatcaaacggctgcgctggaaggatcaccgcaacatggcgatgcgcggcgacgacgtcatcggcatgcttctcgacccggcaacacagcgcctccgcttcctgaagacagaagccaagagccgcatcgccctgcgcgcccaaacgctggaggaggcgcggaccggcctggataaggatggcggccttccctcgtcgcatgcattgtcctttatctcagccagactgatggagctgggcaccgacgcgccgctcgtcgacgccatcgacgaggcgctctatcggcacggtattccgcccgagagcgtgaaacatctcctcttcaccttctccgggaactccccgcaagcgctgctgacacaggcgctgcaggcctatcctggttcattcgaacaattgggtgtcggcctgcacgtcgacggccatgccgcctttgttggggccgtctacgatcgggtcatagccgatgccaaccacccctga

SEQ ID NO: 56447 - DNA, 3522 bp, Pseudomonas aeruginosa
atgccaaccacccctgacgcgatcacagccgccatcacggacgcggcgacggcaggctttcgcggcaggctcatcgcgcgaggccaggcgcgcgccatgatctggcgtgacggtgttctgccccctggcgcgcccgccttctcgccgcagctcagcttcgatctccacagttacgcctatggcttgcttgggctggggctgcgcctcctcgaactcgatggcgacccgaaccaggcacggatcgcattcgaacaggcggcgaccgccctcgaagcggttatggccaagggcaaccgcgacgaagcagaccgcgatttccatttcgtcatggcggcggccagctatcacctcgcacacctgtctgcccgagcctattccctccttgcgatcgtggccgccgaggagaatttctccccgatcgaacaggcgctcgcgctgttgatgcgccgagacgtcaacgagctgcgcgcacgcgtgtgcgccttccgcctggatggtcgaggatcggacgcgaccattgcggcgctattccaacaacgacttgtggagcctgtcgccgccgacgcgccggagcgcgatggtcaggacttcctcttcgagggcctcgatctcgccctgaccgatgccttcttcggcgcattcgcgacattcctgctcgcgctggatcgcggcgagagagccctagtcgaccgggcgatcgcgcagcttcgggaaaacctcgacatctgcgcggaattgaaccttctgccgcaatggtgggtgcatcgggtcgccatccatctgctttccgacctctggtcgaacaccttccacgagaaggtcccgctactccccgccggtggcgccgcggcgtcatggcccggccttcgcgagctcttcatcgccctgctcgctcgccgcccgagggccgaggtcgacctgtggccttcgcagaccgaggcggcgtcgcgcgccgtcgatcagaccgacaatctcgtcgtctcgctgccgaccagcgccggcaagacccggattgccgaattgtcaattctgcggtgcttggctggtggccagcgagttatgttcgtgacaccgcttcgcgccctgtcggcgcagacggaaaccacgctccagcgcaccttcggtccactcggcaagaccatctccgcgctctacggcagcattggcgtatccggcttcgatgaggacgctatccgcgagcgtgacatcgtcgtcgcgacccctgagaaacttgacttcgcgttgaggaacgatccgtcgctcctcgacgacgtcggcttgctcgtgttcgacgaaggccacatgatcggacctggggaacgcgaggttcggtacgaggttcagattcagcgcctcctgcgccgccaagacgctggtcaccgccggatcgtttgcctgtcggcgatccttcctgacggagatcaactcgaggacttctcggcatggctgcgtcgagaccagcccggaggcccgatcaagaacgactggcgaccgacgcgcctgcggtttggcgaggtaacctggaactcgccaacggcgcgtctcaatcttcgcgtcggcgatgaaagacccttcgtgcctcgcttccttaccggcgcggcgccgccgctgttcgtaccgccgaagaaattacgcactcggctctttccggacagccaacaggaattgagccttgcaacggcgtggcggctcgtcagcgatggccagacggtgctgatctactgccccgagcgccgaagcgtcgagccgttcgccaaggttgtcgtcgacttgcactcgcgcggcgcgctcgcgtccctgctaacggttgaccccgccacactccaaaccgctatcgcgctcggcgaagaatggcttggcccggacagcgacatcctcaaatgtctgcggcttggcgtggcgcttcaccatggggccttgccgaccgcctatcgcaaagaagtcgagcgactgctgcgcgacagcgtgctcaaggtaacgatctcatcgccgacgctggctcagggcctcaacctgtcggccacggcggtcgttatgcattcgctctatcgccacggcgagaagatcaaggtctctgaattcaagaatgtcatcgggcgcgccggccgcgcctatgtcgatgttgaagggctagtcctctttcccattttccaggattcgcggaacaagaagcataatgaatgggtcgagttgatcgaggatcttggcgcccgcgagatggagagcgggctcattcagctcatcctctcgcttctcatgcgcatgcatgcacggcttggcggcaatctcgatcagctaatggactacgtcgtcaacaacgccgcggcatggaccttccccgaggtcgccggcgagaaggccgacaagcgcgagcgggcgctgaaggagtgggagcgtcatatggcgacgctcgacaccgccattctcagcctcataggcgaggccgacgtgcccgatgatcagatcgaggccgcgctcgacaacatccttcaatcttcgctctggcagcgtcgcctgcttcacgtcgacgacgcatcacgcgccgcctatcgcgccacgctgctcacgcggagccggtatatctgggcgaattcgactgccgctacacgacgcggctactttctggccgggctcggcctcgaagctggacatgcgctggacgcaattgcgactgcggcaaacgaccttctcgtacaggccaacgcagccctcgcagcatcggaccatgaggcggcaatcgctgcgatcaccggcatcgccgaacgcgtgttcgccttctacccgtttgagccggatccattcccggcgaattggcgcgacatcctcagatgctggctgctcgggcagccgttggcagcgatcgtcgccggacaggaagccgaggcattgcagtttattgagggtggcctggtttatcgcctgccttgggccatggaggccttacgcgtccgtgccgccgccaatggcgatgtcgtcggcatgctcgcactggcgttggacgactatgagctcggcctggctgtgccggctgtcgaaacggggacgatgaaccgctccgcctcgattctgatccaggcgggtttcaattcccggctggcggccataaaagccgtcaccgacacggccgccaccttcacgactggcgcggaattgcgcgcgtggctgcgctcacccggcctcgcggtctggtcggcgcaacccaactggccaacggccgagacgcgggccatatggctcgaattcatccaggagttcgccccgtcagacaatcggacctgggcgcgacgggattatcttggaaacgtccagtggttcgccgcacccgcgcctcccggaacaccagtcagcctctttcataggaacggacagccgctggtgctggcgcccgacgggcacgcgatcggtctgctacagcacccgctcaacccgaatcggcgcggtcttgtgcgagcgactgtcgcgctgaataacggccagctcgatctgagttatctcggccccgatgacctgtgggagggttag

SEQ ID NO: 56448 - DNA, 780 bp, Pseudomonas aeruginosa; identical to SEQ ID NO: 56444

SEQ ID NO: 56449 - DNA, 3522 bp, Pseudomonas aeruginosa; identical to SEQ ID NO: 56445

SEQ ID NO: 56450 - DNA, 783 bp, Pseudomonas aeruginosa
gtggggctgtataagaggtggtgcaagtccaccaaagaaaaggacaagcgcaagcattactggacctatgtcgagaaggatggtggccgcgacgagatccgcgatgacctcgccaagaccatccgctctcactacgatcgactcgaactcatcgccgaagacgtgaagcgactgggatacgaagtcgccagtgaaattctcagcgccaaaatgccccaaacggccaagggccgctccggcgatctcggcgagattctcgcgaccgagctggtcgaggaagagatcggccttcgcgtccccgtgcgtcgacttcgctacaaggacgaccgcaacatggccatgcgcggcgatgacttcatcggcgccggatacgatggggccggcgagaagctctggcttctgaaaggcgaagccaagagcaacaaggtactcggcaaggccacggtcacgagcgcccgcaaggtgcttaaccgcgacaacggtcgttgcacgcccgactctctgctgttcgtcgccaaccgtctactggagagcaacgaccctgacgacaacgtactgggtcgcagcctgcgcgacgaggtcggcctaaagtcactgcgcgccgatcgcatcgaccacatgcttttcacagtttcgggcaacggcccccacgcctcgctgaaggaggacctcgacgccaccgggaccaatcgggaccattacgtcgtgaacatccacgtcgaagaccaccaagacttcatcgcggatatgtacctggaggcagaaaaccttggagacgattga

SEQ ID NO: 56451 - DNA, 3498 bp, Pseudomonas aeruginosa
ttggagacgattgacgaactgaccgcgttcctgacgaccgcgaccgtcgacggcatccttgggcgcctcctctatcgcggcgcggcctggtcgctcatgcgcgacgagggcgtgctgccaccgaacgcaccgccccttggcgcgacaattgaaaccgatctcgccgaacacggcttcgccctgctccgaggcgcgatggccctgcgcgttcaggctggcgcttcggagctgaccagcaaggccttcgagcgcgccgccaacgcatttgaagccctagtgcgcaacggtgaccccgaggcgcctgatcgcggtttccgccgcaccatcgccgccgctgcctaccatctggccggcttctcggccgtcgcctattcgctcttcaacgagacagcgggcgacctcaacacctcgccgggcgaaacggcgatccgccatctgattcttcgagatctcgaccagttgcgcggcttcgttcgcgaatggctcggcgacgcggctcatggcgacgagcagatcgccgaggcgctacgaggcgaagaccctgacgtcgacgaggttctgtcgaccatcctcaatacgacgatctgccgggccctggcgtttttcgacttcgcgcttgagacgggcgagcccgagccgattgaaagcgcacgggccttgctcgccacggcagtcagcctggcaggcaacgccgagaatgttccgctgtggtggatatcgaacctctgtcaccacctgatcgacgacctgtggcagcactctttgcaccagaacctaccgaccgagccgcccgagggtacggaggaaaaatatccagacctgcggcggctgttcatctcctcgctctatgcccgcaagacctcggaggtagagctatggccctcgcagcgcgaagccgcccagcgctccacggacgtcagggacgacttggttgtcgctctgcccaccagcgcgggcaagacgcgggtagccgagatcgcgacactgatgaccctgtcctcggtgcgccgggtgctgatcgtcacaccgctgcgcgccttgtccgctcaaaccgagaggtccttcaggaagaccttcgcgcccctcggcttcagcgtctcctcgctctacggcgccagcggtctttcggccggtgatgaagacgccctgcgcacccgcgagatcatcattgcgacgcccgaaaaactcgacttcgcgctgagaagcgacccgtcgctgatcgacgatgttggcctgatcgtcctcgacgagggccacatgatcggtccgagtgagcgcgaaatccgctacgagacgctcgtgcagcgcctgcttaggcgcgcggacgcggccgaacgccgaatcgtctgtctttccgccatcctgccgagcggcgacgaactcgacgatctcaccgcctggattcgttccgacgaaccgggtgagccggtgcgttccgactggcgccccacgcgccagcgcttcggcgcactcacctggcgcggtaaagacgcgctgctgcggcttgaccttgatgacgatggccccttcctcgacaagttcgtcgtggagaaaccagcgctcgggagggagacgaagccctatccacgcaagaactcgcacctcgttttgttcgcggcgtgggagttcgcgagccagggcaagcgcaccttgatcttctccacccaggcgaactgggtcgagagctacggcaaacaggtcgtggacctctgcaagcgtggctatctggacccgctgctagatgacgaggcgtcgatcgcccgcgccctcgaggtcggcaaggaatggctcggcgaggatcatcccgccgtggccagcttgaaggcgggcgtcgccatccaccatggccggctgccgagcccgttcctgcgtgagctggaaattctcctgtccgagggcgtgctgaaggtgatcgtcgcctcgcctacgctctcgcagggcctcaacctcaacgccgccgtcctgctggtgcccgcgctctatcgggcgggggagaagatcaaaggcgaagagttcgccaacgttgccggccgcgcggggcgcgccttcgtcgacgtcgaagggctgatcgtccatatcatgttcgaccagatcgactggcgaaagcgcgaatggcgcaggctggtcgcctccgccaaggcccgaaccctgaagagcggcctcatccagatcgtcaccgagatccttgagcgcctggcgcgcgagggcgtcctggatcgcgccgacgcctgggaatatctcgccaacgcccgcgaggcctggagatcacccgacgaagaagtccaggtggccgagcggctggcagccgccgtggaatacgacgctgacgccgatgacgccgatgaagacgacgaggaggaacccatcgacgaggagccgctgtctcagctcgtcgaacgcctcgacgcgaccgtgttcggcctaatcgaagcgcttgacgccgatcgcgccgatctacccaagcttctggacgaggcgcttaagggctcgctctgggcccgccagattgctcgtgagggtgaggacgtcgcccctctgcacaagaaagtgttcgaagcgcgcgccgacctcatctggaagaccaccacggcgcaagcgcggcgcgggcatttcgccatgggcgtcgggctcgaagcgggtctcactatcgacgccatggccgacgagctggccgaactgctcgatcgggcagacgaggcggcgctgagcggcgacatcgacgaactcgtcgacgcgctctgcggtctcggcgaacgcctgctgttcatgcggcccttcatccccgacaaggcgaacgcgctgccggcgaactggaaggccatcctgcgcagctgggtgtccggcgaggaggtatccaagatcggaccgcagaacatgcgcgcggttgaagaggctttcacctatcgcttggtctgggcgttggaagccgtccgcacccgccgcatgtccctcggctggtcgccggagacggtggcgggcggcgcagcggcggcagtcgaaaccggcgtcccgcgattcatgatggcaatgctgatccgcgcgggcctgccgtcacggcgcgcggctatggtagccattgaggacgccgagccggtcttcgtcaccccggcggaaatgcgggcctggctcgaatccgacgagatcacggcctacaccgacgccggcgactggccgacgcccgacaccgccgcgctatgggcgcgcttccgaaccgaggctctcaacgacggtatccagaagtggtcggtcgaacgctacaagcgcctgctcgacatcgaggccgccccgcccgccggcctctatcggatcgtcaccgacgagggggacggacggacctggctggcaaccccggactaccagcgagtcgccgccttcaagaagccggcggtcgatcccaaacccagcctcttctcgggccggctgccgggaaaaactaggctcgtggaagccttgcgcgtcggccgcggaaaactgcgctggccgcccgcagatgcgtaa

SEQ ID NO: 56452 - DNA, 783 bp, Pseudomonas aeruginosa; identical to SEQ ID NO: 56438

SEQ ID NO: 56453 - DNA, 3498 bp, Pseudomonas aeruginosa
ttggagacgattgacgaactgaccgcgttcctgacgaccgcgaccgtcgacggcatccttgggcgcctcctctatcgcggcgcggcctggtcgctcatgcgcgacgagggcgtgctgccaccgaacgcaccgccccttggcgcgacaattgaaaccgatctcgccgaacacggcttcgccctgctccgaggcgcgatggccctgcgcgctcaggctggcgcttcggcgctgaccagcaaggccttcgagcgcgccgccaacgcatttgaagccctagtgcgcaacggtgaccccgaggcgcctgatcgcggtttccgccgcaccatcgccgccgctgcctaccatctggccggcttctcggccgtcgcctattcgctcttcaacgagacggcggacgacctcaacacctcgccgggcgaaacggcgatccgccatctgattcttcgagatctcgaccagttgcgcggcttcgttcgcgaatggctcggcgacgcggctcatggcgacgagcagatcgccgaggcgctacgaggcgaagaccctgacgtcgacgaggttctgtcgaccatcctcaatacgacgatctgccgggccctggcgtttttcgacttcgcgcttgagacgggcgagcccgagccgattgaaagcgcacgggccttgctcgccacggcagtcagcctggcaggcaacgccgagaatgttccgctgtggtggatatcgaacctctgtcaccacctgatcgacgacctgtggcagcactctttgcaccagaacctgccgaccgagccgcccgagggtacggaggaaaaatatccagacctgcggcggctgttcatctcctcgctctatgcccgcaagacctcggaggtagagctatggccctcgcagcgcgaagccgcccagcgctccacggacgtcagggacgacttggttgtcgctctgcccaccagcgcgggcaagacgcgggtagccgagatcgcaacactgatgaccctgtcctcggtgcgccgggtgctgatcgtcacaccgctgcgcgccttgtccgctcagaccgagagatccttcaggaagaccttcgcgcccctcggcttcagcgtctcctcgctctacggcgtcagcggtctttcggccggtgatgaagacgccctgcgcacccgcgagatcatcattgcgacgcccgaaaaactcgacttcgcgctgagaagcgacccgtcgctgatcgacgatgttggcctgatcgtcctcgacgagggccacatgatcggtccgagtgagcgcgaaatccgctacgagacgctcgtgcagcgcctgcttaggcgcgcggacgcggccgaacgccgaatcgtctgtctttccgctatcctgccgagcggcgacgaactcgacgatctcaccgcctggattcgttccgacgaaccgggtgagccggtgcgttccgactggcgccccacgcgccagcgcttcggcgcactcacctggcgcggcaaagacgcgctgctgcggcttgaccttgatgacgatggccccttcctcgacaagttcgtcgtggagaaaccagcgctcgggagggagacgaagccctatccacgcaagaactcgcacctcgttttgttcgcggcgtgggagttcgcgagccagggcaagcgcaccttgatcttctccacccaggcgaactgggtcgagagctacggcaaacaggtcgtggacctctgcaagcgtggctatctggacccgctgctagatgacgaggcgtcgatcgcccgcgccctcgaggtcggcaaggaatggctcggcgaggatcatcccgccgtggccagcttgaaggcgggcgtcgccatccaccatggccggctgccgagcccgttcctgcgtgagctggaaattctcctgtccgagggcgtgctgaaggtgatcgtcgcctcgcctacgctctcgcagggcctcaacctcaacgccgccgtcctgctggtgcccacgctctatcgggcgggggagaagatcaaaggcgaagagttcgccaacgttgccggccgcgcggggcgcgccttcgtcgacgtcgaagggttgatcgtccatatcatgttcgaccagatcgactggcgaaagcgcgaatggcgcaggctggtcgcctccgccaaggcccgaaccctgaagagcggcctcatccagatcgtcaccgagatccttgagcgcctttcgcgcgagggcgtcctggatcgcgccgacgcctgggaatatctcgccaacgcccgcgaggcctggagatcacccgacgaagaagtcgaggtggccgagcggctggcagccgccgtgaaatacgacgctgacgccgatgacgccgatgaagacgacgaggaggaacccatcgacgaggagccgctgtctcagctcgtcgaacgcctcgacgcgaccgtgttcggcctaatcgaagcgcttgacgccgatcgcgccgatctacccaagcttctggacgaggcgcttaagggatcgctctgggcccgccagattgcccgtgagggtgaggacgtcgcccctctgcacaagaaagtgttcgaagcgcgcgccgacctcatctggaagaccaccacggcgcaagcgcggcgcgggcatttcgccatgggcgtcgggctcgaagcgggtctcactatcgacgccatggccgacgagctggccgaactgctcgaccgggcagacgaggcggcgctgagcggcgacatcgacgaactcgtcggcgcgctctgcggtctcggcgaacgcctgctgttcatgcgacccttcatccccgacaaggcgaacgcgctgccggcgaactggaaggccatcctgcgcagctgggtgtccggcgaggaggtatccaagatcggaccgcagaacatgcgcgcggttgaagaggctttcacctatcgcttggtctgggcgctggaagccgtccgcacccgccgcatgtccctcggctggtcgccggagacggtggcgggcggcgcagcggcggcagtcgaaaccggcgtcccgcgattcatgatggcaatgctgatccgcgcgggcctgccgtcacggcgcgcggctatggtagccatcgaggacgccgagccggtcttcgtcaccccggcggaaatgcgggcctggctcgaatccgacgagatcacggcctacaccgacgccggcgactggccgacgcccgtcaccgccgcgctatgggcgcgcttccgaaccgaggctctcaacgacggtatccagaagtggtcggtcgaacgctacaagcgcctgctcgatatcgaggccgccccgcccgccggcctctatcggatcgtcaccgacgagggggacggacggacctggctggcaaccccggactaccagcgagtcgccgccttcaagaagccggcggtcgatcccaaacccagcctcttctcgggccggctaccgggcaaaactaggctcgtggaagccttgcgcgtcggccgcggaaaactgcgctggccgcccgcagatgcgtaa

SEQ ID NO: 56454 - DNA, 795 bp, Pseudomonas fluorescens LMG 5329
atggatgatctcggttttgactttgccaacgcggtgccgtggtttgctcatgagcaggagctgccctatgtgctggtgaggatgactgcccagaacgtagcactcctggaggcagccatggccgaaccgctgcgccgttgctacatcactgacggcgctcttgcggcagcggtagcacgccatggagtaacgcctgctgatgttctagctgccaagcttcccgatgccggggcaaccatggcgggggatttcggagaagtgcttggctacttctaccagtccaccaaggagcatcctgatccagccattggccccaagaaatggcggctcaagcaggacagaacgaagccagcgcccaagtcagacgtcgttcacttcatcatgcccaaccgacctgctgcgagcgcggatgatcaggttctttgctctgaggtgaaggtcaaatctaccagcgctgcctcaaatccaatcggctcggctatcgctgactgcgctaaagatcgcaccagtaggcttgcgagcacattggtgtggttgcgcgagcgtgcgctgtttgaggatctgggagatgtcgatatcccgctccttaaccgcttcatcaatgccgttgatcatccaccaacgactcagcgcttccgggcagtcgctgtcatctgtgaaagcctgctcactgcagagctccccaatgccccggtgacggccagcagtgagtacacccttgtggtgatctccgtgccgaatctttataccacttacaacgcggccttcgaggctgcgcgggcgacggtgcgttga

SEQ ID NO: 56455 - DNA, 2985 bp, Pseudomonas fluorescens LMG 5329
atgagagcttccctgcagacctggatcaacgatgcagacaaggcccggcatttgggccagttttccgtagctgcgttgcccattgaactggctcaaatcagcaaccgatctacggattattacatttcgcttgtcggagagctgttcgacggccttcactccacgacggtctcaggcgatgactgggcgcagttgggaaacgctttcctccagttctcgaaagacatgccggctgagcaaattgaagcgatgggtatctcaaagaatgaggcggcattgttttctgctgccgcgttctattttggggatttcccagcgtcagcctgcttggccatgaggcagtcgtcgccgcccgccgatccgttgagtccatgggctgcatgctatgacttcctggcgcggccagaaacgctggtatctcaaacggcacaccaggtgcaggagcacctgcgaacaggtgatcttcctggtctgcgacgcattgtggaggcgagcgctagcgaggcggacaacgccttgcaggttgggccagatcagtgggtggcggcggctttactcagccgccttctggcccgcttcgatgcatcgaatacccgagctgtgctgccggatggcgcagatgcattctggacgccgctgatcaacgccttcatagatcgcaagccatcaacgtgggagttcttcccctctcagattcaggccatcgatgaagggctgctgagcacctccgaaagctatgcgctacagatgccaactggggctggcaaaaccacgctctgcgagacgctgctgtactggcacctgaagcgaaatcctacgcacgtcgcgatcatgatcgtgccgtaccgctcgttggcttcggagcttcgacactcactggttcgtcagctgaatgctctcggcatcgcggcgcggtgcgcgtatggcggcacgattccgtcgggagacgaggtacatgggcttgatcatatcaacgcgctgatcgcgacacctgagtcgctgtccggagtcctcagtgccgatccagccttcgctcagcgaatatcgctggtcatttgcgacgaagggcatttgctcgacagcgccggcaggggaattggccttgagctgctgttggctcggatgaaggcccgcctggtcaacccgatccgcttcgtgttcatgtcggcgatcatccccaatatcgaggaaatcaacgcctggctcggaggggacgatgacacggtcatcagaagcacctatcggccagccatcgcggagttctccgtgctgcgatcatccggcgccggggtcaacaagtctgtacgtctggacatgcacccgcacgcacagcagcggcagtactcgatccatggttttctggatagaaccaacttccagtaccggaatccccaaacccgccgaaccaacacctataccttcacttctaccaagaccctggccgtcggtgcagcccgcaaggtgttgtcgatggggacgacggcaatttttgccgccaataaacgaggacatcagggtgcgattggcttggcagaagagctcatcaaacagctagagtgcccactgccattaccgaagcccgtggatttcgccgatctcgatgtaattaggtcgcgcatcgagtatctcgaaaccgagttcggtgacagctggatcggcgcgaaggcgctgcgtaatggcgcggtgttgcaccacggagacatccctcaggagacgcgggaggtcttggaagagttattgcgggatcggaagatccaattggtgatctgtaccagcacgctcgcggagggggtcaacctgccgatccgctcacttgttctgtattcggtgcaacgtcgcgttggcagcgggcaacccgagaacatgcttgcccgcgacatcaagaacttggtgggtcgagccggtcgcgccggtgccaataccaagggcctggtgatgtgcgctaatcctgaccaatggtggatcgttcaacctgtagccaccgcaggtgcaggagagttagtcagggggtctctgcggaagttgatcgttgcgcttgaagagcatctgagaaccaccggcatcgtgctcagcaatgagttcttggaagcccagtcagccagtcattcgctcatcgacggggtggatgcgacgctaattgagttaatggcagaggagattggagacgccgattttgtgagactggctgctgacctgtctgaccatacctttgctgcccagcaattacctgccgctgccgtcgtcacgctccggactgtttttgagctgagagcgcagcgtctgatcgggctgagggtggatggcaagatcgcctggctgcaagatacgggtgccaaggtgcgcctgctggatttcgtcgaacaaaccctgctacccagcagagttaattggactgctgcagtcgatcccgtagctgacgagctgctgactgccatcctggagtgggcatggcaggacagggagctgaagtcggacgtacgtgtggctttccgactggaagatagccaaaacactgagcatgcgaagtccaggttcttcgagatcgttcgcaaatgggtacacggcgcaacgttcgcagaaattgccggatccacccggatggaggtggacgatgtcctgggaattcacactcgcgccgttacctactcgttgcaaacattggttgagcagggcatctcgctgcttgcccggctgttgctcgaacgcggtatcgaagtgaacgaaggagtgacggctctcgtcgaacatctcaaattcggcacaccttcgcgcattggggtattgctggcgaatggcggagtgaggcatcgcaaggcgtttgtcgaattggggaacgcgatgcaggcgctcaccactccgattactgcagcaaacgccaggacattcgcacgacgttcgcttgaggcccattcaggagcatggcgtgacgccctgggtgagtttgtgttctctaacacgctgacggatgtgggcagagtagggtag

SEQ ID NO: 56456 - DNA, 771 bp, Pseudomonas fluorescens
atggttcaattcaacgattggtgcgactcaaccgatacccccgtaggcaatcattatcttcgtgtgatcagaggccgagccgcagatgctgcaaccgccatccagctttctgcggcagcaatcccttcccactacgcggctgaggatcgcattgctcacgcattagcacgactgggtaaagccggcgccgcccagttaattacagggctcttgccgcaaacgccccagatccgttcgggcgaccttggagaaatctacgccactgaatggattaacgcccacagtggatatcactcgccagtcaaacggctgcgctggaaagatcaccgcaacatggcgatgcgcggcgacgacgtgatcggcatgcatctcgatccggtcacccagcgtctaaagtttttgaaaacggaagctaagagccgaatagacctccgcgcccgaacactcaccgaggcgcgcgcaggcctagacaaagacgagggcagaccatcgccgcatgcgttgtcgttcattgccgcgcggctgcttgacctcgccaacctaccattggtggatgcgatcgatgacgcgctggtgcgtcacggcattcccctcgaaaacgtgaggcacctgctcttcaccttctccggcaatgcgccaggggcgctgctcaaccaatcgcttcaagcctatcccggtactatcgaacaatggggcgtagggttacatgtcgacggccatgccgcgtttatcctcgccatatacgatcgagtaatcgccgatgccaactaa

SEQ ID NO: 56457 - DNA, 3516 bp, Pseudomonas fluorescens
atgccaactaatcctgacgccatcatcgcggcgattgaagctgcgtctgcgaccggctttcgtggccgattaatcgcgcagggccaagcaagggctatcatctggcgggacggcattcttccagacggcgctcccgcatttgcaccgcaactcagcttcgaattgcatagctatgcttatggcctactcggtctcggcctccgactgctagagatgaacggcgatccaacaaaggcgcgcatagcgtttgcacaagcggctactgcgcttgagtcggttatggcgaaaggcaaccgtggagaggctgaccgggattttcacttcgttatggctgccgcaagttaccatttagctcatttttcggcacgtgcttactcacttctagcgatcgtcgccaacgagcataacttctccccgctcgaacaagcgctggcgcttttaatgcgacgcgacattaccgagctacgaacgcacgtttatgcctatcgccttaatggtcacggatcagatgatcggatcaccgcgctaatccgagagaggatggtcgaaggagttcctgatgccgagcgtgacggccacgactatctgtttgaagtgttggacttggcccttaccgacaacttcttcggcgcgtttgccatcttcttgttggctctcgatagaggggagaagccactggtagacctagcggtcatgcgccttcgccagaacttagccatctgtgcggaactcaacctcttgccacaatggtgggcacatcgcatagcaatccacctcctgcccgatctctggtcgaacacctttcatgaaaaacttcctctcctgccagcgggaggcgcagcaccagcctggagtgacttacgtaaatgctttattgcttctcttggcaaccgcgccaaggctgagatcgacctctggccatcacaaatcgaggccgccggccgcgcaagcgaccaaacggaccacctcgtagtctcgctacccacaagcgcgggaaaaacacgcatcgccgaaatctgcatactccgttgccttgctgccgaaaagcgcgtggttttcgtcacaccactgcgcgctctttcggcccagaccgagacaaccctgctgcgcacctttggtccactgggcaaaacaatctccgccctctatggcagcgttggtatgtcggatttcgatgaagatgcgatccgcgagcgcaacatcgttgttactactccggaaaaaatcgatttcgctctacgcaacgaccctgcactgctcgacgatgtagggctactgatcttcgatgaggggcacatgatcggaccgggagaacgcgaggtccgctatgaagtacagattcagcggcttctaaggcgtctcgacgcagaccaacgccgcatcgtctgcctttcagcaatcttacccgatggtgagcaacttgaagatttttcggcgtggcttcgacacgatcagcagggtggcccgataaagcatgactggcgtcccacccggttgcgttacggtgaagtcgtttggaacagaccagttgcacgccttaacctacgtgtaggcgatgaacggcccttcgtgccgagctacatcaccggcactgtcccgcagaccttcgtaccacccaagcgccgccgcacgcgcacctttccagacaatcagcaagagctaagccttgccactgcttggcgccttgtcgatgatggtcatacggtcctcatttactgccccgagcgtcgcagcgttgagccgtttgcgaaggttattgtcgatctgcacgagcgtggggcgttgagatcattactcgcagtcggtccggccgccctgcaaacagcattagtattaggagctgaatggctaggtgcagattgtgacattctcaagtgtctccgactcggcgtagcgctgcaccatggggcattgcctgcggcctaccgcaaggaggtagagcgcctgcttcgtgctggcattctcaaagtgacgatatcctcgccaaccctggcacaaggcctgaatctttccgcaacagctatcatcatgcactcactgtataggcacggtgagaagattaaagtgtcggaattcaagaacataattggtcgggctggccgtgcatatatagacatcgaagggcttattctttttccgatcttcgaggaccagcgtagacggaagcataatgaatgggtcgagctgattgagaaccaaggtgcccgcgaaatggaaagcggacttgtccagctcctcagcttgttgctgctgcgcatgcacaaacgcaccggaggcgacttaaaccaattgaccgaatttgtggtcaacaacgccgctggctgggcttttccagaagtggcaggggaagaactcgccgatcagaaccgtgctcgaaaggactgggagcgacaccttgcaactctcgacactgcggtcctcagcttgatcggggacacagatgttccggacgcaggcatcgaagccgcgctcgacgcaatcttgcaatcatcactttggcaacggcgtctcttgcgcgtagacgaaccttcgcgaacggtgctgaaattagcgcttctagttcggagtcgccatatctgggctcactcgactacgtcgacccgccggggctactacttagccggtcttgggttagaagcaggccagtcactggacgctgtggcagtagaagccaacgcccttttggttcaggcgaatggtgctctgttggcgaatgatgccgaagcagccatacaagctatcaccggaatagccgagagagtattcacattttacccgttcgcgcccgatcctttccccggtaattggcgtgaaatcctgcgtgcctggctcttaggtcagcctttgggtcctttggttattggccacgagagcgacgtcctgcaattcatcgagggcggactcgtctatcgtctgccatgggcgatggaagcgttgcgtgttcgcgcagtagctaacggagacgtggtcggagaattcgacctagcattagacgactttgaattaggtctcgccatgccagctgttgagacaggcactatgaatcggtgcgcttcgatgctcatgcaggccggctttaactcccgccttgccgccataaaagctgttaacgatacaggcgcgacgtttacgacaggaaatgaactgcgagcatggcttcgctctcctgtagtcgccgcctcagccgcgaaccccgattggccaacacctgaaacgagagctatatggctcgacttcgcagaagaatgcgcgccccgaattaaccggatctggacggagcgccgttacacagcaaacgtccattggagcgccgcgccccttccgcccggttcgccggtatccctctataactgggacggccagccgctcgtcctttcttccgacggcctttcgttaggtgtgctcgctcaccgactaaatccaagtcgaagcggcgttgtacgcgcgactgtcatgcctcaggctggacaaatagacatttgctatcttggaccagacgacctctggctcgattga

SEQ ID NO: 56458 - DNA, 795 bp, Pseudomonas marginalis ICMP 9505
atggatgatctcggttttgactttgccaacgcggtgccgtggtttgctcatgagcaggagctgccctatgtgctggtgaggatgactgcccagagcgtggcactcctggaggcagccatggccgaaccgctgcgccgttgctacatcactgacggcgctcttgcggcagcggtagcacgccatggagtaacgcctgctgatgttctagctgccaagcttcccgatgccgggtcaaccatggcgggggatttcggagaagtactcggctacttctaccagtccaccaaggagcatcctgatccggccattggccccaagaaatggcggctcaagcaggacagaacgaagccagcgcccaagtcagacgtcgttcacttcatcatgcccaaccgacctgctgcgagtgctgatgatcaggttctttgctctgaggtgaaggtcaaatctaccagcgctgcctcaaatccaatcggctcggctatcgctgactgcgctaaggatcgcaccagtaggcttgcgagcacattggtgtggttgcgcgagcgtgcgctgtttgaggatctgggagatgtcgatatcccgctcctaaaccgcttcatcaatgccgttgatcatccaccaacgactcagcggttccgggcagtcgctgtcatctgtgaaagcctgctcactgcagaactccccaatgccccggtgacggccagcagtgagtacacccttgtggtgatctccgtgccgaatctttataccgcttacaacgcggccttcgaggctgcgcgggcgacggtgcgttga

SEQ ID NO: 56459 - DNA, 2985 bp, Pseudomonas marginalis ICMP 9505
atgagagcttccctgcagacctggatcaacgatgcagacagggcccggcatttgggccagttttccgtagctgcgttgcccattgagctggctcaaatcagcaatcgatccacggattattacatttcgcttgtcggagagctgttcgacggtcttcactccacgacgttctcaggcgatgactgggcgcagctgggaaacgctttcctccagttctcgaaagacatgccggctgagcaaattgaagcgatgggcatctcaaagaatgaggcggcattgtttgctgctgccgcgttctattttggggatttcccagcgtccgcctgcttggccatgaggcagtcgtcgccgcccgccgatccgttgagtccatgggctgcctgctatgacttcctggcgcggccagaaacgctggtatctcaaacggcacaccaggtgcaggagcacctgcgaacaggtgaccttcctggtctgcgacgcattgtggaggccagcactggcgaggcggacaacgccttgctggttgggcctgatcagtgggtggcggcggcgttactcagccgccttctggcccgcttcgatgcatcgaatacccgcgctgtgctgccggatggcgcagatgcattctggacgccgctgatcaacgccttcatagatcgcaaaccctcaacgtgggagttcttcccctctcagattcaggccatcgatgaagggctactgagcacctcagagagctatgcgctgcagatgccaactggggctggcaaaaccacgctctgcgagacactgctgtactggcacgtgaagcgaaaccctacgcacgtcgcgatcatgatcgtgccgtaccgctcgctggcttcggagcttcgacactcactggttcgtcagctgaatgcactcggcatcgcggcgcggtgcgcgtatggcggcacgattccgtcaggagacgaggtacatgggcttgatcacatcaacgcgctgatcgcgacacctgagtcgctgtccggaatcctcagtgccgatccagccttcgctcagcggatatcgctggtcatttgcgacgaagggcatctgctcgacagcgccggcaggggaattggccttgagttgctgttggctcggatgaaggcccgcctggtcaacccgatccgcttcgtgttcatgtcggcgatcatccctaatatcgaggaaatcaacgcctggctcggaggggacgatgacacggtcatcagaagcacctatcggccagcaatcgcggaattctccgtgctgcgatcctccggcgccggggtcgacaagtctgtacgtctggacatgcacccgcacacacagcagcggcagtactcgatccatggttttctggatagaagcaacttccagtaccggaatccccaaacccgccgaaccaacacgtataccttcacgtccaccaagaccctggccgtcggtgcagcccgcaaggtgttgtcgatggggacgacggcgatttttgccgccaataaacgaggacatcagggtgcgattggcttggcagaagagctcatcaaacagctagagtgcccactgccattaccgaagcccgtggatttcgccgatctcgatgttcttaggtcgcgcatcgagtatctcgaaaccgagttcggtgacagctggatcggcgcgaaggcgctgcgtaatggcgcggtgttgcaccacggagacattcctcaggagacgcgggaggtcttggaagagttattgcgggatcggaagatccagttggtgatctgtaccagcacactcgcggagggggtcaacctgccgattcgctcacttgttctgtattcggtgcaacgtcgcgttggcagcgggcagcccgagaacatgcttgcccgcgacatcaagaacctggtgggtcgagccggtcgtgccggtgccaataccaagggcctggtgatgtgcgctaatcctgaccaatggtggatcgttcaacctgtagccaccgcaggtgcaggagagttagtcagggggtctctgcggaagttgatcgttgcgcttgaagagcatctgagaaccaccggcatcgtgctcagcaatcagttcttggaagcccagtcagccagtcattcgctcatcgacggggtggacgcgacgcttatcgagttaatggcagaggagattggagacgccgagtttgtgagactggctgccgacctgtccgaccatacctttgctgcccagcaattacctgccgctgccgtcgtcacgctccggactgtttttgagctgagagcgcagcgtctgatcgggctgagggctgatggcaagatcgcctggctgcaagatacgggtgccaaggtgcgcctgctggatttcgtcgaacagaccctgctacccagcagagttgattggactgctgcagtcgatcccgtagctgacgagctgctgactgccattctggagtgggcatggcaggacagggaactgaagtcggacgtacgtgtggcattccgactggaagatagccaaaacactgagcacgcgaagcctaggttcttcgagatcgttcgccaatgggtacagggcgcaacgttcgcagaaattgccgaatccacccgtatggaggtggacgatgtcctgggaatttacacgcgcgccgttacctactcgttgcaaacattagtcgagcagggcatctcgctgcttgcccggctgttgctcgaacgcggtatcgaagtgaacgaaggcgtgacggctttcgtcgaacatctcaaattcggcgcaccttcacgcattggggtattgctggcgaatggcggggtgaggcatcgcaaggcgtttgtcgaattggggaacgcgatgcaggcgctcaccactccgattactgcagcaaacgccaggacattcgcacgacgttcgcttgagacccattcaggagcatggcgtgatgccctgggtgagtttgtgctctctaacacgctgacggatgtgggcagagtagggtag

SEQ ID NO: 56460 - DNA, 813 bp, Pseudomonas putida TRO1
gtgaagccaagccatatcgattggttaagtgacactggtgaacggaaaaccacaacgtgcggccgcaatatcgaaatctgggccttggatccagaagatgacgctgcggtattgtcggcatgggccaaatacttccgtcagcactacatcaccgatgcggacctgccgctgatggtcgatggtactgggctaaacaaagctgactatctgcgtaccatactgctgcccgatgccaagacgaccccaggacctagcttgcgctctggggacttcggcgaaattctcgtcgctgattacattgagttcgtcctagggtactggtgcccacgtgaacttcgctatcaggatcgttggaatcgaaacgactctaccaagggctgcgacgtcattggcttcagagttgctatagacggtcaggccagccccatggatgagctttttatattcgaatcaaagtccggtatgacgaaaacggacgcgcatcgactccaagatgccatcgacgacagtatcaaggacaagttacgggaaggcatgagcctcaacgcgatcaaacgacgatttattgatcgcggagcactggcagaagcagatcgggtgaagcgctttcagaaccaagcggatcgcccctttcgacgcataaatggggcggcagcgatcctagatgacgacgtgttcgctcaaaccgatctgacggctgccgacgcttcggcacatcctaacgccggcaatcttcgactgattgttattcgaggaccatcgcttatgaaactcgtacatgcgctatacgaaaaggcagcagatgaagcctga

SEQ ID NO: 56461 - DNA, 3123 bp, Pseudomonas putida TRO1
atgaagcctgaagcgagcgcgctcaacatcctatccacgacccgcgccagggcgaaactgcacgagtttcgcgttgcgcctgaggacttcaacgcgctcccacgggaccctgccatcctctttgcgcttgcgatcgggattcttggcgacgtggctgccaccattgcagacggcattggggctgaagtgggtgctgaattaggcgagctacaggttcctgtgggctggaatgagggagacgcggacccacaagctgctctcggcttctcgtcggtctttttcgatgcctttcttaatgcacaactcgataccgaactgacatccgagttctcattactttgtgcggcggcttattacgttgctggcaatgtcggtagtgccaccgtgattgttcggcgaatggagcctcccgacactgagatcgctggcgggctgggttacctcgcctattcgatcctgagaaacgacttcgttgcgattgaggtgccccacacccatcgtgcagttacgtcgcgccttctcgaagctctcggtcgctactttcgatttgagggtgatataggggcagtcgtcgaagcttgcaatgagatgcgtggctacttctatagtgcgggctcacctcgtgaactgctctatgcggacatcgtcgtagcagtctgcacgctaaagttgcgtaacgcggcacggacgaaattacccctcgcttccggccttgagtcagagctatggcgcccggcgctcagcaagccccatttcccgattgagctttggcccgcacagcaaaggattgctgatgccggtgtattgtctgggcggtcagtcgtcatccagatgccgaccagcgcgggcaagacgcgtgctacggaactgatcattcggtcagcctttctgtcgaggcgcgccaacctcgcaatcatagtcgcgccgtatcggtcgctgtgccacgatattcggagcgatctcgtagccgccttttctggtgagaatatccggctcgacgaggtctcggattcctaccagtttgatctagtgctcgaagctctgattgctgacgattctcttctaatcgtgacgccggagaagctgttgtacatgctacgacgcgcgcccgatctcgcggaaaggatcggtcttgtcatttatgacgaaggccaccagttcgatagcatcacccgcggacctacttacgaactgctgctgacgtctctgcgtatggcattgccggttgcggcgcagattgttcttatctcggcggtgatcgggaatgctgctgacgtggccgcttggctgattggggatgcacaggcagttattgggggggatggtctcctgccaactaccaagagcatcgcgttcgcgagctggcaagatcaacgtggtcgcttagagtatgtgaaaccgcaggatcccgcagaacgtgagttcttcgtgccgcgagtaatcgccgacaccgttttacccttgcgcggacgtgaaagcgccgtgcggcggttccctgaaaaaaatggcggtgacgtcgggctcttcctcggtttgcacgtcgttcgcaatggcagcgtcgctatcttctgcggccgcaaggatagcgtgacaaagatctgctcgcgggcggttgagattcttgagcgtggattggatgttgaatggccgatcgcatcatcggacgcaatggaagtccacaaaatccgtgcactttgtgagcttgaactgggggcgggagcttcggcgacccaagctgcggcacttgggatcttcgcgcatcacgccgatactccgcatggcatccgcttggcgatcgaacatgccatgaaagaggggcttgcgagatttgtcgtttgcacctcaacgctggcgcaaggagtgaattttccactcaagtatctaatcgtaacctcaactcgacagggcggggagccaatccttgttcgtgactttcacaacctgatggggagggcgggccgggcaggtatgcacaccgaaggtagtgtaattttctcgacaccgacaatctacgatcagcgaaagcagtttagagggcgttggacttgggatcgcgcagttgagctgctggacgcaaaaaattccgagccgacgcggagttctatcctggcgttgtttgatccgtacgagcagcgcactccaaccattgttcaggagattcctcttgcttggttggatctagctttcgctgacgccaccaaattcgacgagattgttgcatttgcacgagctgtgcaacccgctatcaacgaacgcgaattccgacgattcatagagggacgggcacgtgcggtgcagcatattgcttcgtttctaatcgcgaacatgagctttgccgacggcgaagatgcggttatgcgtataggtgaactcgtggccaacactctcgcttatcatcttgcagatgaagagatacggcctcgcttgattgcgctgttccgctccattggtcaatccatcgccgtgaataccgatgacggtatgcgagcgcttattcggcggtccccattaccaccagcggcagtggtcgaacttcaagcttgggtggacgcaaatatcgaagtgcttcgggacgctgctaccgaggaccgccttttcgatgaaatcgcgccaattgccttaaggttcgcgacatctcgcgcgatccacactatcagcgttcaggatgtcatccctcggacgttgcgtgaatgggtttcgggccgatcttatgcgacgattttcgagacgcttcataaagctggtgcgcgcgcggggcgagatcgtgtcacagtcgaggacgccgtttcactttgcgagagcggttttggatacgacgtggcaatggtcgtagcatcacttgccgatcttaccgaggggcttgatgaggggctgcattctgctgccacacttctgcaaaagcagatcaaatatggcttgtcggaaaagtcagcaattgccttccatgaggctggctttgccgatcgttatgtggcgtcagggcttggtttgcggtgggggcaggctatcgatcgtgctggggtgcgtgcggcttgtcagcaggaggatttaatgcgggctgctcttgctcacgtaccatcttatttcatagctgtcgctgctgaacatggaggatgggtctag

SEQ ID NO: 56462 - DNA, 807 bp, Pseudomonas stutzeri NF13
ttgagtcttacacacattggatggttgaagagcgacggccaatttacctctgcctgtggtagatccgttccgatctttgaactatgccacgacacagccgaccaagcgaaaatgtcggattgggctgggcactttaggcgtcattactgtagtgacgaggatctaaattacattaagccatcccatgtatccacctacgactatttagtgacgataaaatttccttctaaaacacaaaagcctgggccaagtgttaggtctggggattttgctgaaattctggttgcggattacatgcaatacatgcgtggctacgatgtgcctcgaacacgatgggacaggaaaattgtagcgaacgaatcggcaaagggatcggatgtggtcgggttcaagtggagtaacgcctctcccagcgcgaatgatcacctgctggtgtatgaaattaaggcagttacatctgaaaaaggtaaatctaacgtcctccaaaaagcagtggatgactcagctaaggatgatattcgattagctgaaacattgaatgcgatgaggcagcggctaggggataagaaagataaacaaggattagccactgttgccaggtttcaaaattactctgatcacccatatgtaaagggctacggcgctgcggcagttgtaagcacatcatcttttaacttggccgcactagcaacgacaacacttgctgcccacccatgcaaggacaaagttgaaatgcttgtcattcggggaaatagcttaattcctttgatagatgcgctttacgagcggggcgcaaatgaagcttga

SEQ ID NO: 56463 - DNA, 3096 bp, Pseudomonas stutzeri NF13
atgaagcttgaggcgcgatctaaaagactattaggcctgtctaaatcgacagcaaaactaaaagagttaaatatatccaccgagctgcatccaccactagctgacgaccctttcgcgcttctagttttaacgattgggatcttagggcagctagctgcgctaacagcaaaaaatgaagatttcgaacaactggctagccttaaaggccaactggtggatgtggcgcagtattttgattcgctcgatggggcagggcttctcgatgagtccagcatatacttaagggttcttggggctgctgcttactatctagctgatatgccaggtagctcttcagtgctagctaaggaaattccatatgaatatgagttaagccctcatcgtcttgagggcgtattaatatggattctgaagtccgattatcgccatgattggtacaaacagaacgatagttactttgacggtgccgctacgaaactggtaaacagtttttattcgttctatgaaggttctgtaacgaacatagaggtgaattctgccgctcttgagctgcgtgatttggtatacagggcgggctcagacagagacttgctttttgtagacgtgatttgtgctttagtgcgggtaaaaataagcaactcgtctcgcatttgtctgcccctatatagtgagcttagttttgatgtgtggagggatattatagccagagcgaattttatgaaggagctatggccagctcaacgcttgatgggggaagaagggatattaaaaggagtgtctgctgtcgtgcagatgcccacaagtgctggcaaaagcagagctatggagctaatagtccgtagcgctttgctgtcaggtcgcgcgaaactgatagttgtagttgctccattcagagctctctgcgccgagatatccgaatcgtttaaaggtgcgttcgcgccggatggcgttattattaatgatcttccagacctaaatcaaattactgcattggattcggagttcctgagatttctgcttggcgacaaacacagggagcgctctaagggaaacgtacttattacgacgcctgagaagctggcctatttgttgcgccatgaggatgagctggcaactaacatagatctcttgttgtttgacgaggggcaccagtttgacactggtaaacgcggcgttacatatgagttgctcatatcttacctgcgggataaagtaagtccgaatgctcaaaaggtcatgatatctgcagtaatggcaaatgctaagtcaataggtgattggcttaactttgagtcggggattgagatccaaggaacaaagcttcttcccacagtcagagcgattggtttcgcgacatggccagatgctcgaagtggcggcggtgttcagttttttgatcaggaaatactcgacgttaatcaatattatgttccaagcttgctagagccgcttgagattaaaaaaggtaagggcaaatttaggaaataccctgatcgactgaatagtcgcgaggttgcatcctacttagcagtaaaattttgcgagtttggaggcgctgctattttttgtgggactaaggtcatcgttagatcggtctgcaaggacttggtggctatttttgataaagggacggacttgcccttgcctgcctctgttggtgatcctgaggagatcgttcgattacattatttggcatctttgcatatgggggattgtgattacgcaaaggcgataaagattggggtaatgccgcatagctctaatatccctgcagggctgcgatcatctgtggagtgggcattatcaaatagaaaggcttcgttagtggtttgtacgtctactctggctcagggcgtaaatctgcctattcgctatcttttaattacaagcaccttccaggctggcaatgcaatatctacgcgagatttccaaaatctcatcgggcgtgctggtcgatcgggatactacacggaggggaatataatattcactgatccgcagcttttcgataaccgcaggtcgagagcaggcctcaagaaatggggaaaagttaaggagcttttgaattttgatagcgccgaagattgtttaagcagtttaaaagggctgattgaagaacttcctaaccccggctccagtattaatgttatggattttcttgctaatcctcgttattggctgcagctcgctactaagcttcgggcggaagaaaaagataagtaccgaaagagagatttcgactcattgatattcgagatgaattcaagggaagatcggctgcgcgctctagagagctacattattgcatatgtcggtgataatccggacgcttctgcagctgacatagaggcgctggcgaaggagaccttggcatatagcctgtcaacagaagatgagcaaaatagtattatcacactatttgtccatattttcgacaaaatgaaagcactagatgtagagttatacaaaggatacgggcgatcattgctgggtatagatcaattaatgcttgtcgagcagtggctggatcaaaatcaattcgatcttggcatatcggattcatgcgaagatgcgctgcaagtaatttggtctcttgttttacagctatccaacggatcaatagggcataaaatcatgcctgaaaatatttcattaggcattgtattgaaatggattacagggcaaagctatagagaaatccaggaatacgttaaatcatccaatggctactatcaggcaggaaagcaagaacgtacagttaccattgataacattattgaattttgcgataagtttttgggctatgaggctatgctttatgttggtggtgtcgcggacattcttgatgcaaaaggtatcttagaggattgcgctggccatctacgcttgttgcagagtcgtctaaaatatggcctgagctctgaactcgaagttggtttgtatgctggtagttatcctgaccgggaagtagccaagatgattgcggctgagcttcataaggccggcctagtagatttcaatcaagattcgatcaataacaaccgacatttgatagcatcagtgttgacacgattcccttctttcttttcgcgctga

SEQ ID NO: 56464 - DNA, 783 bp, Pseudomonas stutzeri
gtgggactttatgagaggtggtgcgagtccaccaagaaaaaggacaagcgcaagcactactggacctatgtcgagaaggagggcggtcgcgacgagatccgcgaggaactcgccgagaccatccgctcgcactacgaccgactcgaacggatcgccgatgacgtggagcgactcgggtacaaggtcgcagccaagattctcagcgaggcgatgcctcagacagacaagggtcgttccggcgacctcggcgaaatcctcgcgactgagttggtggaggaagagattggcctgcgtgtccccgtgcgccggcttcgctacaaggacggccgcaacatggctatgcgcggagatgacttcatcggcgccggttacgatggcaatggtgaaaagctctggctcctaaagggcgaggccaagagcaacaagaagcttggcaaatccacggtcaccagcgcccgcaaggtgctcgaccgcgacaatggccgctgtacgccagactcgctgctgttcgtcgccaaccgcctgctggagagcaacgaccccgacgaaaacgcgctgggtcgcgatctccgcgacgaggtgggcctcaagtccctccgtgccgatcgcatcgaccacatgctcttcaccgtatcgggtaacggtcctcacgcctccctgaaggacgacctcgacgctgctgggaccaaccgcgaccactatgtcgtgaacatccacgtcgaggaccatcaagactttatcgcggccatgtaccaggaggcggaagaccttggagacgcctga

SEQ ID NO: 56465 - DNA, 3501 bp, Pseudomonas stutzeri
ttggagacgcctgacgagctgacagccttcctcaccgacgcgaccgtcgacggaatcctcggccggctcctctatcgcggtgcggcctggtcgttgatgcgggaagcaggcgtgttaccgcaaaacgcaccgcccttgggtccgaccatcgaaaccgatctcgccgaacatggcttcgctctacttcggggtgccatggctctgcgcgctaagaccggcgcgtctgaccttaccagcaaggctttcgagcgggccgccaacgccttcgaagccctagtgagaaatggtgatcctgaggcgcccgatcgaggtttccgtcgcaccattgccgcttccgcctatcacctagccggcttctcggccgtggcctattccctcttcaacgagacggcagaaaacctcaacaccgcgccgggcgaaacggcgatccgtcacctgatcctgcgcgacctcgaccagctgcgcggcttcgtccgtgattggcttggcaacgaggcccacggcgacgagcagttggccaaggcgcttggtggcgatgagtccgacatcgacgaggttttgtccaccatcctcaatacgacgatctgccgggctctggcatttttcgatttcgcgcttgagacgggcgaagatgagccgatcgaaagcgctcggagtctgctcgccaccgccgtcagcttggccgacaatgccgaaaacatcccgttgtggtggatttcaaacctatgtcgccacctgatcgatgacctgtggcagcactcgcttcaccagaatctgccgactgaaccgcccgaggggacggaagaaacataccccgatctgcgccggctgttcatctcctcgctctacgcccgcaagacctccgaggtggagctatggccctcgcagcgagaggccaccaaacgctccacggacgtggcggacgatctggtcgtggccctgccgaccagcgcgggcaagacgcgggtggccgagattgccactctgatgacgttatctttggcacgccgggtcctgatcgtcacaccgctgcgcgccttgtcggctcagaccgagcgttctttccgaaagaccttcgcgccactcgggttcagcgtctcctcgctttacggggccagtggcctttcggcgggcgacgaggacgccctacgtacccgcgagatcgttatcgccacgcccgaaaagctcgacttcgcgctgcggagcgatccttccttgatcgataacgtcggcctgatcgtcctcgacgaaggccatatgatcggaccgagcgagcgcgaaatccgctacgagacgctcgtgcagcgtctgctacgacgcacggacgcagccgatcgccggatcgtctgcctctccgccatactgccaagcggcgacgaactggacgatctcaccgcgtggatacgctccgacgaaccgggcgcaccagtgcgttccgactggcgtcccacgcgccagcggttcggcgctctcacatggcgcggcaaggacgcgctgctccgactcgacctcgatgacgatggtccctttctcgagaagttcgtcgtcgagaaagccgcattgggcaaagagaagaaaccttatccacgaaagaactcgcacctcgccttgtttgcggcgtgggagttcgcgagccaaggcaagcgcacattgatcttttccacccaggcaaactgggtcgaaagctacggcaagcaggtcgtggacctctgcaaacgagggtacctggagtcgttgctagaggacgaggcgttggttgcacgtgccctggaggtcggcaaggaatggcttggcgaggatcatcccgccgtggccagtctgaaggcgggcgtcgccatccaccatgggcggttgccgagcccgttcctgcgcgagctggaagttcttctgtccgagggggtattgaaggtcatcgtagcatcgccgacgctctcgcaaggtctcaacctcaacgctgcagtactgctggtgcccgcactttatcgggcggctgagaagattaaaggcgaggagttcgccaacgttgcgggccgcgccgggcgcgccttcgtggacgtcgaaggcctcatcgtccacgtcatgtttgacaagatcaactggcgaaaaaaggagtggggggagatagttgcctccgccaaggcccgcacactgaaaagcggcctcattcagatcgtcgccgagatccttgagcgcctgtcgcgcgagggcgtcctgggtcgcgatgatgcctgggaatatctcgccaattcgcgcgaagcttggagatcgcccgaggaagaggcagcggtggctgagcgtctcgccaccgccgtggaatacgagggcgatgacgacgacgatgaaggtggcgacgacgacgaggagagcatcgatgaggagccgctgtcgcagctcgtcgaacgcctcgatgcgacggtgttcggtctgatcgaagccctggacgccgatcgcgccgacctaccgaaactcttggacgaagcgctcaaaggatcgctgtgggcgcgtcagatcgcccgcgaggaagaggatattgcgcctttgcacaagaaggtgttcgaggcgcgcgccgacctcatttggaaaaccactacgacgcaggcgcggcgcgggcatttcgcaatgggcgttgggctcgaagctggcctctctatcgacgctatggccgacgaactcgccgagctgctcgaccgggccgacgacgctgctctgagcggcgacgtcgacgaactcgccgacgcccttggcggtctaggcgagcgcctgctattcatgcgtcccttcatccccgacaaggcgaatgcgctgccggcgaactggaaggtcatcctgcgaagctgggtgtccggcgaagaggtcgccaagatcggaccgcagaacatgcgagcggtcgaagaggccttcacctatcgcctggtctgggcgctggaagccgtccgcacccgccgcatgtccctaggttggtcgccggacacggtggcgggcggcgcagcggcagcgctcgaaaccggcgtcccgcagttcatgatggcgatgctgatccgcgccggcctgccgtcacggcgcgcggcgatggcagccattaaggacgccatgcccgtcttcgtcacaccggcggagatgcgggcctggctcgaatccgacgagattacggcctacaccgacgccggcgactggccgacacccgacgccgccgcgctatgggcgcgcttccgaactgaggctctcagtggcggcatccaaaaatggtcggttgaacgctacaagcgcctgctcgacatcgaggccgtcccgcccgccggcctgtatcggatcgtcaccgacgagggggacggacggacctggctggcaacccccgactaccagcgggtcgcctcgttcaagaagccggcggtcgatcctaaacccagcctcttttcgggccggctgccgggcaatactaggctcgtggaagccttgcgcgtcggccgcggaaaactgcgctggccgcctgccgatgcgtaa

SEQ ID NO: 56466 - DNA, 795 bp, Pseudomonas syringae pv. syringae B64; identical to SEQ ID NO: 56454

SEQ ID NO: 56467 - DNA, 2985 bp, Pseudomonas syringae pv. syringae B64
atgagagcttccctgcagacctggatcaacgatgcagacaaggcccggcatttgggccagttttccgtagctgcgttgcccattgaactggctcaaatcagcaaccgatctacggattattatatttcgcttgtcggagagctgttcgacggccttcactccacgacggtctcaggcgatgactgggcgcagttgggaaacgctttcctccagttctcgaaagacatgccggctgagcaaattgaagcgatgggtatctcaaagaatgaggcggcattgttttctgctgccgcgttctattttggggatttcccagcgtcagcctgcttggccatgaggcagtcgtcgccgcccgccgatccgttgagtccatgggctgcatgctatgacttcctggcgcggccagaaacgctggtatctcaaacggcacaccaggtgcaggagcacctgcgaacaggtgatcttcctggtctgcgacgcattgtggaggcgagcgctagcaaggcggacaacgccttgcaggttgggccagatcagtgggtggcggcggctttactcagccgccttctggcccgcttcgatgcatcgaatacccgagctgtgctgccggatggcgcagatgcattctggacgccgctgatcaacgccttcatagatcgcaagccatcaacgtgggagttcttcccctctcagattcaggccatcgatgaagggctgctgagcacctccgaaagctatgcgctacagatgccaactggggctggcaaaaccacgctctgcgagacgctgctgtactggcacctgaagcgaaatcctacgcacgtcgcgatcatgatcgtgccgtaccgctcgttggcttcggagcttcgacactcactggttcgtcagcttaatgctctcggcatcgcggcgcggtgcgcgtatggcggcacgattccgtcgggagacgaggtacatgggcttgatcatatcaacgcgctgatcgcgacacctgagtcgctgtccggagtcctcagtgccgatccagccttcgctcagcgaatatcgctggtcatttgcgacgaagggcatttgctcgacagcgccggcaggggaattggccttgagctgctgttggctcggatgaaggcccgcctggtcaacccgatccgcttcgtgttcatgtcggcgatcatccccaatatcgaggaaatcaacgcctggctcggaggggacgatgacacggtcatcagaagcacctatcggccagccatcgcggagttctccgtgctgcgatcatccggcgccggggtcaacaagtctgtacgtctggacatgcacccgcacacacagcagcggcagtactcgatccatggttttctggatagaagcaacttccagtaccggaatccccaaacccgccgaaccaacacgtataccttcacgtccaccaagaccctggccgtcggtgcagcccgcaaggtgttgtcgatggggacgacggcgatttttgccgccaataaacgaggacatcagggtgcgattggcttggcagaagagctcatcaaacagctagagtgcccactgccattaccgaagcccgtggatttcgccgatctcgatgttcttaggtcgcgcatcgagtatctcgaaaccgagttcggtgacagctggatcggcgcgaaggcgctgcgtaatggcgcggtgttgcaccacggagacatccctcaggagacgcgggaggtcttggaagagttattgcgggatcggaagatccaattggtgatctgtaccagcacgctcgcggagggggtcaacctgccgatccgctcacttgttctgtattcggtgcaacgtcgcgttggcagcgggcaacccgagaacatgcttgcccgcgacatcaagaacttggtgggtcgagccggtcgcgccggtgccaataccaagggcctggtgatgtgcgctaatcctgaccaatggtggatcgttcaacctgtagccaccgcaggtgcaggagagttagtcagggggtctctgcggaagttgatcgttgcgcttgaagagcatctgagaaccaccggcatcgtgctcagcaatgagttcttggaagcccagtcagccagtcattcgctcatcgacggggtggatgcgacgctaattgagttaatggcagaggagattggagacgccgattttgtgagactggctgctgacctgtctgaccatacctttgctgcccagcaattacctgccgctgccgtcgtcacgctccggactgtttttgagctgagagcgcagcgtctgatcgggctgagggtggatggcaagatcgcctggctgcaagatacgggtgccaaggtgcgcctgctggatttcgtcgaacagaccctgctacccagcagagttaattggactgctgcagtcgatcccgtagctgacgagctgctgactgccatcctggagtgggcatggcaggacagggagctgaagtcggacgtacgtgtggctttccgactggaagatagccaaaacactgagcatgcgaagtccaggttcttcgagatcgttcgcaaatgggtacacggcgcaacgttcgcagaaattgccggatccacccggatggaggtggacgatgtcctgggaattcacactcgcgccgttacctactcgttgcaaacattggttgagcagggcatctcgctgcttgcccggctgttgctcgaacgcggtatcgaagtgaacgaaggagtgacggctctcgtcgaacatctcaaattcggcacaccttcgcgcattggggtattgctggcgaatggcggagtgaggcatcgcaaggcgtttgtcgaattggggaacgcgatgcaggcgctcaccactccgattactgcagcaaacgccaggacattcgcacgacgttcgcttgaggcccattcaggagcatggcgtgacgccctgggtgagtttgtgttctctaacacgctgacggatgtgggcagagtagggtag

SEQ ID NO: 56468 - DNA, 816 bp, Pseudomonas syringae pv. actinidiae ICMP 19098
atgccgtggtcaggcgaacatcttaagtggctaatcaataccaataaaaaaattacaaccgcctgtggaaaaaaggttgacgtatataaattcaattacgatctaatggatgagcccacgatgtccgcatgggctaggcatttccgcaatcactattgtgatgatagtacaattgatatgattaagtcgccagaccttagtcgatccgaatacttattgaccctaaagtttcctagtggcaaaaagaaaccagggccaagcattcgagctggtgactttgcagaaatacttgttgcagactacctacacttcctcagatctttttatatacctaaaacacggtacgatagaaagataatagccaatgaatcatcaaagggctccgatattattggcttcaagcaaaaagttagcactcatgagcgtgatgatgaattaataatttttgaagtgaaggccaaagcaagtaagagcaagccagtaaatttattgcaggtagctataaatcactctataaaagatgaagctagaatagctgactctctcaatgcaataaaacagcggttgatcgataggcaaaactacgatgaagcggctatcgtcactcgatttcaacttgggactgatcgaccctataagaggatatatggtgccggggctgtaatcaccagcgattcatatgacccttctcttatctcgctgtctgattctagtgagcaccctgggaaggacgggcttgaattgctcgtgatctcagggccaacgttaatggcacttgttcacgcactttataagagggcatctgatgaagcttga

SEQ ID NO: 56469 - DNA, 3126 bp, Pseudomonas syringae pv. actinidiae ICMP 19098
atgaagcttgagagcaaatcaaacacgcttctagctataacaaaatccaaggctaagctgtatgaattcggagttgaagagcaataccatatcgaactacccattagcccaagcaacttacttattaccaccataggaattattggggaactgtgtgcgtcagaagcaaggttaagtgatgataacgcggacaatattgaagagctaaaaaaccaactagttacagttggccaatactttgatgcgctaaatcagtctcggacagcgagtggaattcagaactatctcctactgcttggctccaccgcttattatcttggagggatgccgggaagttcgcatgttttatctaaaggcttggagtataacattgttaatatcactcctagctatattgaggggattcttatatggcttctaaagtctgacattaaacatgtctggtataggcacactgacgcttatctagcggatgaggctgatgcttttgtaagagcttacgtctcattttttgagcgggaagagacccaagacgaatttaagcacgcttgtcaaaaattaagatcggtagtttatcagtctggtagcgatagagagttaattttagttgatgcaactatagctgtagcacttaacaagatacgaaactcctgtttaatttgtttggagaattactctggactttctctggagtcctggactgacgcgcttgaaaaagaaggcttcattaaagagttctggcctgcgcagcatttaataggtgagtcaggggtcttaaaaggagtctcggcagtaattcaaatgcctacaagtgcaggtaaaactaagtcgactgaacttatcattagaagtgcattcgtttcaggcagagcagatacagcgttcgttattgcacctttcagggcgctttgcagagagataacttcaaacttcaaaggggccttcgaaggtgaagacatttctgttaacgagttgcaagatacaacagagctgaatagcgaggaacaggaatttctgaattttttactgggagtgagtcatgctaagtctgtcaaaaatattgtaatcaccacacctgaaaaactagtttataccttgcgtcacgaaccatctctcgcaaagaaaattggcctattggtctttgacgaaggacatcaatttgatacaggcaagcgaggggtgacatatgagttattacttactcatcttaaaacgacggtggccgagaatacgcagaaggtgttgatatccgcagtaatggcaaatgccgagacgataggtgactggctaaatggaggtgaaggagtacacattcaaggtagcagttgcctaccaactcttaagagtgttgcctttgttagctggactgctaaactgggtcagttacactacttaaaccctgacaacaagggggatagtggttattttgttcccagaatgatcaaggaactacctttaaagaacactcctagagagacgaagattagagtttttccggaacgtgcaaaaacatccagtgtttctgcatatcttgggctcagactctgtcaccaaggaccagttgcattattttgtggaacaaggaaaacagtaaactcaatctgcgaaatattaatcgatgcctacaagcgcgaacttaaactttcttttcctaaagatagtagcgatgaagttgagctcgaaaagatagcatttctcgcctcgcttcactttggagaagacgctgttttttcgcgcgccatcaagcttggcatcctcccgcacagctctaacattcctaatggcattcgcgtctctgtagagtgggcaatggagaaaggtagagcctgcttagttgtatgcacctcaacactggcgcaaggagttaatcttccaattaaatatttggtggtttctagtctcaatcaaggagcccaagacataaccactagggattttcagaatttgatcggaagggcaggccgatctggacatcacacagaaggtagtattatttttgccgattccaaaatttatgataaaagatttaattttaaggaaaactggaggtggcatagagccattcaccttctaagttttacgaatgccgaaagttgcttgagtagcctaaagggattgattgccaagtttgattttgactatgcatcgcttaaagacacgtttcagtttatcgagacccctgttgaacatcgcaatagttggattgactggtcaaaaaagaatggcatcgacattatatctttactagatgagatgagcaggaagctagacttaataaactcagtagaaagttttttcttatcttacttgaaggaaaatccagaaacagccgatagaaaaacattggtttcacttatagaagacactcttgcttttcaccttgctagcgacgatgagcaggccgccctaattgaagctttcagaataatatcggatcgggtatttagtgttcctaaagaaaagcactcgtattatggcaggactttattaggggtcgggcagctagttgtcattgagcgatggattgatgagaatttatttgatcttgagctttgcacatctagccaagatatactgaatgcctgctggccactcatagtcaatctttgtgacaagaaactttttaatagcctgacaccgcaaaatctcctcccatcgtttgcgcaatcttggatagaggggaagaaattcgtagacatatttaaagaaatgaaaaaagcggggcttaaataccaagctcctattcttaagatgagtttgacaatggatcacattgttgagtttacaactggtattttggcatatgatgcaatgctgtttgttggtgctattgccgatattttggaaggccgtcaattagatcaagatgccgccacctacactagactcctacaaaaccaattgaaacttggtcttaattcagagcttgaaatatggctacatcgaaaaggctatgttgacagggaagtttgtaaaaccttggcgtcagtgctcctaaaaaaacaaaaatatgaaacagtgtttgaattcagcattctggaagataactttgaacttgttcaggaaacactggtgaaatacccaacttattttctggaggcgtataagcctagacatttaacctaa

SEQ ID NO: 56470 - DNA, 834 bp, Pseudomonas syringae pv. actinidiae ICMP 19096
ttggaaaaggacgtcagcatgccgtggtcaggcgaacatcttaagtggctaatcaataccaataaaaaaattacaaccgcctgtggaaaaaaggttgacgtatataaattcaattacgatctaatggatgagcccacgatgtccgcatgggctaggcatttccgcaatcactattgtgatgatagtacaattgatatgattaagtcgccagaccttagtcgatccgaatacttattgaccctaaagtttcctagtggcaaaaagaaaccagggccaagcattcgagctggtgactttgcagaaatacttgttgcagactacctacacttcctcagatctttttatatacctaaaacacggtacgatagaaagataatagccaatgaatcatcaaagggctccgatattattggcttcaagcaaaaagttagcactcatgagcgtgatgatgaattaataatttttgaagtgaaggccaaagcaagtaagagcaagccagtaaatttattgcaggtagctataaatcactctataaaagatgaagctagaatagctgactctctcaatgcaataaaacagcggttgatcgataggcaaaactacgatgaagcggctatcgtcactcgatttcaacttgggactgatcgaccctataagaggatatatggtgccggggctgtaatcaccagcgattcatatgacccttctcttatctcgctgtctgattctagtgagcaccctgggaaggacgggcttgaattgctcgtgatctcagggccaacgttaatggcacttgttcacgcactttataagagggcatctgatgaagcttga

SEQ ID NO: 56471 - DNA, 3126 bp, Pseudomonas syringae pv. actinidiae ICMP 19096; identical to SEQ ID NO: 56469

SEQ ID NO: 56472 - DNA, 816 bp, Pseudomonas syringae pv. actinidiae ICMP 19094; identical to SEQ ID NO: 56468

SEQ ID NO: 56473 - DNA, 3126 bp, Pseudomonas syringae pv. actinidiae ICMP 19094
atgaagcttgagagcaaatcaaacacgcttctagctataacaaaatccaaggctaagctgtatgaattcggagttgaagagcaataccatatcgaactacccattagcccaagcaacttacttattaccaccataggaattattggggaactgtgtgcgtcagaagcaaggttaagtgatgataacgcggacaatattgaagagctaaaaaaccaactagttacagttggccaatactttgatgcgctaaatcagtctcggacagcgagtggaattcagaactatctcctactgcttggctccaccgcttattatcttggagggatgccgggaagttcgcatgttttatctaaaggcttggagtataacattgttaatatcactcctagctatattgaggggattcttatatggcttctaaagtctgacattaaacatgtctggtataggcacactgacgcttatctagcggatgaggctgatgcttttgtaagagcttacgtctcattttttgagcgggaagagacccaagacgaatttaagcacgcttgtcaaaaattaagatcggtagtttatcagtctggtagcgatagagagttaattttagttgatgcaactatagctgtagcacttaacaagatacgaaactcctgtttaatttgtttggagaattactctggactttctctggagtcctggactgacgcgcttgaaaaagaaggcttcattaaagagttctggcctgcgcagcatttaataggtgagtcaggggtcttaaaaggagtctcggcagtaattcaaatgcctacaagtgcaggtaaaactaagtcgactgaacttatcattagaagtgcattcgtttcaggcagagcagatacagcgttcgttattgcacctttcagggcgctttgcagagagataacttcaaacttcaaaggggccttcgaaggtgaagacatttctgttaacgagttgcaagatacaacagagctgaatagcgaggaacaggaatttctgaattttttactgggagtgagtcatgctaagtctgtcaaaaatattgtaatcaccacacctgaaaaactagtttataccttgcgtcacgaaccatctctcgcaaagaaaattggcctattggtctttgacgaaggacatcaatttgatacaggcaagcgaggggtgacatatgagttattacttactcatcttaaaacgacggtggccgagaatacgcagaaggtgttgatatccgcagtaatggcaaatgccgagacgataggtgactggctaaatggaggtgaaggagtacacattcaaggtagcagttgcctaccaactcttaagagtgttgcctttgttagctggactgctaaattgggtcagttacactacttaaaccctgacaacaagggggatagtggttattttgttcccagaatgatcaaggaactacctttaaagaacactcctagagagacgaagattagagtttttccggaacgtgcaaaaacatccagtgtttctgcatatcttgggctcagactctgtcaccaaggaccagttgcattattttgtggaacaaggaaaacagtaaactcaatctgcgaaatattaatcgatgcctacaagcgcgaacttaaactttcttttcctaaagatagtagcgatgaagttgagctcgaaaagatagcatttctcgcctcgcttcactttggagaagacgctgttttttcgcgcgccatcaagcttggcatcctcccgcacagctctaacattcctaatggcattcgcgtctctgtagagtgggcaatggagaaaggtagagcctgcttagttgtatgcacctcaacactggcgcaaggagttaatcttccaattaaatatttggtggtttctagtctcaatcaaggagcccaagacataaccactagggattttcagaatttgatcggaagggcaggccgatctggacatcacacagaaggtagtattatttttgccgattccaaaatttatgataaaagatttaattttaaggaaaactggaggtggcatagagccattcaccttctaagttttacgaatgccgaaagttgcttgagtagcctaaagggattgattgccaagtttgattttgactatgcatcgcttaaagacacgtttcagtttatcgagacccctgttgaacatcgcaatagttggattgactggtcaaaaaagaatggcatcgacattatatctttactagatgagatgagcaggaagctagacttaataaactcagtagaaagttttttcttatcttacttgaaggaaaatccagaaacagccgatagaaaaacattggtttcacttatagaagacactcttgcttttcaccttgctagcgacgatgagcaggccgccctaattgaagctttcagaataatatcggatcgggtatttagtgttcctaaagaaaagcactcgtattatggcaggactttattaggggtcgggcagctagttgtcattgagcgatggattgatgagaatttatttgatcttgagctttgcacatctagccaagatatactgaatgcctgctggccactcatagtcaatctttgtgacaagaaactttttaatagcctgacaccgcaaaatctcctcccatcgtttgcgcaatcttggatagaggggaagaaattcgtagacatatttaaagaaatgaaaaaagcggggcttaaataccaagctcctattcttaagatgagtttgacaatggatcacattgttgagtttacaactggtattttggcatatgatgcaatgctgtttgttggtgctattgccgatattttggaaggccgtcaattagatcaagatgccgccacctacactagactcctacaaaaccaattgaaacttggtcttaattcagagcttgaaatatggctacatcgaaaaggctatgttgacagggaagtttgtaaaaccttggcgtcagtgctcctaaaaaaacaaaaatatgaaacagtgtttgaattcagcattctggaagataactttgaacttgttcaggaaacactggtgaaatacccaacttattttctggaggcgtataagcctagacatttaacctaa

SEQ ID NO: 56474 - DNA, 816 bp, Pseudomonas syringae pv. actinidiae ICMP 19095; identical to SEQ ID NO: 56468

SEQ ID NO: 56475 - DNA, 3126 bp, Pseudomonas syringae pv. actinidiae ICMP 19095; identical to SEQ ID NO: 56473

SEQ ID NO: 56476 - DNA, 816 bp, Pseudomonas syringae pv. actinidiae ICMP 18883; identical to SEQ ID NO: 56468

SEQ ID NO: 56477 - DNA, 3126 bp, Pseudomonas syringae pv. actinidiae ICMP 18883; identical to SEQ ID NO: 56469

SEQ ID NO: 56478 - DNA, 816 bp, Pseudomonas syringae pv. actinidiae ICMP 19099; identical to SEQ ID NO: 56468

SEQ ID NO: 56479 - DNA, 3126 bp, Pseudomonas syringae pv. actinidiae ICMP 19099; identical to SEQ ID NO: 56473

SEQ ID NO: 56480 - DNA, 816 bp, Pseudomonas syringae pv. actinidiae ICMP 19100; identical to SEQ ID NO: 56468

SEQ ID NO: 56481 - DNA, 3126 bp, Pseudomonas syringae pv. actinidiae ICMP 19100; identical to SEQ ID NO: 56473

SEQ ID NO: 56482 - DNA, 816 bp, Pseudomonas syringae pv. actinidiae ICMP 18804; identical to SEQ ID NO: 56468

SEQ ID NO: 56483 - DNA, 3126 bp, Pseudomonas syringae pv. actinidiae ICMP 18804; identical to SEQ ID NO: 56473

SEQ ID NO: 56484 - DNA, 816 bp, Pseudomonas syringae pv. actinidiae ICMP 19497; identical to SEQ ID NO: 56468

SEQ ID NO: 56485 - DNA, 3126 bp, Pseudomonas syringae pv. actinidiae ICMP 19497; identical to SEQ ID NO: 56473

SEQ ID NO: 56486 - DNA, 780 bp, Agrobacterium tumefaciens str. Cherry 2E-2-2
atgacgcagttcaatgattggtgtctttcggtggacgagcccgtcggtaaccactttcgtcgtgtgatgaccggacaggccgcgagcctcgccacggggatccaggcgacggcgaccattgtgccggggcactatgcgtcggaagaatcagttgcgcgggcgctcagccgactcggcaagccggctgccgctgcgctcatcgagggcaagcttccaacaacgaagaatatccgttccggcgatctcggcgaaatctatgcgacggaatggatcgacgcacacagcggcggataccgcgcgccgatcaaacgcttgcgctggaaggatcatcggaacatggcgatgcgcggtgatgacgtcatcggcatccttcaagatgccgccaaccagcgcttgctctttctgaagaccgaggcgaagagccgggtggcgctgacgggtcaggttctcaccgaagcccgcgcgggcctggacaaggatggcgggctgccatctgctcacgcgctgtccttcatctcggcacgcctactggaactggacaatctgccgctcgccgatgcgatcgacgatgctctgctcaagcacggcattcccgtgcagaacgtcaagcatctgcttttcacgttttccggcaatgcgccggacgccctgctaaccgcttcgctacaggcctaccccggacctatcaaccaatggggtgtcggccttcgagtggagggacacgccgccttcatcggcgcggtctatgatcgagtgatcgccgatgccaacaacgcctga

SEQ ID NO: 56487 - DNA, 3519 bp, Agrobacterium tumefaciens str. Cherry 2E-2-2
atgccaacaacgcctgaagcaatcgcggccgacattacagaagcggcgaccgccggctttcgcggccgtctcatcgcacgcggtcaggcccgagcgatcatctggcgggacggcgcgcttccgcccgatgcgccgggctttgcgccgcaactcagctacgacttgcattcctatggctatgggctcctcgggctcggccttcgccttcgtgagcttggcggcgatgccgcacaagcacgcattgccttcgaacaggctgctaccgcgctggaggcggtgatcgccaagggagaccgccttgagtccgatcgcgacttccatttcgtcatggcggccgcgagctatcatctcgcccatctctcggcccgcgcctactcgctgctcgcgattgtcgaagccgacgagaatttcgcacctatcgaacgggcactcgccctgctgatgcggcgaaacttcagcacgcttcgcagcagcgtgctcgactatcgggcgtccggcgaaggcagtgatgcccggattactgccggcattcaggccaacctcgaccaggccgaggcggcgggcagccccgcagacggcagcaacgatttcctcttcgacggtctcgacaccgcgctgaccgacgcctttatggcggccatgtcgctgttcctcctcgccttggaacgcggtgagcgaccgctgctcgatcaggcactggagcggctgcgcacgagcctttccatttgcagcgagatgaacatgctgccgcaatggtgggcccatcgcatcgcgctccacctcttgtcggatctctggtcgagcaccttccacgaaaaggtgccgctccaaccagccggcggcgaagcggccgactggcctcgactgcgtgagctgttcatcgccctgcttcaacggcggtcaagagccgaggtggacctgtggccgtcgcagatcgaggcggcgacccgcgcggttgaccagtccgacgatctcatggtttcgctgcccaccagcgcgggcaagacccgcattgccgagctctgcatcctgcgctgcctggccggcggcaagcgggtggtcttcgtcacgccgcttcgcgcgctgtcggcacagacggaaacgaccctgcagaggaccttcggtccgctcgggaagacgatctcggcactctatggcagcatcggggtcagcggcttcgacgaggatgcgatccgcgagcgcgacattgttgttgcaacgcccgagaagctcgacttcgcgctccgcaatgatccgtctcttcttgatgatgttggcctgctggttttcgatgaagggcacatgatcgggctcaacgagcgcgaggtgcgctacgaggttcaaatccagcgcctgctccgccgtcccgacgcgcacacacggcggatcgtgtgcctttcggccattctgcctgacggagaccagctcgatgacttcgccggctggctgcggcgcgatcacccgggtggcgtgatcaagcacgactggcgcccaacccgactacgcttcggtgaggtcgtatggacgtcaccaaacgcgcggttgaatcttcgcgttggcgaagagcgcccgtgggtccagcgcttccttacgggaaagacacccccgagctgggtgccgccgaagcgtaagagaacgaagctcttccccgacgatcagcgcgagctctgcctggcaacagcctggcggctgatcgaggatgggcagaccgtcctgatcttctgcccgctacgcaaaagtgtcgagccattcgccgatgtgatcgttgaccttcatgagcgcggggcgctgcggacgctgctcgaatccgatcccgcggtcctcagcaccgcaatcgcgcttggcgaggaatggctggggccgaacagcgcaatcctgaaatgcctgcgcttgggcgtcgccttacatcacggtgcccttccaaccgcctaccgcaaagaggtcgagcgcttgctgcgcgacggtattctcaaggtgacgatctcatcgccaaccctggcacagggcctcaatctgtcggccacggccgtcatcatgcattcgctccaccgcagtggggagaggatcgacatctccgaattcaagaatgtcatcggccgcgcgggccgcgcttatgtcgacgtagaaggcatggtgctttttccgatgttcgacgatattgcgaagaaacgccgtaactgggaggccctcataggcgatcttggtgcgcgaaacatggaaagcggactggcgcttctcgtctggacacttctgtctcgtatgcacgcgcgggtcggcggcgatctgaatcaggtcgtcgactacgtcgccaacaatgccgccgcctggacctttcccgagattgcaaacgagaagcccgaagaccgcgagcgcgcactcgctgattgggagcggcatgtcgctacgctagacacggccatcctcagcctcatcggcgagaatgatatccctgacgaaggcatcgaggccgcactggatgacatcctgcaatcatctctttggcaccgtcgcttgctgcgtcaaaacgagcaggtgcagcaggttctgagggccggcctcgtgtcccgcagccgccttatctggagccagtcgacggcagcgcgtcgtcgaggctatttcctggcaggggtgggactgacgaccgggcatgcgttggacgccatagccgaaaatgcgaatctcctcctcatccaggccaacgccgggatactggaaggcgatgccgaggcggcaattgcggcgattacgggtttggccgagcgcgtcttcgaattctatcccttcacccctgatccctggccggcgaactggcgcgatattctgcgcgcctggctcctcggccagcctcttgccggcatcgccgccggtcaggagtccgaaacactgcagtttatcgagggaggcctcgtctatcgccttccttgggccatggaggcactgcgcgtgcgggcggccgcgaacggcgatgtggttggcgttttcggtctcgggctcgtagaccatgaggttggcctcgctgttcctgccgtcgagacaggaacgttgaaccgatctgcctccatcctgattcaggccggtttcaactcaaggctagcagctatcaaggccgtcaccgatacgggtgcgatcttccagacgggctcagagcttcgcctgtggctaacctcggaagcagttaccgcgatgagcacgcagccggattggccgacggccgagactaaggcgatgtggacagaattcacccaaagtttcaccccaccggaaaaccggacttgggccgatcggcgatactgggcgaatgtgtcgtggcttggcgtcccgccaccgccgggaacgcccgtccagctccaccattgggccgatcacccgcgggtgctttcggccgatggtgcgccactcggcacggtacaggccgcgctcaatccagctcgagcgggattggtgcgcgcgcaggtggctcaagacgtcaacaggatcgatatcagttaccttggtccggccgacctgtccgctgcatga

SEQ ID NO: 56488 - DNA, 780 bp, Agrobacterium radiobacter DSM 30147
atgacgcagttcaatgattggtgcctttcggtggacgagcccgtcggcaaccacttccgccgggtgatgaccggacaggccgcgggcttggctacggggatccaggcgacggcggccattgtgcccgggcactatgcgtcggaagaatcggttgcgcgggcactcaaccgactcggcaagcctgccgccgcagcgctcatcgaggacaagcttccgacaacgaagaatatccgttccggcgatctcggcgagatctacgcaacggagtggatcgacgcacacagcggcggataccgcgcgccgatcaaacgcttgcgctggaaggatcaccgtaacatggcgatgcgcggtgatgacgtcatcggcatccttcaagatgctgccacagagcgcttgctctttcttaaaaccgaggcgaagagccgcgtggcgctgaccggtcaggttctcaccgacgcgcgcgcgggcctggacaaggatggcgggctgccgtccgctcacgcgctgtccttcatctcggcacgccttctggaactggacaatctgccactcgccgacgcgatcgacgatgcgctgctcaagcacggcattcccgtccagaacgtcaagcacctgcttttcacgttttccggcaatgcgccggacgccctgctaaccgcttcgctccaggcctaccccggacctatcaaccaatggggtgtcggccttcgagttgaggcacacgccgccttcatcggcgcggtctatgatcgagtaatcgccgatgccaacaacgcctga

SEQ ID NO: 56489 - DNA, 3519 bp, Agrobacterium radiobacter DSM 30147
atgccaacaacgcctgaagcaatcgcggccgacattacagaagcggctaccgccggctttcgcggcagtctcatcgcacgcggtcaggcgcgagcgatcatctggcgggacggcgcgcttccgccggacgcaccggcctttgcgtcgcaacttagctacgacttgcattcttatggctatggccttctcgggctcggccttcgccttcgagagcttggcggcgacgccgcacaggcgcgtacggcctttgaacaggctgccacagcactggaggcggtgattgccaaaggcgatcgccttgaggctgatcgcgacttccatttcgtcatggcggcggcgagctatcatctcgcccatctctcggcccgcgcctactcgctgctcgcgatcgtcgaagccgacgagaatttcgcgcctatcgaacgggcacttgccctgctgatgcggcgaaacttcagcacacttcgcatcagcgtgctcgactatcgggcgtccagcgaagggagtgatgcccggattacggccggcattcaggccaagctcgaccaggtcgaggcggcgggcaatcccgcggatggcagcaatgatttcctcttcgatggtctcgacaccgcgctaaccgacgcctttatggcggccatgtccctgttcctcctcgccctggaacgtggtgagcgaccgctgctcgatcaggcgttggagcggctgcgcacgagcctttccatttgcagcgagatgaacatgctgccgcaatggtgggcacatcgcatcgcgctccacctcttgtctgatctctggtcgagcaccttccacgaaaaggtgccgctccaaccagccggcggcgaggcggcagactggcctcgactgcgtgagctgttcatcgccctgctgcaacggcggccaagagccgaggtcgacctgtggccgtcgcagatcgaggcgacgacccgcgcggttgaccagtccgacgatctcgtggtttcgctgcctaccagcgcgggcaagacccgtattgccgaactctgcatcttgcgctgcctggccggcggcaagcgcgtggtcttcgtgacgccgcttcgcgcgctgtcggcacagacggaaacaaccctgcagaggacctttggtccgctcggtaagacgatctcggcactctatggcagcatcggggtcagcggcttcgatgaagacgcgatccgcgaacgtgacatcgtcgtcgcaacgccggagaagctcgacttcgcactccgcaatgatccgtctcttcttgatgatgttggcctgctcgttttcgacgaaggccatatgatcgggctcaacgagcgcgaggtgcgctatgaggttcagatccagcgcctgctccgccgccccgacgcgcacacacggcgtatcgtgtgcctttcggccattctgcctgacggagaccagctcgacgactttgccggctggctgcggcgcgatcatccgggtggcgtcatcaagcacgactggcgtccgacccggctgcgcttcggcgaggtcgtatggacgtcgccaaacgcgcggttgaaccttcgcgttggcgaagagcgcccgtgggtccagcgcttccttacgggaacggcacccccgaactgggtgccgccaaagcgtaagagaacgaagctcttccccgacgatcaacgggagctctgcctggcaacagcctggcggctgatcgaggatgggcaaactgtcctgatcttttgcccgctacgcaaaagcgtcgagccattcgccgacgtgatcgttgatctccatgagcgcggggcgctgcggacgcttctcgaagccgatcccgcgatcctcagcaccgcaatcgcgcttggcgaggaatggctggggccgaacagcgcaatcctgaaatgcctgcgcctgggcgtcgccttgcatcacggtgcccttccgacggcttaccgcaaagaggtggagcgcctgctgcgcgacggtgttctcaaggtgacgatctcctcaccgaccctagcacagggcctcaatctgtcggccacggccgtcatcatgcattcgctccaccgcagtggggagaggatagacatctcggagttcaagaatgtcattggccgcgccggccgcgcttatgtcgacgtcgaaggcatggtgctttttccgatgttcgacgatattgcgaagaaacggcgtaattgggaagccctcatcggcgatcttggcgcgcgaaacatggaaagcggactggcgcttctcgtctggacgctgctgtctcgcatgcacgcgcggatcggcggcgacctgaatcaggtcgtcgactacgtcgctaacaatgccgccgcctggacctttcccgagatcgcaaacgagaagcccgaagaccgcgagcgcgcactcgctgattgggagcggcatgtcgctacgcttgacacggccatcctcagcctcatcggcgaaattgatattcctgacgacggcatcgaggccgcgctggacgacatcctgcaatcatctctttggcaccgtcgcttgctgcggcaaaacgagcaggtgcagcaggttctgaaggccggcctcgtgtcccgaagccgccttatctggagtcagtcgacagcagcgcgtcgtcgaggctacttcctggctggggtcggactgacaaccgggcatgcgttggacgccatagcggaagatgcgaacctcctccttatccaggccaatgcggggatactggaagacgatgccgacgcggcaattgcggcgatcacgggtttggccgagcgcgtcttcgaattttatcccttcacccctgatccctggccggcgaactggcgcgatattctccgcgcctggctcctcggccagcctcttgccggcatcgccgccggtcaggaatccgaaacactgcagttcattgaggggggcctagtctatcgccttccctgggccatggaggcgctgcgcgttcgcgctgccgcgaacggcgatttggttggcgtctttagccttgcgctcgaagaccatgagattggccttgctgttcctgccgtcgagactggaacgttgaatcgatctgcctccatcttgatccaggcgggtttcaactcaaggcttgcggctatcaaagccgtcaccgatactggcgcgatcttccagacgggctcagagcttcgccaatggctgaactcagaagccgtcactgcaatgagcgcccagccggaatggccgacggccgagacgaaggcgatgtggacggaatttacccaaagcttcaccccaccggaaaaccggacttgggccgatcgccgatactgggcaaatgtgtcgtggtttggcgtcccaccaccgccgggaacgccggtccaactccaccattgggccgatcacccacgggtgctctcggccgatggtgcgcagctcggcacggtacaggccgcgctcaatccggctcgagcgggattggtacgcgcccaggtcgctcaagacgtcaacaggatcgatatcagctatcttggaccggccgacctatcagcagcgtga

SEQ ID NO: 56490 - DNA, 780 bp, Agrobacterium tumefaciens GW4; identical to SEQ ID NO: 56488

SEQ ID NO: 56491 - DNA, 3519 bp, Agrobacterium tumefaciens GW4; identical to SEQ ID NO: 56489

SEQ ID NO: 56492 - DNA, 783 bp, Agrobacterium rhizogenes
gtggggctctacgatcgatggtgcgatgccaccagagaaaaggataagcgcaagcgttactgggcctacatcgagaaggatggaggccgagacgatattcgagacgacctcgccgagaccatccgctcgcactacgaccgcctcgaacgcattgccgacgacgtaaagcggctcggctacaatgttgctgccaccatccttagcgaggcaatgcctcaaacgccaaagggccgttctggcgatctcggcgaaattcttgcgacggagttggtggaagaagagatcggcctgcgcgttcctgtacgccgtcttcgctacaaggatggccgcaacatggccatgcgcggcgatgactttataggcgctggttacgacggggctggcgaaaagctctggctcctgaaaggcgaggccaagagcaatgagaggcttgggaaggctaccgtgacgagcgcccgcaaggtgctcgaccgtgacaacgggcgctgtacacccgattctctgctgttcgtcgccaatcgcctgctcgacagcaacgacctggacgacaatgcattgggccgaagcctccgcgacgaggtgggattgaagtctctccgcgccgatcgcatcgaccacatgctcttcactgtctcgggcaatggtccgcacgcttcgctgaaggacgacctccaagctgcgggaaccaaccgagaccactacgtggtgaatattcacgtcgaagatcaccaagacttcatcaaggcgatgtaccaggaggcggaagatcttggagacgattga

SEQ ID NO: 56493 - DNA, 3510 bp, Agrobacterium rhizogenes
ttggagacgattgacgagctgaccacttttctggaagccgcaactgtcgacggcattcttgggcgcctcctctatcgcggcgccgcctggtcactgatgcgcgaggaaggtgtcctgccgcccaatgcgccgccgctcggcgtgacaatcgagaccgatcttgcagagcacgcctttgccctgcttcgaggtgcgatggcgctacgcgctcaagctggcccctcggaattgactagcaaggcgtttgaacgtgccgccaacgccttcgaagccctcatacgcaacggcgatccgggggcggccgatcgcggtttccgccggatgctggctgccgcaacctatcaccttgccggtttctcggccgtcgcctattcgctcttcaacgagaccgcggaggacctcaatgtatcgccgggcgaggcggcgatcaggcacctaatcctgcgcgatctcggcgaaatgcgtgctttcgtccgtgattggctgaatgatgctgcccatggagatgagcagattgccgaggtgcttcgcggcgaagaacccgacatcgatgaggttctgtcgaccatactcaacacgacgatctgtcgcgctctcgcacattttgatttcgcgctcgagacaggtgaacccgagccgatcgaggatgcacgtgcattgctgcggaccgcagtcagtcttgcggacaacgccgagaacgtccccctgtggtggatttcgaacctctgtctccacctgatcgatgacctctggcagcactcgctacaccagaacctaccgaccgagcctccggacggaacggaggaaagatacccggatctgcggcggctgttcatctcgtcgctctacgcccgcaagacatccgaggtggagctatggccatcgcaacgcgaagcggcccggcgttccactgacgttaccgacgatctcgtcgtcgccttaccgactagtgccggcaagacgcgtgttgcggagatcgcagcactgatgaccttgtcgtcggcccgccgggtgctgatcgtcacaccgctgcgcgccctctccgcgcagaccgaacgctctttcagaaagactttcgcgccgctcgggttcagcgtctcttcgctctatggcgcaagcggtgtttccgctggtgacgaggatgccttgcgaacccgcgagatcatcatcgccacgcccgagaagctcgactttgcgctgagaagcgacccttcgctcatcgatgacgtcggcctgatcgtcctggatgaaggacatatgatcggcccgagcgagcgcgaaatccggtacgaaacgttggtacagcgtctgcttcgacgtgcggacgcgggcgaccgccgaattgtatgtctttccgctatattgccgagtggcgacgaactcgacgacttgaccgcgtggatccgctcggacgaaccgggcgggccggttcggtccgactggcgccccacgcgtcagcggttcggcgcactaacctggcgaggtaaggacgcgctgcttcggctagaccttgatgagaacggcccctttctcgacaaatttgttgtcgaaaagcccccactagggagggagaaaaattcttacccccgccagaactcgcatctcactctgtttgcagcgtgggagttcgcaggccaaggcaagcggactttgatcttttccactcaagcgaattgggtcgagagctacggcaaacaggtcgtcgacctctgcaagcgcggctatcttcagtcccttctggaagatgaagggtcgatcgcccgcgccctggagatcggaaaggaatggctcggcgaggaacatcccgcagttgcctgcctgaaagtgggcgttgccattcaccacggtcggcttccaagtccattcctgcgtgagctggaatcgttgctttccgagggaacgctaaaggtgatcatcgcatcaccgacgttgtcgcaaggccttaacctgaacgccgctgtgctactggtgcccacgttgtatcgggcgtcagaaaagatccagggagaggagtttgcgaatgtcgccggccgcgcgggccgcgccttcgtggatgtcgaagggctcattgtccacgtaatgttcgacagggtcgattggcgaaagagggaatggcgaaagctcgttgcttcagccaaagcccgtacgctcaagagcggtctcatccaaatcgtcgccgagattctggagcgactttcgcgggaaggaattctcgatcgcaaagatgcctgggaatatctcgccaacgcccgtgaagcctggagatcgccaggggaggaagcttctttggcagagcgcttggctgcgtcgagacaaaatgatgctgatgtgactgacatcgatagtgacgacgatgatgccgagcaggaggagtctattgaagaagagccgctttctcagatcgtcgaacgtctcgatgcgaccgtatttggcctgatagaagcgcttgactcagatagcgccgacctgccgaaactcctggatgatgctctcaaaggatcgctctgggcccggcagatcgcccgcgaggacgaggacgtcgctccgctccataaaatggtgttggaggcgcgtgccaggctaatctggaagaccacgacggcgcctgcaaggcgtggtcattttgccatgggtgttggactggaggccggtcttgcaatcgatgcaatggctgatgtgctggccgagctccttgaccgggccgatggcgcagcgctggccggcgatattgacgtgcttgtcgatgccctcagcggcctcggtgagcgtctgcttttcatgcggcccttcattccgagcaaggcgaatgcgcttcctgcgaactggacggtgatcctgcgcagttgggtggctggcgaggatgtttccacgataggaccacagaatatgcgcgccgtggaggaggcgttcatctatcgattggtctgggcactcgaggctgtgcgtacccgccgcatgtcgctcgggtggttgccggaaacggtagccgggggcgctgcagcatccgttgaaactggcgttccgcaactcatgatgtcgatgcttatccgcgcgggactcccatcgcggcgcgcggcgatggaggcgatcgaggacgcgaagccggcctttgttagtccggccgagatgcgagcctggctcgaatccgacgagatcaccgcctataccgacgccggcaactggccgactcctgacacggccgctctttgggcgcgttttcgaacggaagcactcagtggcggcatccaaaagtggtcggtcgaacactacagtcgtctgcttgatatcgaggtagccccgcctgcgggcctctatcggatagtcaccgacgagggtgacgggcgaacctggttggccacacctgactatcggcatatcgctgcctttaggaagccagccgtcgatcccaagcccagtcttttttcaggccggttgtcgggggacacgaggctggtggaggccttgcgtatcggtcgaggcaaattacgctggccaaaggcggatacctga

SEQ ID NO: 56494 - DNA, 783 bp, Sinorhizobium fredii USDA 257
gtggggctatacgagcggtggtgtcacgccgccaaggaaaaggacaagcgcaggcatttctggatctatgtcgagaaggatggcggccgcgacgagattcgtgatgacctcgccgagaccattcgttcgcattacgaccgacttgaacggatcgccgaagacgtgaagcggctcgggtacaaggtggccgccaatatcctcagggaggcgatgccccagacgcccaaaggtcgctccggcgatctcggtgagattctcgcgaccgagctggtcgaggaagagatcggcctgcgggtcccggtgcgccgcctccgctacaaggacggccgcaacatggccatgcgcggcgacgacttcatcggcgccggatacgatggggccggcgagaagctctggctcctgaaaggcgaagctaagagcaacaaggtgctcggcaaggccacggtcacgagcgcccgcaaggtgcttaaccgcgacaacggccgctgcacgcccgattccctgctgtttgtcgccaaccgcctgctggagagcaacgatccagatgacaacgcgctaggccgcagcctccgtgacgaggtgggcctgaagtcccttcgctccgatcgcatcgaccacatgctcttcaccgtgtcgggtaacggcccccacgcgtcgttgaaggaggacttcgacgccacgggaaccaaccgggaccactacgtcgtgaacatacacgtcgaagaccatcaagacttcatcgcggccatgtataaggaggctgaagaccttggagacgattga

SEQ ID NO: 56495 - DNA, 3504 bp, Sinorhizobium fredii USDA 257
ttggagacgattgacgaactgaccgcgttcctggcgaccgcgaccgtcgacggcgtccttgggcgcctgctctatcgcggtgcggcgtggtcgctgatgcgcgagaagggcgtgctcccaccgaacgcaccgccccttggcgccacaatcgaaaccgatctcgctgaacacggcttcgccctgcttcggggcgcgatggctctgcgttctcaggccgattcgtcggaattgaccagcaaggccttcgagcgcgccgccaatgccttcgaagccctggtgcgcaacggcgatccggagtcacccgatcgcggtttccgtcgcaccatcgccgcggcggcctatcacctggccgggttctctgcggtcgcttactccctcttcaacgagaccacggacgacctcaacacctcgccgggtgaaacggcgattcgacacctgatcttgcgcgatctgggtcagctgcgcggcttcgttcgcggatggttggatgacgaggctcacggcgatgagcagatcgccgaggcgctgcgggatgaagaaccggacgtcgacgaggtgctgtcgacgatcctcaacacaacgatctgccgagctttggcgcattttgacttcgcactcgagacgggcgagcctgagccgatcgaaagcgcccggaccttgctccgcaccgcggtcagccttgcggacaacgccgagaacgttccgctgtggtggatctcgaacctctgtcgccacctgatcgacgacctctggcagcattcactgcaccagaacctgccaaccgaaccgccagagggtacagaggaaaaatatccggacctgcgccggctgttcatctcgtcgctctacgcgcgcaagacatccgaggtggagctatggccatcgcagcgcgaagcggcccgacgttccacggatgtcaccgacgatttggtcgtcgccttgccgaccagcgcgggcaagacccgggtggccgagattgccgcgcttatgaccctgtcgtcggcgcgccgggtgctgatcgtcacgccattgcgcgctttgtcggcccagaccgagcgctccttcagaaagaccttcgcgcccctcggcttcagcgtctcctccctttacggcgccagcggactttcggtcggtgatgaagacgccctgcgcacccgcgagatcatcattgcaacgcccgagaagctcgacttcgcgctgagaagcgacccgtcgctgatcgacgacgtcggtctgatcgtcctcgacgaaggtcacatgatcggcccgagcgagcgtgaaatccgctacgagacgctggtgcagcgcctgcttcggcgggcggatgcagcagaccgccggattgtttgtctctccgccatcctgccgagcggtgacgaattggacgatctcaccgcctggatacgctccgacgaaccgggtaagccggtgcgttccgactggcgtcccacacgacagcggttcggcgcgctcacatggcgaggcaaggacgcactgctccggctcgacctcgacgatgatggtccctttctcgacaaatttgtcgtggagaaaccagcacgaggaaaggagaaaaagccctatccgcgcaagaattcgcacctcgccctgttcgcggcatgggaatttgcaagccagggcaagcggaccctgatcttctccacccaggcgaattgggtcgagagctacggcaaacaggccatggatctctgcaagcgcggctatctgcattccctgttggaggacgaagcgtcgatcgcccgggccttggaggtcggcaaagaatggctgggcgaagaccatcccgccgtcgcctgcctcaagcagggcgtcgccatccaccacggccggctgccaagtccattcttgcgcgagttggaagtcctgctgtccgagggggtactgaaggtcatcgtcgcttcgccgacgctctcgcagggcctcaatctcaacgccgccgtactgttggtgcccgcactgtatcgcgcctccgagaagatcaaaggcgaggagttcgcgaatgtcgcgggccgcgccgggcgtgccttcgtcgacgtcgaggggctgatcgttcatgtcatgttcgacaaaatcgactggcgaaaaagggaatggcgaaagctggtcgcctccgccaaggcccgcacactgaaaagcggtctcatccagatcgtcgccgagatcctcgaacgcctgtcccgcgagggtgtcctggatcgtgacgacgcctgggaatatctcgccaacgcccgcgaagcctggagatcgcccgaggaagaagctgcggtcgcagagcgcttggccgccgccgtggagtatgaggccaatggcgacgacgatgaagagggcggcgatgacgaggaagaaaccatcgacgaggagccgctctcgcagatcgtcgaacgcctcgacgcgaccgtgttcggcctgatcgaagcgctggacgccgatcgcgcggatctgccgaagctcttggacgaggcgcttaaggggtccctctgggcccgccagatcgcccgcgaggacgaggacatcgcccctttgcacaagaaggtgtttgaggcacgcgccgacctcatctggaaaagcaccacggcacagacgcgacgcggacatttcgccatgggcgttgggcttgaagccggtctctcaatcgacgcgatggctgatgaactggctacactgctcgatcgggcagacgaggcggcgctgagaggcgacatcgacgaactcgtcgacgccctctgcggtctcggcgaacggctgctgttcatgcggcccttcatccccgacaaggccaatgcgctaccggcgaattggaaggccatcctgcatagttgggtgtcaggcgaggacgttgccaaaatcggacctcagaacatgcgcgcagtcgaagaggccttcacctatcgcctggtctgggcgctggaagccgtgcgcacccgccgcatgtccctcggctggtcgccagagacggttgccggcggcggcgccgcggcggttgaaaccggcgtcccgcaattcatgatggcgatgctgatccgtgcgggccttccatcacggcgtgcggctatggcggcgatcaaagatgcccaacctgtcttcgtcacacccgctgagatgcgggtctggctggaatccgacgagatcacggcctacaccgacgctggcgactggccgacacctgataccgccgcattatgggcgcgcttccgaacggaagcactcagcggcggcatccagaagtggtcagttgaaaactataaacgcctgctcgacatcgcggccgctcctcctgccggcctctatcggatcgtcaccgacgaaggtgatgggcgcacctggctggcgacgccagactaccaacggcttgccccgttcaaaaagtcggctgtcgatcccaagcccagcctcttctggggtcggttgccgggcaacaccaggcttgtggaagccttacgcgtcggccgtggtaagctgcgctggccgccggcgaatgagtaa

SEQ ID NO: 56496 - DNA, 783 bp, Sinorhizobium fredii HH103; identical to SEQ ID NO: 56494

SEQ ID NO: 56497 - DNA, 3504 bp, Sinorhizobium fredii HH103; identical to SEQ ID NO: 56495

SEQ ID NO: 56498 - DNA, 777 bp, Neorhizobium galegae bv. orientalis
atgccgctcttcgatgattggtgtgaaagtgaccatcaagaagatggcggcaaacatcttcgcaagtttacggaacgtgctgatggacgggccgccgtcagagatcgatttccaaatcttctccgctcgcattacgatgacatgacccgcatcgcggacgacatcaaggagctgggctttcctggcgccgctgctttgctggcagaaaggcttccccgatcccctcgcgcacggtcaggcgaactcggtgagatcttggcgacggagctggtcgaggagcagctcggattctctgttcccattcgacggctccgatacaaagatggtcgcgagatggcgttgcgtggagacgacttcattggtgtgcgagttgacgctaccggtcaactcttcctgctgaagggcgaggctaagagccgggccaacctcgccggcgcgactatatccgaggctcgttcggcgttgtcgcgggacaacgggcgtccgactgcgacttcgttactcttcattgcggaccggctgatggagcgtgaggatgacggtgctgccctggggcgaacgatacgcaatgaagttgccaaccgtgccgtgccggccgctcatatcgaccacgccctcttcgcgatgtcgggaaatgccgcgcctcaggcgctcatcgatgatcttcgggcggccgggccggaacggacccatactgtcgttcatcttcggatagctgaccatcaggacttcataaagctatcttatgaaggagcgctcgcccttggagacaattga

SEQ ID NO: 56499 - DNA, 3402 bp, Neorhizobium galegae bv. orientalis
ttggagacaattgatgagctgacggtcttcgtgacccagacggcggcggacggcgccaggggccggctgcaggcgcgcggcgaagcgcgtgcaattatccgccgagacggagtgcttcccgacgacgcgcccgcgttcggcaacaccattgacacggatctggcggaatatgctttgtcgctactgcgcgcatcaatggcgcttcgcgaggcgcaaggcgaccccgagatttggcgtaagggctttgcacgcgcggggaacgcgttcgaggcgcttgtgcagaacggcgcgccggaggacgtcactcgcggtttttatcggattgcgggcgcggcctcttatcatcttgccagctattcagcattggctttctcgctcattgcacagcgatctgaccataccaactttgccccgcccgaagaggcattggcgtttctcatcctgcgtgatctgaacacgctgggcatgcgtgcaagagcttggcttctcgacccggcacacagcgacggtaacatcacgcgatcagcagcggagggtgaactcgacccggacgatgtggtgaggcttgttgtcaccacgacaattttccgctcgctcgcgtttttcgagtttgctcttcagacaggtgtcgcagcacttgttgaagaggcgagattgttgctgcgaagggcaatttctctggcaaaacatgccaatgcagtgagcttatggtggatcgcccgaatcgcccttaacctaatcgatgacctttgggccagcagcttgcatcaggtgctgcccgtcgatgggccggctggcgccgaaggatatcaagctctgcggaaactctttattggagaactctattcgcggcgcgctgcggaggtcgagctttggccctcgcaacgcgaggccgcccaccgcgcgacggatctcactgacgatctcgtcgttgctctcccaacgagcgccggtaagacccgtatcgctgagatcgccgcgctaatggcgctggcatccggccgtcgcgttttgatcgtgacgccattacgcgccctttcagcgcaaacggagcgttcctttcgcaagacattctccagtctcggcttcacggtatcgtcgctctatggcgccagcggcgtcgcgatcggcgatgaggacgcccttcggtcgcaggacatcgtgattgcgacgccagagaaactcgacttcgcgctgcgcaacgatccaaccataattgatgatgttgggctcgtcgttcttgatgagggccaccttataggtccgagcgaacgtgagattcgctacgagagcttggttcaacgactgctccgacgtccggacaatgcaggccggcgcatcgtatgcctctcggcgattcttccggagggagaccaactcaacgatcttaccgcctggatacgcagcgacgcgcccggtgcgccgctacagtccggttggcggccgacccgccaacgttttggaactctctcgtggcaaggcaattccggccggctcagtttcgatctcgaggcgggcggcccctatatcaggcacttcattcccgaacaggcggcaatccgcccacgacggacgcggtttcccagagacaacaaagaacttagcctcgctgcagcatggactttttcggctcaggggaaacgagcgctgattttctgtacgcaacgcgatcacgtcgaaggctacgcggaaactatcgtcgacttgaataggcgcggatatttgccgtcgctgcttgaggacgcggcgttggtagaacgtgcgctggctgtcggtcgggaatggttgggaccaaaccatccggcggtgcaatgtttgccgatcggtgtggccatccaccacggccgcttgccaggccccttcctccgtgaggtcgaagcattgctttccgtcggggtccttcgcgtaaccgtcgcctcgccgactctcgcgcaggggctcaatctcaatgccgccgtccttcttatcccgacgctctatcgggctggtgttccactttccggcgaagaattcgccaacgtggcgggccgcgccggccgcgctttcgtcgatctggaagggctcgttctccatgtaatgcaccagcccgagaactggaggctccgcgcctggcgcgatctggtcgggtcctcaagagctcggtctctgaccagtggaatcatatcgatcatcagcgaggtcataacgcgtctcgctcggacgaacgttttcctgcgggccgacgccatggaatatctcgccaacgcgcaggaggcgtggtttccgcaagatcaggcgggggacacggatacaatcgagagcctgattgagcgactggatgccaccgtttttggtttgatcgaagctctcgataccgacagcgcggatttgccgcgcctgctggacgaggcgctgaccggctctctatgggcaaggcagatcgtgcggcttggcgcacaggtgcgctctaaccaactctgggtcctttgggcgcgagccagcctcatctggaataaatcgagcgcaacccagcggcgggcaacattcgcaatgggggtcggactggaggcgggtctagctatcgacgctgtagcggaggatctcaccgccttgttggatcaagctgatgccgccgctttggccggaaaccaacccgttctcagcacggcacttgttggtatggcggagcgtctgtttgcaatccggccattcgtgccggatgcagatctccccggcaactggcgcgacttgctcaccgcgtggcttgctggaaccgacgtcatcgctcttgggttggacaacatgcgggttgtggaggacgcatttgtctatcggcttgtatgggcaatcgaagccgtccggatgcggcgccgcgccaatggtggggagtccgaggttatcgaaggtagcgcggctgcgacgatcgaggcgggcgtgccgcagacgatgatggctatgcttgtgagagcaggcctgccctcgcgcgtcgccgccatgaccgcaatccgcgagacacagcccgcgttcgcaacccgagctgaaatgaaccaatggctgaattcaaatgagatcgcagcattgagcgaccaaccggactggccgaccgccgatacggcctcgatctggaagcagttcaggagtgagacattatccgggcccatactgaaatggaatgcgcaggagtggaacatgcaggggcccgttccagcattcgtaggccccgcgatccctgggcgcatcagcatcgacgcggccaatggcgcggtctcggtaacgacaccagatttcaaacgcgttaccggaattcaacatcgcctgagacaactctctcctagcctattgcacgtcgaatacgcggctgatggacagaactcccgtattgttagactgggccgaagcgacgcccgttgggaaatgccgtga

SEQ ID NO: 56500 - DNA, 792 bp, Neisseria mucosa ATCC 25996
atgaagtggttgatcaagagtaaccaacaattaaaaacatcagatggaaaatctgttgatatttttgaatttcgtcatgttaaggatgagcaaatactttctgcatgggcaaaacattttagaaatcattattgtttggattcacaaattgattctctgcgttgtgggacagaatattctcgagcagagtatcttaataagataaagtttccagataaatcaattgccccaggtccaagtataagagcaggtgattttgctgagattttagcagcagattatcttgaatatatcttaaaacattgggttcctagagtgagatattcgcataaaacagttagcaatgaatccacaaaaggctctgatactattggttttatgttttcttctgatggaaataattctaaagatactttaactattatcgaatcaaaagctaaatatactggtaatcatgaaaatcgactacagacagcaatagatcattcaagtaaagatattatacgcaaggcagaaactcttaatgctataaaacaaaaatttcttgacaaagaagatatttataattcacaacgtatcgaacgttttcaaaatgaagctgataatccatatattcaaaattttgtagcaatagctcatttagataatagtaattttacagaagatgtaattacctctgccaattcatcatcacattctcatacagatcaactttttttaattgtaataaaaggtgatgaaatgatgaaattagttcatgaattatatgaaagagctgcaaatgaagcctga

SEQ ID NO: 56501 - DNA, 3171 bp, Neisseria mucosa ATCC 25996
atgaaagagctgcaaatgaagcctgaaaataaatcctataatttgctcaatgttactcgagcaaaagccaaaatgtttgaataccacgtacctgaaagtgaccatatcaaaattcctgaagatccagctaagttacttactatatcaataggtctattaggagattttgcagcttctgttaatcgtggagaatcaggagatgaatactttgttgagctgaaaaaaaacttactcttctctgcgcatttttttgatgcatatcatcaatctagattagatggaactcttgatccttatttaatgcttcttggatcagcatcttattatttgtgtgatttgcaaggagcctcatcagttttaatgcaaaaattaaaacaaaggatagatgattctaaagtagaaggcctatattgtcctaatttagaaggcgcaggattggagttcttattattatggatacttgaatcaaaatttgatcattattttgagaagattgattctgtatttggtcaatttatagaaggaatatctaaagatttttgtagctttttttcatcagggaatgacgaaaaattaaaaagtcaactaaatgaattaagaaaatatatttattcagttggatcaccaagacaaattcttttgggggacttaatttgctctatcgggtataaaaagattcaaaattccacatggatgtgcttgccaaaatatagcggattatctaagcgggaatggataaatacattaaaaaagaaaaattttattaaagagttttggccagcccaacaccttcttggaaaagcagatatattgaagggcgaatcagcaattgttcaaatgccaaccagtgcaggtaaaacaaaatcaacagagttaattattagaagtgcttttttatctgggcgtgcaactttagctgttatagttgcaccatttagagctttatgtaatgagataaaaaatactctagccgatgctttctataatgaaccaataaaaatagatgaattatcagatacattacagatcgattttgaattttctaacctatttggtcatcagcaaatcttaattttaacaccagaaaaactattttatattctaaaacattccgttgatctagctacaaaaattgatttattgattcttgacgaaggacatcaattcgacagtggagttcgaggcattacctatgaacttcttttaacttcactaaatttgaaaattcctcaaaaagctcaaaaaattcttatttctgcggtaataagtaatgctgaaaatattggagaatggctaaatggagaatctaacgttgttgatggtgaagcattaatccccacatttaaatctattgcttttgctagttggtcagatcaactaggacgtatcgaatatgttaatactgataatatcgatcgcaatgaattttttgttccaagagtaattgaaaaaattgagttgaataaaaaaggaaaagaaagaaaaaaacgttattttcctgagaaaggaaaaggaagtggccaatctattgctctttatcttggtttaaaactgatttcaaatggaagtattgctattttttgtggtagtaagctagcagctgtcagtatttgtgaaaaagctatagatattattaagcgcaatgtccctttaaacctacctgaaacatactcggatagccaagaagttatacgcctaagaaatttgcatattttaaatctaggtgaagattcatccgcctcaatatgttcaaaatatggtattttttctcatcatggaaatgttccacatggaattcgccttgccatagaacatgcaatgcgtgagaaccttattcgatttgtagtttgtacatctacattagctcaaggggtaaatctacccattcgctatttaattgtaactagtatttatcaagctggggagcgtataaaagttcgtgacttccataatcttattggacgtgcaggtcgttccggcatgcatacagagggaagcattttatttgtagatccagaggtttatgacagtagaaatatttttatagagaaatggcgttggaaacagataaaggaacttcttaatcctaataattcagagccttgtattagtaatctattatcaatatttgatcctatcaaaagtgatgatggtaaatattatattgatattaagatattagattttgtcgcagcatatattgatagttctaatgatattcataaatggatagatgaaatagtacaaaaacatcatgataagaatttttcacatgatggtgttacacaacaaatattttggaaaattaatctaatatgttcactcgagaattttttactatcttttgaaagtaatgaagaggagcttacagagctcaatgcaattgctctagcagaaggcacattagcattttacttagcagatgaggaaaagaaagaacagttgcgtttattatttaaaatcttagtagataacattgttactaacatgaaagactcgaatattcgaatagtttatggaaaaacattttatggaattcgtgattctcaagccattttaaaatggctgagtgaatactcagataaaattgtaatggctaagaataataatgaaattatagaatctttatgggaaatgatgaaaaattatattcataataattcatttaataaatttaatcagaaggatatcttgtgcgaaatggtaaaaaaatggatttctggatgttcttttagtgagatttatcaattttcaaaaatcaaaggctgtcagcttagagctggaacacaactaagaaaaataaaaattgaaaatattgttgatatttttgaaggagggattgcttatgattctgctttatttgttagtacattagctgaatttactaatttacttgaacaaaatgacaaatttaaattatttaataaactacagatttttcagaaacatttaaaatatggattaccctcagagactgctattactctttatgaaatggggtttgcagatcgtgttattgcacaagatttagcatcatctttaggattaatgtcaattgaaaaacaagaaataattgaagagttaaagaaaaataaagaaaaatcccaagaagtaatggccaaatatccaagttacttccaaaatgaaatgctaagaatattagataattag

SEQ ID NO: 56502 - DNA, 795 bp, Alcaligenes faecalis
atggatgagctagggttcgacttcgaagatgccatcgcctggtttccacaaggtcaggatcatccctatgtcctaatacgaatcagcgcccaccatgtcgctgagctatcagccgcaatgggcgtcccactacgacgctgctacatcacagatgcagcactccaacaggcgatggcacagcacaacctgccgccggttgatatcgtgcgtgccatgctcccggacgccggcgctgtcatgtctggcgactttggcgaggttctgacgtatttttatcaggccgctgccgagctccctgccaatgccattggaccgaagaaatggcggctgaagcaagaccggaccaaacccgcaccgaaatcagatgtagtccacttcgttatgccaaatcgtcctcacgccagtgctgaggactccatactgtgcgccgaagtaaaggccaaagcgactgctggcaactcaacaccgattgccgatgcgatcacggattgcaaaaaagacagaactagtcgcttggcaagcactttagtctggctgcgcgagcgggctatgaccactgatctaggggatgtggacatacctctactaaatcgcttcatcgacgcggtagacagtccgcctgcggcaaagcgtttccgtgcggtggcagttatctgcaatgaccttcttgataatgaacttgcttcagcacctgacaacactgatccggagttcactttggttgtaatcggtgtacccgaactgcgcacaacctatacggcggtatacaccgcagccatcaattcggtagtttga

SEQ ID NO: 56503 - DNA, 2976 bp, Alcaligenes faecalis
atgcgtgcatcattgcaaaactggatcaataacgccgacaatttcagacacctgcgacattttaatgttgtgcagttgccggtcgatctggctcatataggaaaccgcctggatgattactacatttcgttggtcggcgagctgttcaataaccttcgtgggctaaacgtcccaagtacggattgggcgcagctgggcaatgcctttcttcagttttcgattgaaaccactgatgcacagctaagggagcgagggatatcgaaagacgatgccgcactgtttgcagcggcatccttttactttggcgatttcccagcttcagcatgcttggccatgcggcagtcctctcgacctgccgatcctgcaactctgagagcagcatgctttgactttttggcccggcccgcaaacttgcagtcggaattggtacggacgctgcaaaacgaactgaaggacggggcagtcgctcagattgcagtacgcgttgaagagtcacaagaggcagtccgagaagcgctggaagatgggccagaagcttggatcgtggcaacactaatgagtcgtcttctagcacgcttcagccaaaccaacctcagggcagtgcttccttatggagcacatccattttggacgccattgattcgatcccttgtagatcgccagccttctacttgggaatttttcccatctcagattcaagcgatccaaggcggccttctggaaaatgcagacagctatgccatgcagatgccgaccggagcgggaaaaaccacgctgtgcgaaacgctgctcttctcccatctatccgcgcgtcctcaagacgctgccatcttgcttgtgccattccgctccttggcttcggaactgcgcggaaccctagttcgccgactcaacgcaatgggattaccagcgcgatgtgcgtatggaggcaccgtccctactggcgaagagatccatggcctggaccagattcgagccattgttgcaacacctgagtcgctttcgggaatcctcagtgccgatccgaccttttcgcagcgaatttcgctagtgatctgcgatgaaggccatttgctagacagcggtggccgaggcattggtctggaattactgttggcacgaatgagatcccgcccagacctaccgcctcgggttgtcttcgtatcggccatcgtgcccaacatcgaagaaatcaacgcgtggctgggcgggcatgacaacacggttatccgcagcacctatcgccccgcgaccgccgagttcgcagtgttgcgaccgacggggagcggtgcagggatgtctattcacttggacatgcatccacacgaagtcgtggaacggaaattcaccatagagagactcttaagtagcgacaactttcgctatgtaaatccagccacagggcgctcaaaaacctattcgttcacatcaatcaaagcccaagccgtggcaacagccagaaaagtcatgcctatgggcatgactgcgattttcgccgccaataaacgtggcgcccaaggagcggttggcctcgccgaagaactcgtgaaacagttgtcacttcctttgactcttcccactccgctcgactttgctcgaaatgataacctgcaacgcagtatcacctatctggaaggcgagtacggaaacgcctggattggctcccaatccgtgcgtcatggtgcggtgctccatcatggcgacattcctcaggaaacgcgggaggtgctggaaagtctcattcgtgaaggggatgtacgtttggtcatttgcaccagcacgttagccgagggggtcaatcttccgattcgcagtcttgtcctttactcggtacagcgtcgaaacatgagcggccccccggaggccatgctcgcacgtgacattaaaaatctggttggtcgcgcaggacgggctggagctaacaccaaggggcttgtgatttgcgccaaccccgatcaatggcatctggtgcagccagtggcgactcaaggtgccggcgagccggtacgtggctctctacgcagccttatccagcaattgagctccgctctcacacagcaaggattagcactcaacaatgaaatactagagggaaattcccccattcaccctctagtcgatggtgtggattccacccttatcgacttgatttccgaagaagtgggggaagaagcatttgtagcgcacgcccggcaactcgccgagcaaactttcgccgctcggcagcttccgcaaggacaggttaatctgttgcgcaacgttttcgaactgcgcgctcgtcggcttattgctttgcgccagacagggcagctctcctgggtccgtgatacaggggccaaggttcggcttctggactcagtagaacggatcctgctgccggcacgtgaacactggcaggattcgattgaccctttggacaatgaattgcgcacagccattcttgagtgggcatggacgcaccgcgagcttcaaaacgatatcgtgcagacctttcgcccgacagggggcgacccggagttagttaaagatgcattctttgaactcgtccggcgctggatggcaggcgtgtcctttgtagacttggctcagcagttgctgctgagcatggatgatctgctcgctatccatactcgggtgattacgttcaccctccaatcgctcgtagaccaaggccttagcctgcttacacgtcgtctacaggccgacggtattgagattgcagttggtgtcacgaacttcggtgaacagctccgcttcggtgcccccaatctagcggcacgtgtgctagcgtcgtctggggtccgacatcgaaaggcctatgtggcgctgggcaacgcaataacccagcaagatcctattctgaatgtcgctacgatcaagagccaagccctggaagggctgcgccagcatgcacccggttggcaagcacaactaggcgatctggtttatgccaacacttttaaggatctatcctaa

SEQ ID NO: 56504 - DNA, 810 bp, Enterobacter aerogenes
atgccatggactaatgagcatattcagtggctccaggatactggaaatgtcctgacgttagcatgtggtagggaagcaaaagttttctgctttcgtcatgatattaatgatcaagcaaaaatgactgcatgggccaaacattttagaaaccattattgtaatgataatcagattgatttgattaaagcccctgggcaaacaagatcagattatttacttacgatgaagttcccaaatgctactacagcacctgggccaagtattcgagcaggtgattttgcagaaatattaattgctgattatttgacatatttacggaattatcttgtacctagaactcgttatgatcgtaaaggtgtacctaatgaatctaccaaaggttctgatgtattggcttttaaacaagtacaggctaatccaagggatgatgaattattagtttatgaagtcaaagcaaaattaagtgccggcacaaaatcaatgcttcaagaggctatagatcactctgctaaagatcatttacgtttggctgaatctctgaatgggataaaacagcgtatgattgatcgtaatgaactagggagcgtgggagtaataaatagatttcaagactcggttaatcaaccctacaaattgagatttggtgcagctgcagtatgttctgatagcgcttatgacgctgcaatacttgctggtgccaattctgaagcgcatccttttaatcaagatctagaacttttagcaatccatgggagcgaactgatggaacttgctcatgcattatacgagagagcagctaatgagatttga

SEQ ID NO: 56505 - DNA, 3114 bp, Enterobacter aerogenes
atgagatttgagaatcaatcagcaaagctactttcgattactaaatcaaaagctaagatgtatgaatttgggttggatgaagtgcaccatattcgtttaactgaatcgccaagtaatttattattaatgactattggcatattgggtgatgtgtgtcgtgaagagttatcagttgaaaggaatcatgttcttttcgagcaaaggaaactagagttaagaaatgtagcaagatattttgatgctttaatgggttcaaggcaagaaataacatatgattattatctttgcttattaggagcagcctcatattatcttgctgatatgccgggtagtgcaattgttctatctaataagctagaaaatttaaataatggtttaacggaatctcgtatagaattacttttggagtggttgttaaaatcgaaatataatgagccgatgacatttgataatgaaaaacaaatttccaaattaatttgttcattaacaagtatggtttgtgttttctttaatgaaaatattgatgtaactactgatgtgttagaagtgacaaaatcgttgagagatttttgtcatgaaagaggaagtgatagagagttattgttagccgatatcgtcgcctcggttattaaacataaaataaataactcttcatttaatttactcccgcaatatacaggattatctattgaagcatggaaacctgccttatcaaagccaacatttatcagggagttttggccggcccaaaagctactcggtgatgctggagtatttagtgggacttccgcagtaattcagctgcctacaagtgccgggaaaacaaagtcagccgagctgattatacgctccgcttttttatctggcagggcttctgtagcggtgattatagctccttttcgttctttatgtcgggaaataagtacttctttagccgcagcatttggtaatgaagacgtcaaaattaatcaactcaatgatattccacaaatagatgaatttgacgatgcattatttgcagaaataattgaaatagaagaaagtgatgttataccccttacagtaattgtagcgactcctgaaaaactaatctatttattgcgccacaaaccagagttatcggaaagtatatcactcgtaatttatgatgaaggacatcaatttgatactggatcgcgtggagttacatatgagttactcctaaccagcttgaaacgcgaacttgaaaaaaacactcagcatgttttaatctctgccgttttatcaaatgcagaatcgattggaaattggttatatgacggtgagggaaaggtagtcaacggagcagaatgtttatctactgaacgtagtatagcattttcaagttggaaaaggggtatgggacaatttcattatatagatcctttcgatattaatacagaagagtttttcgtgcctagagtaatggaatcattagaaattcctaggcaaggaagagagactgcagaaagattctttcctccacgtgacgataaatcattaattgctgcgtacttgggtatcaagctctgtgaacatggtccggtagctgtattctgtggacaaaaaagctccgtcataaaaatttgccgagaagttatcaaaccattagagcgtattgactcgctcaatgctcctatagttcatagcgatcaggatgagataaaaaaaataggtaaattatccgaagtccatttaggaagtagttcagttattacgaaagccattaaaagagggattcttccccacagtgcgaacattccaaatggtttgcgaatatcggttgaatatgccatggagaatggattagggcgttgtgtggtatgcacatctacattagctcaaggtgtcaatcttcctattaaatatttagttgtatcaggtgtgtttcaaggtgaaaaacaaatttcaacacgtgatttccataatcttttaggacgggctggcagggctgggaaacatacagaagggagtattatattcgctgatacggaattatttgatcaacgatatacaagtaaaaggtggcagtggtcccagatgagtaatttattagacccttctaagtctgaggagtgtttaagtagtcttttaactctagtaaagcctttttacgaagatccttttgccattgatcctatagattttctacaatccccagaaacttatcaacaatccgttattagaaatggtcatctacaacaaatcgatgttaaggatcttttgaagcaaatgagccagagagttaactatctagaaagtcttgaaagttttctgctagctaatgttaatagagatgaaatgcttgaagatcaagcattagtggaagtgtataaaaagacttttgcattctctctagctaatgataatgagaaacaaaaactcgcagaagtgttcacagttgttgccgaaaaggttaagcaaattgatgaagaaaaacgttcttactatggtagagcattactgggtattcacgagttagaatatatcgaaaattggattaaaacaaatgtcgagttactatctactgtgcaaaatgtagctggcatgataactgtattgtggccaatgattgaaagcctagcgacagataatagtttaggtaaattgataggagaaggagcaggtttaagaattgcaaatctttggtgttctgagatttcatacaatgagatcttatcacaagctaaccgtaataactttaaatttagagctggtagccaagaacgtaatttgaaaatagaaaatatcattgatatttgcgatagtagcttgggctatgatgcgatgctagttgtaggagcgtgtgctgatttattagagaatatgtttagagacaagccagaaatagtaatggttagacaattacaaatggctttacgtattggattatcagatggtttatcattgggtctttatggtattggattgacggatagagcagtagcatcaggtgtagcgaaggtacttagagactctggtttagatatagattcatatagtaaggagatggctttctcacatcgacacattattatgcctgagctgatcaagtatccaaccgttttcacagcttcgctctatggcggagaataa

SEQ ID NO: 56506 - DNA, 849 bp, Enterobacter cloacae S611
atgccatggagttctgaacatctaaaatggttttctgataatggagaaagactaacgacctctgatggcaaggagatcgaagtgtgggagtttaatcatgctcaggatgatgttgtgctcagcgcatgggcgagacattttagaaaccattattgtttagatacagacatagactttctacgaggaaaactagctaggaaagattatctcaacaatattaaatttccctctgagacctcaaagcttggaccaggtatcagagccggagactttggtgaaatactagtttgtgactatttacaatggttacttgattgctgggtgcctagagttcgttggtcttcaaaagtagttcgagacgaatcaccaaagggtagtgatgttgttggttttcgttttcaccataaaaatggtgaatcttctattgaagatgtaatgtttgtttttgaatcgaagacgaagttctctgcctctactgttaaccgactacaaaacgctatcaatgattcagctaaagaccatattagaattgatgaatcactcaattttataaaacaaaagttatatgaatatcgagaaataaaccaagcaaaaaaaatagaaagatttcagaatccagttgatataccatttaaagaaacttatggtgccgcagcgataatttcttcagatttttttgatgttgaagagttaacttcttctgattgcaacaaaattcctacaacagccaagtcgaaagaatacaccccccatccaaatcacggaaatcttaaacttttggtcattagaggggctaatatgatgcagctggtacatgaactctataggagggctgctgatgaggcctga

SEQ ID NO: 56507 - DNA, 3123 bp, Enterobacter cloacae S611
atgaggcctgaacggaaatccttacagttacttggtattacacgttcaaaaggaaaaatgtacgaatatggaatttctgaagaacatcatattcaaatttctcaagatccagctaaattgtttacaatatctataggaatattaggtgatcttgccgcagcaataaataggggccaaacagaacctggtttattatcagagctaagaagaaatttgcttttttctgcccattttttcgactcatacatccaatctagattaggtgaggaactggattcatatttattacttcttggtgcatcctcttattatctgtgtgacctaccgggaagctcttccgtattagcaaataaaatagatgctgattttcctgacttaaatgctgatgggcttgaaaatattattctatggatgcttcgaggtgatgcgttagtgtattttggtggtgctgagggacagattggaaactatattgattccgtatttgatttgttggttttatttataaataatggtgataatgaaaaagaacttataaataaagctatcgagcttagagaggctgcttacaaattcggaactccccgtcagcttttacttggcgatatagctgtagccttagttagaaagaaaattgaaaactcctgttggaatgctctgcctatttactctggactttcaaaaaatagttggagtaaatccattaaaaaagaatcattcataaaagaattatggccagcacaacatcttttaggaaaggctgatgttttcaaaggcaaatcagccattgttcaaatgcctactagtgcaggaaaaactaaggctatagaaatcgtactaagaagcgcctttatttcagagcgcgtgttactggctataatcatcgctccatttagagccctatgccatgagattaaaaatagtcttgtggaagcattctacgatgaaccaattctggtggatgaactgtccgatgcgttacaaactgactttgaaatcgtgtctatccttgctcaacaacagatcttagttgttactcctgaaaagctactttatgttctacgccatgcaccagaacttgcttcgcatcttggattactaattttcgatgagggtcatcaatttgatagcggcaaacgtggcatcacatacgaattacttttaacttcactccgttctatgatacgtgaagatacacaaaaagtacttatttcagcagttattagcaatgcagaagctgttggtgaatggcttaacggcgaatctaatgttgttgaaggtacaagccttatccccacattccgatctgttggattcgcaagttggatggaccaattaggaagaattgagtacgtagatagtcgtgatgctgaacaaaacgaattttttgtccctagggtgatagagagtattaatcttggcaaaaaaaatcgagaaagaacggaccgcgtctttcctgaaaagactgatgggcagggaattgcactttaccttggtttgaaattggttccgaatggcagcatcgctattttctgcggacgtaagtcgacagcggctaacatctgtgaaaaggctgttgatattatagaacgaggtgcccccttatcctttccggctgatttttcagactcccaagaagttgagcgattgtcacatctgcacgtcgcaaacctaggcattgatgcccctgcttcccgaagtgcggcatacggtattttttcccatcatggcaacacacctcatggtattaggttggcggtggaacatgccatgcgcgatgatcttgtccgattcgttgtttgcacttccactttggcgcaaggtgtaaaccttccgattcgatacctcatcgtaaccagtgtttaccaagggatggagcgcatcaaggtccgcgatttccacaacctcattggacgagcgggtcgcgctgggatgcatactgaaggcagtatcttatttgctgacccggtgatctatgacaagcgaaaggtacgtaatgataaatggcgctggaagcaagtaaaggaacttctggagccgagcaattctgagccgtgcatcagcaatcttctatcgatcttcgcccccatcaagagcgatgacgagaaatacaccataaccatggaagctttagattttgccaaggcttatatcgatcatcctgatgaagttaccaagttggctgctgggatagcagcacaacatggagacaaaaatttctcacaagacggtgtcgagcgccaagttacctggagaatcaaccttatctgtgccatcgagagcttcctgctatcccactgggatgagtctgaagatggtctttcggaaattgatgtggccgacttggccgaagggacgctggctttccatttagctgatgagcagaagaaggagaacatcagagagttgtttaagcttctcgctgagaatatctccgcaaatatcaccgatcctgttcgccgcaaaatctatggcaggacgctttacggaattcaggatgctcaggctattgagggttgggttcagtccaacactgaaagcctgctttcaatggttgatgaaacagaaacactcgccatcgtctggccattgcttacccgatatatcaacagtggtgtattcaccaagtttgataacccggaagtgcttgaggaaatatcgcatggatggatcagtggaaagccattctgtgatcttcttaaaatcatccgtaagcgaaaagctaagatgatttggggtaaacgcctgagagagttcaagatcgaccacgtcgtcgaagtttgcgaaggggctctcgcatatgatggcgctcttattgtaggcgctgtatctgaactcatcgaaatcgtcacacaagttgataccgtacagctgagaaattatctgcaactttttcaaaaacgcatgaaatatggtctacctacagcaactactatctccctttacgagattgggttttcggacagaattatttctcaagatcttgccgtatctttgaacttggcttcgactcaaaagagggatcttgtaaaagagctgaaacgcaacagggaaggagctcgaatggtaatggaaaaatatccagattattttcaaaagagaatggacgaactcttgcagtag

SEQ ID NO: 56508 - DNA, 780 bp, Enterobacter cloacae
atggtcccgttctatgattggtgcgactcggctgacatgccattaggtaatcaccatgttcgagtcatgacgggccggccaggagatattgcgactggcattcagatgacagctagggctatccccgcccactacactacagaggagcggattgccgccgcgcttgcgaagttaggtaagacagcagctgctcaaatgctcaacgatctccttccgcaaactgcgcatattaggtcgggtgaccttggcgagatctatgcaacagaatggattgatgcgtacagcggttatcgagcgcctatcaaaagactgcgctggaaggatcatcgaaatatggcaatgcgcggcgatgatgtcatcggtatgcttctcgacgctgaaacacagcgactcagcttcctgaaaacagaagctaaaagccgtattaacctgcgcgctcaaacgcttgaggaggctcggagcggcttagataaggatagcggccttccctcgtcgcatgcgttatcttttatctcggccagacttatggagataggcaccgatgcaccgctcgtagacgcaatcgacgaggcactctaccggcacggtatcccgcccgagagcgttaaacatctactcttcacgttttcaggtaacccaccacagacgctcctaacacaggcgctacaggcctatcctggcccgattggacaatggggtgtcggtttgcatatcgacaaccatgctgcttttgtcggagccgtctacgatcgagtaattgccgatgccaacaacccctga

SEQ ID NO: 56509 - DNA, 3534 bp, Enterobacter cloacae
atgccaacaacccctgatgctatcattgctgctataacggacgcggcgacggtcggctttcgcggcaggctaattgcacgaggtcaggcacgtgcaatgatctggcgtgacggtgttcttcctcctggtgcgccggatttctcggctcaactcagcttcgatcttcacagttacgcgtatggtttgcttggactaggtctgcgccttttagagtcagatggcgacccgaatcaagcacggatcgcattcgaacaggcggcgacagcgcttgagtcggtcatggccaacggcaatcgcgaagaagctgatcgcgatttccattttctccttgcagctgccagttatcacctcgcgcacctttctgcccgggcctattccctcctcgcaattgtggccgatgaagcaaatttctcgccgatcgagcatgcgctaactctgttgatacgccgagatatcaattcgctgcgtacacgcgtatatacctttcgtctcgatggtcgtggatctgatgcgaccattacgacattcttacagcagcatctcaccgagtccatcgttgccgatgcggcggaacgagatggaaaggactttcttttcgaaggcctgaatctcgcactgacagatgttttcttcggtgccttttcgatgttcctgctcgccctagatcgcggtgaatatactcttctcgaaaaagcgatcgcccagcttcgtgaaaacctcgatatctgcggggagctgaaccttataccgcaatggtgggtgcaccggattgctatccatctgcttaaagatttctggtcgaacaccttccacgaaaaagttccgctgcttcccgctggcggcgttgccccttcgtggcctgtccttcgtgaactctttattggcttgctcgctcgacgcccaagggcagaggtcgacttgtggccgtcgcagattgaagcggcatcgcgagctgtcaaccagaccgacaacctcgttgtttcgttgccgaccagcgcaggtaagacccgcatcgctgaattgtctattctgagatgtttagccggtgggaggcgtgccattgtcgtgaccccgcttcgcgctctatctgcgcaaaccgaagccacacttcagcgtaccttcgggccactcggcaagaccatttctgccctttatggcagtatcggagtgtccggcttcgacgaagatgccatccgcgggcgtgatattgttgtcgcaaccccagagaagctcgatttcgccttgaggaacgatccgtcactgctcgacgatgtgggcttgctcgttttcgatgagggccatatgattggttcaggtgagcgcgaagttcgttacgaggttcagattcagcgcctcttacgtcgtaaggacgcagatcaacgccgcatagtctgtctatcggcaattcttccggacggagatcaaatggaagacttctcggcgtggctacggcgcgatcaaccgggaggtcccattaagaacgattggcgtccgacgcgtttgcggttcggcgaggtcacttggaattcgccgacagcgcgcctaaatcttcgcgttggtgaggaaaggccatttgtgcccagatttctgactggtgcggcaccgccgctgttcgtaccaccgaagaagcgtcgcaaccgactctttccggacaatcagcaggagttgagccttgcaaccgcatggcgtctagtcagagatggtcagacagtgttgatctattgcccagagcgtcgcagcgtcgaaccatttgccaaggtcatcgttgacttgcactcgcgcggtgcactcgagtctttgctaacagtcgaattgaccactttgcagatcgctatagcactcggtgaggaatggcttgggacagacagctatattctgaaatgccttcggcttggtgtggctcttcaccatggtgccttgccgacagcttatcgcaaggaaatcgagcgccttctgcgagaaggtatactcaaggtcacgatctcatcgccgactctggcgcagggactcaatctctcggcgacagcggtcgtcatgcactcgctctaccggcacggtgaaatgatcaaggtttcggaattcaagaatgtcatcggccgagcaggccgtgcttatattgatgtagaaggccttgttctctatcccatctttgaagatgtgaataacaggaagcacaacaaatgggtcaatctgatagaagaccacggtgctcgtgagatggaaagcgggctcatccagctcatcttctcgctgctgagccgcatgcactctcacattggcggtgatctcgaccatttgatcgactatgttgtcaataatgctgctgcgtgggtcttcccagaggttgccggtgaaaaggttgatgagcgagagcaggcgctgaaagagtgggatcgccatatggcgacactagataccgccattctcagtctcattggtgaggccgatgtacccgatgaccagatcgagaccgctctcgacagtattctccaatcttcactctggcaacgccgcctgctgcgtgttaacgacgaatcacgggctgcctatcgcaccgcgctgtttactcggagccgttatatctgggcgaattcgactgccgtcacacggcgtggttattttctggctgggcttggccttgaagctggacgtgcgctggatgcaattgcaccggaggcgaacaatctgctcatgcaagctaatgcagccttggttgtatcagatcatgaggctgcaatcactgcgatcacagatatcgccgaacgcgtgttcaccttttatccgtttgaaccagacacgctcccggcgaattggcgtgaaatcctcagaggttggctgcttgggcatccgttggcaatgatgatcgccggagaggaggtagacgcattgcaatttattgagggcggtctgggctatcgtcttccttgggctatggaggcgttgcgggtacgtgccgccgccaacggtgataccgttggcatgccagcactagcgttggaagattatgaactcggccttgctgttccagctgtcgaaacggggacgatgaaccgctcagcctcaatactgatccaggcgggttttaattcacgacaggcggccatcaaagccgtcaccgatacggctgctaacttcacgaacggggcggaattgcgcgattggttgcgttcacctggtctcgctgtctattcggcacaaccaaactggccaacggccgaagctcggactatatggctcgaattcatccaggaatttgctccgtcagacaacctttcttgggcgcggcgagattatcttggaaacgtcaattggttcgatgttccggcgccttccggaactccagtcggtctctttcattggaacggacaaccgctagtgcttgcaccagatgggcacgcgattggtctgctacaacaccctcttaaccttaatcggcgaggacttgtgcgagcgacggtcgctatgaataacggccagatcaatctgagctatctcggccctgatgatttgtgggtagttgcgaagccacattaa

SEQ ID NO: 56510 - DNA, 771 bp, Enterobacter cloacae
atggcgaattttgatgtttggtgtgattctgtaaacgttaatttaggtgcgaacttccttcaaaaactcactgctaggggcgcagattttgataacagcgtggtatctaccgcttccattgtgcctcaccattatgcctcacctgaaaacatcgcaacagcttttgaattacttggtaagccaggggttgcaggatttatcaaagattttctccctatttctaagcaaactcgttcgggtgatattggtgaaattctggcaactgagtggattaatgcaagaagcaatggttataaggtcccacttaatcggctacgttggaaagatcaccgtaatttagctatgcgtggagaggatgttatcggtatgtatatcgatcctcagactgaaactcttttcttccttaaaacggaagcaaagagtcgtgcaactatgaacgctagcaccataatagatgcccgaaataacttagataaagagcagggattgcctaccgcacatgcactggcgtttatcgccactcgtcttcttgaaacaggacaaaaggagttggggcggcagattcttaaggcatcgttgagccagggaatacagcctggtcacgtccgtcaccttgtttttctgctttcaggtaatgcctctgatgtattgcttactacatctatcaatgcatacaaagggaatattcagcagtttggagtcactgtgatggttgctcgccacggtgaattcatccaggaggtttttgatagggtgattagccatgcttga

SEQ ID NO: 56511 - DNA, 3525 bp, Enterobacter cloacae
atgcttgaaacttctgaagaaattattgaagccatccgcgctgccactgctaccggatttcgtggccgattgattgcccgtgggcaagctagggctatgatctggcgtaacggcatattaccagacgaggctcccgaattcacttttcaattaagtgaagaccttcaggggtacgcttactcacttatcggcctgggtttaagactccgtgagataaatggggagagcgcctattcacgacttgcgtttgagtatgctgccactgccttggagtcagtgattgcaaagggggaccggcacaatgacgatagtgattttcatttcgtcatggccgcagccagttatcatctggcgcatctctctgctcgtgcttattctcttttagcgatagttaatgaagatcagaatttttcagctatcgaacagatcttgacgaaacttattcaaagagatttcagcacactacgctccagtgttctttcctatcgcgccgatggtgaaggtagtgaagagaaaattatagaaggaattcgaggagcggcgttcccttatgaggaacgcgatgatgattctgctgatgtggaacatgaccctttgttagaggggctcgacacagctctaaccgatatctacatgtcagcgatttctctttacattctggccgtcgaaagaggtgagcgtatattcctcactaaggctattcataaattacgtacaggccttgaggtttgctctcgctttaatatgttgcctcagtggtgggtcattttaattactattcaccttttatctgatctctggtctgatactttccacgaattactgccgacaaactctgtcggtggtgaagctggaacgtggccagatctgcgcgaggcgttcatttcacttctcatgcggcgctcgcgggccgaaatcgatctctggccatcacagagagaggctgcattacgtgcagttaatgatgaagatgacctggttgtctctttaccgacaagcgcagggaaaacacgtatagccgaattgtgtattcttcgttgcctcgctggcaaaaaacgaattgtctttgtcacgccacttcgtgcactttcagcgcagacagaagcttccctctccagaacgttcaatccccttggtaaatcgatttctgcactttatggcagcatcggcgtcagtggaatggatgaagacgccattcggaagcgcgacatcgtggtcgctacgcctgaaaagctcgactttgcactgcgcaatgacccttcacttattaatgatgtcggactattcatttttgatgaggggcacatgattggggcagatgagcgtgaagtacgctatgaagttcaaatacaacgactgttacgtagacaagatgctaatgaacgcagaatagtctgtctatcagctattttacccgacggtgaccaactggatgatttcgccaactggttacgtcgcgataagcttggtggcgtgatcaagagtgattggcgaccgacacgactacgttttggtgaagtaatctggatgggtaataccggcagacttaatctgagcattggcgaagagaaaacatggatttctcgcttcttgaatagtactccgcctccagtaattaaactttctggaaaaaagcagcgcaaaaaaacctttccaagcacgtctaatgagctctgcctcgcaactgcatggcgactggttgaagatggacaaacggtgcttatctattgtccattacggagaagtgtggagccgtttgctgaaatgattgttgatctacaccaacgtgggttactccgttccttgtttgatggggatatagctgttcttgcccaagctttagctcttggagaagaatggctaggcgctcacagcccgataatagcatgtttgcgccttggagtagctcttcaccatggcgccttgccaacagcctaccgtaaagaagtagagcgattgctccgtgatggcgttctaaagttaacagtatcttctcctactcttgcgcaggggcttaatctgtctgccacggcaatagttatgcactcactgcacagaaataaacagcttatcaacatctctgaattcaggaatgttataggtcgagctggacgagcatatgtcgatgtggaaggccttgtcatttatcccatttttgaacagatgacaaaacgtcaaagaaattggagtagactcacggaggatatgggagcaagagaaatggagagtggattagtacagcttgtaatctctctactgaagcgaatgagtcaattactgggcgatgacatcgatgtagtcagtgattacgtgctaaataatgcgatggtttggtcattcccaataattgcagcggaagatgcttctgaaagggaaagacaggctgctctctgggaaaaacaaattgcaacgttagatacagccattctgagcctgattggtgaaactgaaatactcgacattgatatagaagccactcttgatgatgtattgcagtcttcgctgtggtaccgaagccttcagcgttaccctaacgatagttatcgtagattgattcagtccggattgttagtacgcagtcattatatctggcatcactcaacgccagcagcccgccgaggatatttcctgtctggggtagggctcaaaactggcttacagctcgatgccattgcacaagttgctaatcaaatactgattgaagctaacggtgcaatactattaggtgatgaagagagagcaattgctgcaattactgccttagctgagcaagtatttaccttctatccttttactccaacacctttacctgataattggcaagctatcctacgctcgtggttgttaggtgaacccataactactgtcgccaacgtagtgaaatcagaaacgctacagtttgtcgagactggtctcgtgtatcgacttccttgggcaatggaggcaatccgggtgcgtgctatcgcgaatggagatattgttgatgatgatggcttaaccatggatgactatgatcttgatttggcggttgctgcacttgaaacaggaacacttaatcgttctgtatcattactgatccaagcagggtttaattcaaggctagcagcgataaaagttgtggcagacaccggggctgatttccaatctggcagagagctccgaaggtggctgcgatcagaccttgtgagttactggagtgaatttgcagactggccgacacccgaaactcacgcaatgtgggttgattttgccaaagagataaaccccgaagaagaccagacatggacgcttcgtaaatatacaagtatagtcaactggaaggctcctgttcctcaacctggaacaccgcttcattttcatcaaatgaatggagttaattacatccttgctgaggatggcttccctttaggaagcatcgcagctgcaatcaacacagaaagaaaaggtctactgcgtgttaaggttggagacaagttgaacgtagagcttgattatatcgggccaaatgatatcagagcacgctaa

SEQ ID NO: 56512 - DNA, 783 bp, Enterobacter cloacae
ttggaactgtacgaacgatggtgtcaagtcacaaaagaaaacgataagcgcaaaaactactggatctatgttgagagaaatggcggtcgagacgagattcgtgcagacctcgccgagactattcgatcgcactacgcgcgtcttgaactcatagccgaagacgtgaagcgcctcggatataaggtcgctgcgaagattctcagtgaagcgttgccgcaaaccgctaaaggccgctccggcgatcttggcgaaattctagcgacggagcttgtcgaggaagagattggcttacgagtgccggttcgccgtctccgttataaggatggccgtaatatggccatgcgcggcgacgattttatcggcgccggatacaatgggaatgaccaaaagctttggcttctaaagggtgaggccaagagcaataaggtgcttggcaaggcaacggttacgaacgctcgcaaggttctgaaccgtgacaacggacgctgtacgcccgattccctcctgtttatcgcaaaccgactcttagagagtaatgatccggaggacaacgcactgggtcgtagccttcgtgacgaggtcggtgtgaagtccctccgtgccgaccgcatcgaccatatgcttttcaccgtgtcaggcaacggtccacatgcatcgttgaaagaggacctcgacttcgcagggacgaatcgtgatcactacgtagtaaacatccacgtcccagatcaccaggatttcatcgcagccatgtacgaggaggcggaagatcttggagacaattga

SEQ ID NO: 56513 - DNA, 3504 bp, Enterobacter cloacae
ttggagacaattgacgaactaaccactttcttgactaccgcgaccgtagatggcgtcctcgggcgcttgctctatcgtggcgtagcctggtccttaatgcgtgaggaaggtttgttgcctacgaacgcgccgcagctaggtgcgacgatcgaaaccgatcttgccgagcacggttttgccctactccgtggaacgatggctctgcgctctcaagccggtgcatcggacctcacaaacaaggcgtttgagcgcgccgcaattgccttcgaagctttggtgcgtaactgtaaccctgattcccctgagcgcggtttccatcgtacgatagccgctgcggcctatcatctagcgggcttctcggccgttgcctattcgcttttcaatgaggccactgatgatctcaatgcgtcaccgggcgaaacggtgattcagtatttgatcttgcgtgatcttagccagttgcgagaattcgttcgagacaggttggacgagcaagctcacggagatgaggagatcgctgaggcgttgatgagcgaaaaattagacattgacgaggctttatcgacaatcctcaatacaacaatctgccgggcgttagcgtatttcgacttcgcgctcgagacaggcgaactcgagccaatcgaggccgcgcgggagttgctcaccaccgcagcccacttggcggataacgccgggaatgttccgctatggtggatttcaaatctctgcagtcacttaatcgatgacctctggaggcattctctgcatgaaaacttaccgactgaaccgccagagggaacggaggaaaaataccctgatctacgacggctattcatctcgtcgctctacgcccgcaagacatctgaggtagagctctggccatcacagcgcgaagcagctcggcgttctactgatgtcaccgacgatcttgtcgttgccttgccgaccagtgccggtaagactcgcgtggcggagatcgccgcgttgatgaccctgtcgtcagcacgtcgggtattgattgtgacgccattgcgcgcgctatccgcccagaccgagcgatcgttcagaaaaacattcgggccgctcggttttagcgtttcttccctttacggtgctagcggcctttcgactggtgatgaagacgcgctgcgcacgcgcgatatcatcatcgcgacgcctgagaaacttgactttgcgctcagaagcgacccgtcgctaatcgccaatgtgggcctgatcgttctcgacgaaggccacatgattggccctagcgaacgcgagattcgttatgaaaccctcgtgcagcgtctacttcggcgctctgatgcaggcgaacgtcgtattgtttgtctatccgcgatcctgcccagtggcgatgagctggatgacttaacagcatggatacgctctgatgaaccgggcgagccagtgcgttccgactggcggccaacgcggcagcggttcggcgcgctcacatggcggggtaaggacgcgctgctccgtctagacctcaatgacgatggtccgttcctcgacaaatttgtcgtggagaaagccgcgcgggggaaagaaaagaaaccctatccgcgcaggaattcgcacctcgccttgttcgcggcatgggaattcgctggccaaggaaagcgggcacttatcttctctacccaagcgaattgggtcgaaggctacggtaaacaggtagtggatctctgcaaacgcggttatctaggctcactgttggaggatgaagcctcgatcgctcgtgctgtggaggtcggcaaagaatggttaggcgaagaccaccctgccgtggcctgcctaaagtgcggtgttgctatccactacggccgactgccgagcccgttccttcgagaactggaggtccttctatccgaaggcgtcctgcgggtcattatcgcatcgccgacattgtctcaggggctcaacctcaacgccgccgtcctgttagtgccttcgttgtatcgagcatccgagaagatcaaaggcgaggagttcgcgaacgtcgcgggtcgcgcagggcgcgccttcgtggatgtcgaaggcctcatcgttcatgtcatgttcgataaggtcaaatggcgaaaaaaggagtggaggaagttagtggattcagctaaagcccgaacgctaaagagcggcctcatccagattgtcgcagaaattcttgagaggctgtcccgcaaaggtgtgctggatcgtgatgatgcctgggaatatttggccaacgcgcgtgaagcttggatatccccccaagaagaagctgaagtcgcagagcgcctggcgactggcgcgaagtatgacgctggtagcgacgatgatgaagatggtgttgatgacgaagaggaaaccatcgaagaggagccgttatcacagatcgtcgagcgtcttgacgcaatggtatttggtctgatcgaagtactcgactccaatcgtgctgatctgccgaagctcttggatgaggcgctcaagggctctctctgggcacgccagatcgcacgtgagggcaaggacgtcgccccgctccataagaaggtgttcgaggcccgtgccgatctcatttggaaaaccactacagcgcaggtgcgacgcgggcacttcgccatgggtgttggacttgaggcgggtctgaaaatcgacgccatggctgacgagctggccgaactcctagaccaggcagatgatgcggcattgagaggcgacgccgaagcgcttgtcgatgcgctcggcggtttaggtgaacgtttactgttcatgcgccctttcatccccgataaggcgaacgcactaccggtgaactggaaggctatcttgcgtagttgggtgtctggcgaggatgtggctaaaatcggcactcagaacatgcgagttgtagaggaggcgttcacctatcgtttggtttgggccttggaagcggtgcgtactcgccgcatgtcactcggttggtcgccagaaacggtggtgggtggaggcgcagcagcggtagaaactggcgtaccgcaatttatgatgtcgatgttgatccgcgcgggccttccttcgcggcgcgcggcgatggcggcgatcaaggattctaaaccggtcttcgtcacgccagctgaaatgcgggcttggctcgagtccgacgaggtcacagcctatactgacgctagcgactggcccacgccagatacagctgcattatgggcgcggttccggacggacgcccttagcagcggtatacagaaatggtcggtcgaacatttcaagcgcctgctagatacttcgatagccccgccgccaggactttatcgcatagtcaccgacgagggtgatgggcggacttggctgactacacccgattatcaacgtgtcggtgcgttcaagaaactagcagttgatccaaagcccagccttttttcaggccgattgcgcggcggcaccaaagtggtggaggctttacgtattgggcctggcaagctgcgatggccccgtgctgatgcatag

SEQ ID NO: 56514 - DNA, 780 bp, Enterobacter cloacae
atggcaaatttcgaggactggtgtgattcgacagagcgtaatatcagcgaccattatttgcagtcaataacggccagggatgccgagtgtatgttcggcgttcaggttatggccgcgctaatacctgaacactatgcgtcaccaagaaatatcgctaacgcatttgaagctctaggtaaaccggggctggcggcatacattgctggaaaattgcctgaaacgaaacagattcgttccggtgatttgggtgagatatttgcaacagaatggataaatgcacgtagcaatggctataaaacgcctataaaaagattgcgctggaaagatcatcgcaatatgtcgatgcgtggtgaggacgtcattggtatttacatagatcagtcttctcaacaactttttttccttaaaaccgaagcgaaaagtcgcgccaaaatgacgggagaggtggtttctgaagcccgcgataacttgaataaagagcaagggctgccatcttcacatgccctaatgttcatagcagatcgcctgaatgaacagggtgaggagcttttggctaaagcgatcttaaatacaacgcttcggcaaggaattgttccaggatgcgtccggcatcttatctttctattatcgggcaactcttcagaaactatgctgaccacttcaattgaaaagtatacaggtcaaaataatcagtggggtgtttgtctaagaattgctcgccatggtgagtttattgccgcaacttttgaaaaggtgattagcgatgccagcaacagctga

SEQ ID NO: 56515 - DNA, 3525 bp, Enterobacter cloacae
atgccagcaacagctgatgaaattatcgaagctattaaggaagcttcagctgtaggttttcgcgggcgcctgattgcacgcgggcaagcccggtcggtgatctggcgagacggtgacttgccgccggatgcaccggagtttagcgcactgctcagtcaggaccttcaaggctatgcttatgccctaatcgatctcggccttcgtcttcgagaacttaatggagacgacgcctatgcgcgaattgcttttgaacaggccggaaccgcactcgagtcggctattgctaaaggaaaacgcgacagccgggatacggattttcacttcgtaatggctgctgcaagctatcaccttgcgcatctttcagcacgagcctattcgttactcgcaatggttggtcaggatgataatttttcaccaatagagagggctcttacacaactgatccggcgtgatttgcgtactctgcgcgataatgcgttgggctttcggctcagaggtgatggcagtgacgtgaaaattactgaaatcctccaggctcgcctaaacttgccgcaagacgagaacggtgacagtgagtcagaggaggacatcctttttgatgggcttgatttggcactgactgacgcctatatgtcggccatttctctctaccttctcgctgtagaaaggggagaatcacgtttgctttccaaggctattgaaaaattaagaattagtctaagtatatgtgctcagtttaatatgctaccccagtggtggctaaactttattaccattcatctgttatctgacctttggtcagatacattccatgaaagattgccactggttccagttggtggtgacgctgctgaatggcccgcgcttcgggaactgtttattgcactgcttcaaagacgacctcgagccgaaattgatctctggccatcgcagagagaggccgccggacgctctgttaatgacaatgacgatttggttgtttcgttgccaaccagcgctggaaaaactcgtattgctgaattgtgtattcttcgctgtctggcgggtggcaagcgtgttgttttcatcaccccgcttcgtgcgctttctgcacaaacagaagccactctctccagaacatttgggccgcttgggaaaacaatatcaatgctgtatggcagcattggcgtaagtggtatggatgaggatgcaattcgccagcgtgacatcgtcgtcgccacgcctgaaaaacttgactttgctctccggaatgacccgtcaattattaatgatgtaggactttttatttttgatgaggggcacatgattggggccgatgaacgagaggttcggtatgaagttcaaattcaacggctgttgcgcagacaggatgccgatacgcgcagaattgtctgcctctcggcaattctacctgatggtgagcaactcgatgattttgccggttggctccgtcgtgacaagcccggaggaccaatcaaaaataattggcgaccgacccgcttgcagtttggcgaggtcatatggtccgctccagcaggtcggcttaatctcagcgtcggttatgaggcggcttgggtatcgcgttttatcgtcagcagacaaccgccaaaggttaaattacctaataaaaagcagcgaacaaaaatgtttccctctgataacaaggagctctgcttagcgacagcctggcgtctaattgaagatggacagaccgtacttatctactgcccacttcgccggagcgtcgaaccgtttgccgagacaattgtcgatctgcatcagcgcggactactgccatctttatttgatgctgccccggacattctggatacggctatctcgctgggagaagaatggttgggggcacacagcccgatacttgcctgcctacggttgggcgtggctcttcatcatggcgcattgcctacggcttaccgcaaagaaatcgaacgtttgctgcgagatggggtacttaaagtgacgatctcatcaccgacgctagcacaaggtcttaatctttcggcaacagctatcgtcatgcattctcttcatcggaatcgcgagcttatcaaagtgtccgagttcagaaacgtcataggcagagcagggcgcgcatatgtagatgttgaagggctggtgatttatccaatattcgataaagtaaataaacgccagactaactggcataccctcacatctgacacgggggcccgtgagatggagagcggactaatacagcttgtctgtgtgttattgattcgcatgcatacacggcttggtggggatttgaaagcactcactgaatatgtgaccaacaacgccgtagcgtgggaatttccagaaattatgaccgaatctccgcaagaaagagatattgcgcaggccatctgggaaaaacaactttcaacgcttgatactgctattctgagccttcttggtgagaatgatatcccggatgaccagattgaaactgctcttgatgacattcttcagtcttcactttggcaacgcagtttgcagcgttatagggatgagaatgaacggattttgctgaaatcgggactcctgtcccgcagccgctacatctggcagcgctcaacggcagcagggcgccgggggtatttcctgtcgggggtaggacttacaaccgggctacgacttgatgctattgccgctaaggccaaccaactattgattgatgcgaatgcggctataatgggcggtgatgccgaagaggcaattgctgctatcacggcgctcgctgaagaggtctttaccttctatccgtttatacccgatccattgcctggcgactggagaggtattttacgttcctggctattgggtgaacccatgactaacgtcgcgaatacgcaggcgtctgaaacgcttcaattcgtcgagaatgggctggtgtatcgacttccgtgggcaatggaggctattagggtacgtgcaacagctaatggagacctcataggtgatacagataccacgctagacgattatgagttaggttttgcggttgctgctgttgaaacaggtaccttgagccgttcgtcttcactgcttattcaggcgggttttagctccaggcttgcagccataaaagtggttacagacactactgccgattttcaatccggccaggagcttagaaggtggctgaactctgaagaagtgataagccacacggataatcatgactggcctacacctgaaaccagagtgatgtggctggaattcttgggtagtctcagccccaaaggcagccaggtttggagtcgtcatcgttataacggaatggtggactggagagatactccggcagtgatcgggacaccattgcagctttacactgttgatggtattcatcacgtactggctgatgatggcactcctctgggaagtataaatggcagaattaacacaaacagaagaggtcttcttagagttgaggtggatgatgagaatggtcgtgccatgttcgattatttaggaccggacgactttatttctacctga

SEQ ID NO: 56516 - DNA, 780 bp, Enterobacter cloacae
atggtcccgttctatgattggtgcgactcggctgacatgccattaggtaatcaccatgttcgagtcatgacgggccggccaggagatattgcgactggcattcagatgacagctagggctatccccgcccactacactacagaggagcggattgccgccgcgcttgcgaagttaggtaagacagcagctgctcaaatgctcaacgatctccttccgcaaactgcgcatattaggtcgggtgaccttggcgagatctatgcaacagaatggattgatgcgtacagcggttatcgagcgcctatcaaaagactgcgctggaaggatcatcgaaatatggcaatgcgcggcgatgatgtcatcggtatgcttctcgacgctgaaacacagcgactcagcttcctgaaaacagaagctaaaagccgtattaacctgcgcgttcaaacgcttgaggaggctcggagcggcttagataaggatagcggccttccctcgtcgcatgcgttatcttttatctcggccagacttatggagataggcaccgatgcaccgctcgtagacgcaatcgacgaggcactctaccggcacggtatcccgcccgagagcgttaaacatctactcttcacgttttcaggtaacccaccacagacgctcctaacacaggcgctacaggcctatcctggcccgattggacaatggggtgtcggtttgcatatcgacaaccatgctgcttttgtcggagccgtctacgatcgagtaattgccgatgccaacaacccctga

SEQ ID NO: 56517 - DNA, 3534 bp, Enterobacter cloacae
atgccaacaacccctgatgctatcattgctgctataacggacgcggcgacggtcggctttcgcggcaggctaattgcacgaggtcaggcacgtgcaatgatctggcgtgacggtgttcttcctcctggtgcgccggatttctcggctcaactcagcttcgatcttcacagttacgcgtatggtttgcttggactaggtctgcgccttttagagtcagatggcgacccgaatcaagcacggatcgcattcgaacaggcggcgacagcgcttgagtcggtcatggccaacggcaatcgcgaagaagctgatcgcgatttccattttctccttgcagctgccagttatcacctcgcgcacctttctgcccgggcctattccctcctcgcaattgtggccgatgaagcaaatttctcgccgatcgagcatgcgctaactctgttgatacgccgagatatcaattcgctgcgtacacgcgtatatacctttcgtctcgatggtcgtggatctgatgcgaccattacgacattcttacagcagcatctcaccgagtccatcgttgccgatgcggcggaacgagatggaaaggactttcttttcgaaggcctgaatctcgcactgacagatgttttcttcggtgccttttcgatgttcctgctcgccctagatcgcggtgaacatactcttctcgaaaaagcgatcgcccagcttcgtgaaaacctcgatatctgcggggagctgaaccttataccgcaatggtgggtgcaccggattgctatccatctgcttaaagatttctggtcgaacaccttccacgaaaaagttccgctgcttcccgctggcggcgttgccccttcgtggcctgtccttcgtgaactctttattggcttgctcgctcgacgcccaagggcagaggtcgacttgtggccgtcgcagattgaagcggcatcgcgagctgtcaaccagaccgacaacctcgttgtttcgttgccgaccagcgcaggtaagacccgcatcgctgaattgtctattctgagatgtttagccggtgggaggcgtgccattgtcgtgaccccgcttcgcgctctatctgcgcaaaccgaagccacacttcagcgtaccttcgggccactcggcaagaccatttctgccctttatggcagtatcggagtgtccggcttcgacgaagatgccatccgcgggcgtgatattgttgtcgcaaccccagagaagctcgatttcgccttgaggaacgatccgtcactgctcgacgatgtgggcttgctcgttttcgatgagggccatatgattggttcaggtgagcgcgaagttcgttacgaggttcagattcagcgcctcttacgtcgtaaggacgcagatcaacgccgcatagtctgtctatcggcaattcttccggacggagatcaaatggaagacttctcggcgtggctacggcgcgatcaaccgggaggtcccattaagaacgattggcgtccgacgcgtttgcggttcggcgaggtcacttggaattcgccgacagcgcgcctaaatcttcgcgttggtgaggaaaggccatttgtgcccagatttctgactggtgcggcaccgccgctgttcgtaccaccgaagaagcgtcgcaaccgactctttccggacaatcagcaggagttgagccttgcaaccgcatggcgtctagtcagagatggtcagacagtgttgatctattgcccagagcgtcgcagcgtcgaaccatttgccaaggtcatcgttgacttgcactcgcgcggtgcactcgagtctttgctaacagtcgaattgaccactttgcagatcgctatagcactcggtgaggaatggcttgggacagacagctatattctgaaatgccttcggcttggtgtggctcttcaccatggtgccttgccgacagcttatcgcaaggaaatcgagcgccttctgcgagaaggtatactcaaggtcacgatctcatcgccgactctggcgcagggactcaatctctcggcgacagcggtcgtcatgcactcgctctaccggcacggtgaaatgatcaaggtttcggaattcaagaatgtcatcggccgagcaggccgtgcttatattgatgtagaaggccttgttctctatcccatctttgaagatgtgaataacaggaagcacaacaaatgggtcaatctgatagaagaccacggtgctcgtgagatggaaagcgggctcatccagctcatcttctcgctgctgagccgcatgcactctcacattggcggtgatctcgaccatttgatcgactatgttgtcaataatgctgctgcgtgggtcttcccagaggttgccggtgaaaaggttgatgagcgagagcaggcgctgaaagagtgggatcgccatatggcgacactagataccgccattctcagtctcattggtgaggccgatgtacccgatgaccagatcgagaccgctctcgacagtattctccaatcttcactctggcaacgccgcctgctgcgtgttaacgacgaatcacgggctgcctatcgcaccgcgctgtttactcggagccgttatatctgggcgaattcgactgccgtcacacggcgtggttattttctggctgggcttggccttgaagctggacgtgcgctggatgcaattgcaccggaggcgaacaatctgctcatgcaagctaatgcagccttggttgtatcagatcatgaggctgcaatcactgcgatcacagatatcgccgaacgcgtgttcaccttttatccgtttgaaccagacacgctcccggcgaattggcgtgaaatcctcagaggttggctgcttgggcatccgttggcaatgatgatcgccggagaggaggtagacgcattgcaatttattgagggcggtctgggctatcgtcttccttgggctatggaggcgttgcgggtacgtgccgccgccaacggtgataccgttggcatgccagcactagcgttggaagattatgaactcggccttgctgttccagctgtcgaaacggggacgatgaaccgctcagcctcaatactgatccaggcgggttttaattcacgacaggcggccatcaaagccgtcaccgatacggctgctaacttcacgaacggggcggaattgcgcgattggttgcgttcacctggtctcgctgtctattcggcacaaccaaactggccaacggccgaagctcggactatatggctcgaattcatccaggaatttgctccgtcagacaacctttcttgggcgcggcgagattatcttggaaacgtcaattggttcgatgttccggcgccttccggaactccagtcggtctctttcattggaacggacaaccgctagtgcttgcaccagatgggcacgcgattggtctgctacaacaccctcttaaccttaatcggcgaggacttgtgcgagcgacggtcgctatgaataacggccagatcaatctgagctatctcggccctgatgatttgtgggtagttgcgaagccacattaa

SEQ ID NO: 56518 - DNA, 780 bp, Enterobacter cloacae; identical to SEQ ID NO: 56508

SEQ ID NO: 56519 - DNA, 3534 bp, Enterobacter cloacae; identical to SEQ ID NO: 56509

SEQ ID NO: 56520 - DNA, 780 bp, Enterobacter cloacae; identical to SEQ ID NO: 56508

SEQ ID NO: 56521 - DNA, 3534 bp, Enterobacter cloacae; identical to SEQ ID NO: 56509

SEQ ID NO: 56522 - DNA, 780 bp, Enterobacter cloacae; identical to SEQ ID NO: 56508

SEQ ID NO: 56523 - DNA, 3534 bp, Enterobacter cloacae; identical to SEQ ID NO: 56509

SEQ ID NO: 56524 - DNA, 780 bp, Enterobacter cloacae; identical to SEQ ID NO: 56508

SEQ ID NO: 56525 - DNA, 3534 bp, Enterobacter cloacae
atgccaacaacccctgatgctatcattgctgctataacggacgcggcgacggtcggctttcgcggcaggctaattgcacgaggtcaggcacgtgcaatgatctggcgtgacggtgttcttcctcctggtgcgccggatttctcggctcaactcagcttcgatcttcacagttacgcgtatggtttgcttggactaggtctgcgccttttagagtcagatggcgacccgaatcaagcacggatcgcattcgaacaggcggcgacagcgcttgagtcggtcatggccaacggcaatcgcgaagaagctgatcgcgatttccattttctccttgcagctgccagttatcacctcgcgcacctttctgcccgggcctattccctcctcgcaattgtggccgatgaagcaaatttctcgccgatcgagcatgcgctaactctgttgatacgccgagatatcaattcgctgcgtacacgcgtatatacctttcgtctcgatggtcgtggatctgatgcgaccattacgacattcttacagcagcatctcaccgagtccatcgttgccgatgcggcggaacgagatggaaaggactttcttttcgaaggcctgaatctcgcactgacagatgtttttttcggtgccttttcgatgttcctgctcgccctagatcgcggtgaatatactcttctcgaaaaagcgatcgcccagcttcgtgaaaacctcgatatctgcggggagctgaaccttataccgcaatggtgggtgcaccggattgctatccatctgcttaaagatttctggtcgaacaccttccacgaaaaagttccgctgcttcccgctggcggcgttgccccttcgtggcctgtccttcgtgaactctttattggcttgctcgctcgacgcccaagggcagaggtcgacttgtggccgtcgcagattgaagcggcatcgcgagctgtcaaccagaccgacaacctcgttgtttcgttgccgaccagcgcaggtaagacccgcatcgctgaattgtctattctgagatgtttagccggtgggaggcgtgccattgtcgtgaccccgcttcgcgctctatctgcgcaaaccgaagccacacttcagcgtaccttcgggccactcggcaagaccatttctgccctttatggcagtatcggagtgtccggcttcgacgaagatgccatccgcgggcgtgatattgttgtcgcaaccccagagaagctcgatttcgccttgaggaacgatccgtcactgctcgacgatgtgggcttgctcgttttcgatgagggccatatgattggttcaggtgagcgcgaagttcgttacgaggttcagattcagcgcctcttacgtcgtaaggacgcagatcaacgccgcatagtctgtctatcggcaattcttccggacggagatcaaatggaagacttctcggcgtggctacggcgcgatcaaccgggaggtcccattaagaacgattggcgtccgacgcgtttgcggttcggcgaggtcacttggaattcgccgacagcgcgcctaaatcttcgcgttggtgaggaaaggccatttgtgcccagatttctgactggtgcggcaccgccgctgttcgtaccaccgaagaagcgtcgcaaccgactctttccggacaatcagcaggagttgagccttgcaaccgcatggcgtctagtcagagatggtcagacagtgttgatctattgcccagagcgtcgcagcgtcgaaccatttgccaaggtcatcgttgacttgcactcgcgcggtgcactcgagtctttgctaacagtcgaattgaccactttgcagatcgctatagcactcggtgaggaatggcttgggacagacagctatattctgaaatgccttcggcttggtgtggctcttcaccatggtgccttgccgacagcttatcgcaaggaaatcgagcgccttctgcgagaaggtatactcaaggtcacgatctcatcgccgactctggcgcagggactcaatctctcggcgacagcggtcgtcatgcactcgctctaccggcacggtgaaatgatcaaggtttcggaattcaagaatgtcatcggccgagcaggccgtgcttatattgatgtagaaggccttgttctctatcccatctttgaagatgtgaataacaggaagcacaacaaatgggtcaatctgatagaagaccacggtgctcgtgagatggaaagcgggctcatccagctcatcttctcgctgctgagccgcatgcactctcacattggcggtgatctcgaccatttgatcgactatgttgtcaataatgctgctgcgtgggtcttcccagaggttgccggtgaaaaggttgatgagcgagagcaggcgctgaaagagtgggatcgccatatggcgacactagataccgccattctcagtctcattggtgaggccgatgtacccgatgaccagatcgagaccgctctcgacagtattctccaatcttcactctggcaacgccgcctgctgcgtgttaacgacgaatcacgggctgcctatcgcaccgcgctgtttactcggagccgttatatctgggcgaattcgactgccgtcacacggcgtggttattttctggctgggcttggccttgaagctggacgtgcgctggatgcaattgcaccggaggcgaacaatctgctcatgcaagctaatgcagccttggttgtatcagatcatgaggctgcaatcactgcgatcacagatatcgccgaacgcgtgttcaccttttatccgtttgaaccagacacgctcccggcgaattggcgtgaaatcctcagaggttggctgcttgggcatccgttggcaatgatgatcgccggagaggaggtagacgcattgcaatttattgagggcggtctgggctatcgtcttccttgggctatggaggcgttgcgggtacgtgccgccgccaacggtgataccgttggcatgccagcactagcgttggaagattatgaactcggccttgctgttccagctgtcgaaacggggacgatgaaccgctcagcctcaatactgatccaggcgggttttaattcacgacaggcggccatcaaagccgtcaccgatacggctgctaacttcacgaacggggcggaattgcgcgattggttgcgttcacctggtctcgctgtctattcggcacaaccaaactggccaacggccgaagctcggactatatggctcgaattcatccaggaatttgctccgtcagacaacctttcttgggcgcggcgagattatcttggaaacgtcaattggttcgatgttccggcgccttccggaactccagtcggtctctttcattggaacggacaaccgctagtgcttgcaccagatgggcacgcgattggtctgctacaacaccctcttaaccttaatcggcgaggacttgtgcgagcgacggtcgctatgaataacggccagatcaatctgagctatctcggccctgatgatttgtgggtagttgcgaagccacattaa

SEQ ID NO: 56526 - DNA, 780 bp, Enterobacter cloacae; identical to SEQ ID NO: 56508

SEQ ID NO: 56527 - DNA, 3534 bp, Enterobacter cloacae; identical to SEQ ID NO: 56509

SEQ ID NO: 56528 - DNA, 780 bp, Enterobacter cloacae; identical to SEQ ID NO: 56508

SEQ ID NO: 56529 - DNA, 3534 bp, Enterobacter cloacae; identical to SEQ ID NO: 56509

SEQ ID NO: 56530 - DNA, 831 bp, Enterobacter cloacae
atgactgttgaacaaccgtactcagcttggctcaaaaaagctgaacatcgcgtaaccacttctgacggcaatgaggtagaggtatacgagctcgaaatcgatcttgaagcggggcatgtactatccgcatgggccaaacatttccgtgagcattactgtctggacagccaaattgatcgcctgcgtagagggactaagaaaacgcgagccgagtatttgagagacttggtgtttcctgatgagtctgaagattttggccctgcaacgcgctccggcgattttgctgaaattcttatcgcggatctacttgaaagccattttggttattgggttcctcgtacccgatatgacaacaaaatggttcgcaacgagtctccaaagggaacagatgtattagcgtttaagtttgatgacatagacgcatcacggccatctacaaaagacatcttgatttcttttgagtcgaaagcacaactcagtggtaagaaaacaaagccgagattgcaagatgccgttatcgactcgataaaggatgtgtatcgaatatcagaatcccttaatgcgatgaagcgccgtttgattgatcgccaagatgaagaaggtgcagatcgggtcgaacgctttcaagaagggttggatgtcccttatgtacgaatgacaggggcagcggctgttttttgttcaagtctttatgattcggctcatatatctgaaactacagattgcacttcgcatgaaaatattaaaaatttaatgttggttgtgattcatgctaaatcgcttatgaaatttgttcacgctctctatggcagggcagcaaatgaagcctaa

SEQ ID NO: 56531 - DNA, 3129 bp, Enterobacter cloacae
atgtttgagtatggcgttccagaagaagatcatattgatcttcctgatgatctcgacttggagatgcagtttccattagctgttggtaccgtcggcgactttgcatcagaagtggtggctaaggccatcggcaattcgattgaagctcaatcccaaaccccactggatgaggttattttttcggctcaagtccttcaggcttatgacgactccctgcttaacaaagaactctccttcaatcttcgcatacttgccgctgctggtttctatcttggcggtgtacccggaaatgctacagtccaattgtctaaactgagccaactcgagtttcctgagcacgatactttagctattgcagttaaagcagcgatggatcggccttgggagcagaccaacgagacattagtatcttcacgtgcaaaagatattttggatgtattgcgccaacacttcaggtatggccggagtggcggacagaaagcctatgatgctattaaatcactgcgcgaatgggcctatagccatgcgtctgcacatgacctacttatggccgatttgcttggagcgattagtgccactcgcatcgctaattctgcttggacattacttccacattatagcaaccttccgccagaaaagtgggagtcatacttatcgcgttctatgtcaattaaggaaatgtggccatctcagcgcttgctaggagaggcaggattgtatagcggggcatcaggagtagttcagatgccgacgagcgccgggaaatcgagagcgaccgagcttattatccggtcggcatttctttctgctcgtacgaaattggtcttagttattgcacccttccgcgcactctgccaggagatagccaacgatcttgaaaaggcatttaaggatgatggctatgacgtcaatcaacccagtgacgcgttgcaaccagatgtcgagttcgatttttctaccttatcagattttctcgatgtggaatctggaatatttgattcagaggtcgaatcgaagccgcaggtcattattcttaccccggagaagcttctttacatacttcgacaagagccagacattgttcagaaagctggacttgtagtttatgacgaagggcatcagtttgatacaggcagccggggtgtaacttatgaactgttactaacatccattaagcgaatgttacacgaaaatgcccagagcgtgttgatttcagcagtaattcagaatgctgcttcagttgcagcttggttattaaatgacggttcaaaggttgtctccagtaaatccttacaggctagtagactcattgcctttaccagccttccgaaaggtaaagatggtcaactacagttcaatgttgcctctgatagcgatcagaaattctttgtcccgcgagttattgtttcagaaaaaatgccacgactacctaaggaaagaaaggatcgttttttccctaaccaggaaagtggctccatagcgttgtatcttagtttacgcctgctgaaaaatggtggggttgctattttcacagggagaaaggcttctgctgcaaaaattgttcgtgaggccgccgaagatatttttcgtcgtggaatttcacttgaaccaccttctgctaatagtgaccctgatgagattcgtcgctttgtttgcctcttcgaacgtaattttggtgctaatgcatatttgactcaagcagctactttaggcatttttgctcatcacggcaatactccccaaggtgttcgtctggctattgagtatgctatgaggcaaagccttattcgattgatcgtctgtacctcgacactggcacagggtgttaaccttccaattcgatacctacttgtaacaagtgcaatgcaggggcgtgaatcgatcaaagtacgcgacttccataatcttatgggacgtgctggacgtgccggaatgtacggtgagggcactgttattttcactgacccccgtctctacgacgagcgtgtcgcaaagacgcaccgctggaaagatacaattaatctaatcaatcctgatagtactgagccaacgggaagtacattgctttctcttttcgatcctctgcgaaatgacctcggaacagttattctaagctcgccaagctctgctgaagtagccacctatattgtcaatgaatgggaggctcttttaaagtgggtagagagcgtccctatcaatcttcctaaagagaatttttcggtcgcttcattactcgaacaacttaaatccaagaaaaaggttattgaagcagttgaaagcttcttaatgacatatcgtagtgatgttcagcccgaaacttttgtgggcaactctcgagaattggttactgaaacacttgcctattcacttgccactaaagagcaacaaatactcctgacagatatcttcgagtctgtggcgcgaaggatcgaactttttgttccagatacagcgatccagcagcgttttgggcggacattgttaggtattgaccaagctttggcgatcgaatcatgggtaactacaaatgcaaacgagctcgagggagcaacctctgctgatcacctgtttgatgtgctatggccgcttttagttctcttatccagtgaaaaacggttgagtgatactgttcctaatggggctcttatgacattagcattggggtggatggctggagattcgtttgcagctctccttcaacggcttgacaaattgggtgcgtattacccctatggcgccaaccaaaggaaatttgatcttgatgtggttgtagacctgtgtgaacaaacgtttggctttgagtttacactcttgctcgcagcggtaaaggaatcatttctcgcattctcttcagaacaggctggtgaggtatttagaggatacgttgatcttcttcaaaaacgattgaaatatggacttccgaatcagagttgcattgccttttttgaagcaggatttgctgaacgcgtgattgcccagtgtcttgcagagggaatgactcaagatgctattcaagtcagttttgacgccagaaacatgattcgagaaaacccagagagattcgaagcaatgctgcaaggctttccatcttatttttccgatgtatttaaaacaatcactgcactgtag

SEQ ID NO: 56532 - DNA, 849 bp, Escherichia coli DEC14B
atgccctggacttcagatcataccaaatggctcatcgataccggtgagcgactaaagaccgccgatggcaaggaggtcgaggtctgggagtttcgtcatgagaaagatgaggccgtgctatcggcctgggcgaaacactttcgaaatcattactgtctggataccgagatcgatttcctccggggtaaacgcccgcgaccggactatctgaccaatatcaagttcccttgcagaacatccaaactcggcccaggaatcagagcaggagatttcggggaaattctggtttccgattacctgcaatggcttctcggttactgggtacccagggtacggtggtcatcaaaggttgttcgagatgaatcgcccaagggcagcgatgtcattggattccgatttcacaaaaaaaacggcgaagcctccaccaaggacgtgttgtttgtttttgaatccaagacaaaattctccgcctctacaatcaatcgcctgcaggatgccatcaacgattctgccaaggatcacattcgcatcgatgaatccctgaacttcatcaagcaaaagctctttgaaaaaagggaaatcgaacaggctcaaaggatcgagagatttcaaagcccagtagatatgccctacaaggaaacctacggcgctgcagccatcatttcagacgaatttttcgacgccgaagaattggctgtagctgactgcgggaaaattcccaagtcagcaaaatcaaaggagttcttccctcatccaaatggtgacagcctagttctcttggttatcaagggacccagcatgatggaccttgtccacgagctctacaggagggctgcggatgaggcctga

SEQ ID NO: 56533 - DNA, 3144 bp, Escherichia coli DEC14B
atgaggcctgatagaaaatccaatcgtcttttgggtgttactcgatcaaaagcaaagatgatcgagtaccatgtacctgaagaatatcaggagatagatttatcactacatcctaataagctcttcaccatttcgattggcctgcttggtgaccttgccgccgccatcaaccgggtggagccagatcccgattccctcgcagagctaaaaaacaatctgctattttccgcccgttttttcgactcctacctccaatcaaagctgaacgagacacttgatccatacctcgtgcttctgggctccgcctccttttacctgtgtgatcttcccggaagcgcgtcggtattggcgaagcgcatcgatggcgactgtccggatctggatggcgatagtttggaggacctgttgctctggttgctgcaggccgatctgggaacctattttgatggagctgaggggccgttcggcggattcatcgacgggatttcaaagtggattctccagttttttgaggatgggaatggcgaaaaaaatctcctcgatttggccatgaagctgcgggacgccgtctatgaattcggcacgcccaggcagcttctttttggtgatgtgatcgcagccgttctgaggaaaaagctggaaaactccgcctggaaggctttgccgtcatattccgggctgccccgagacaaatggctccatgcgctgcaaaaggattcgttcatcaaggaactctggcctgcacaacaccttttgggccaggcggatgttctcaaaggcgagtctgccatcattcaaatgcccaccagcgctggcaaaacgaaggcaacggagctgatccttcgaagcgcgtttctggccgaccgcgtgtcactggccatcatcattgccccgttcagggcactgtgccatgagatcaagaacagtctcgtcgaggcattccacaacgaacccactagggtggatgagttatccgatgccctacagaccgacttcgagattgccgaactcctggggcacaaacagattctggttataacccccgagaagctgctttatgttcttcggcatgctcccgagctggctgcccacgttggcctgctggtttttgatgaaggccaccagttcgacagcggcacccgaggcatcacatacgagctgctcctgacgtcgctgcgctccatgattcctgaaggaacccagaaggtgctgatctcagcggtcatcagcaacgccgaggctgttggagaatggctgaacggggagcccaatgtcgtcgaaggaacaaccctgattccgactttcaggtcggtcgggttcgcgagctggctcgatcagttgggaaggatcgagtacgtcgacagccgtgatgccgaacaaggcgagtttttcgttcccagggtgattgaaagattcaatctcgggaaaagaggcagagagcagaaagaacgtcactttccagagagggacgatggccaggccattgcactctatctcggtataaaactggcccctaatggaagcatcgccatcttctgtggcaaaaaatcaacagcgacaagcatctgtgaaaaagcggtagaattcattgatcgtggtattccgtttccactcccacaagaattctcagatcgaagggaggttgaacggctccattacctccatgctgcgaatcttggacctgaagcatcggcttcaatgagtgccgagcatggcatattttctcatcatggcaatacaccacatggcatccgcctttcagtggaacacgctatgcgtgaaaacctcgtgcggttcgttgtttgcacctccacactggcgcagggcgtaaatctcccaattcggtacctcattgttaccagcgtctaccagggcatggagcgcatcaaggttcgcgatttccacaatctcattggtcgagcgggccgagcggggatgcatactgaaggcagcattttgtttgccgaccctattgtgtatgacaagcgccgcgaccgaaaagacggttggcggtgggatatagtcaaggagctgcttgatccaaccaagtcagaggaatgcgcaagcagcctctttcaactgatccctctggttatccggaatgaccgtaccaagtcaaaagacaaaaagaatcattctttgacatgggacatcctgtcttttgccaaagctcatatagccgggtgggattccctgaatgaaattatcaccaagattgctaaacaatacggtggaaacggtttcacggtcgatgcggttaaaccgcaattcgaatttttcagcctgactctcgcctccatcgaaggctttcttctctccaactgggatgctgttgataatgggttgacggaggaagacattgctgatctcgcggaacagacattggcgtacttcttggctgatgatgagaaacgggaacagattcaagaattgttcaagcttctggcggaaaacatatcagagaatattactgacgttaatcggcggaaagcatttggcaaaacactctatggtgtcaacgatgccaaggcgattgaggggtgggttcaagataacgctgatgaacttcttgacgcccaaaatggagacgaagctcttgacctcgtgtggccattaataatggggcatgtacacaacaaagctttcaataagttcgacaagaaggacgtcctgaaagaaattacgaagaagtggatttcaggaaccccatttcatcagcttttcagaattgccgacaataataaatgcaagctcggtaaggggaagaggcccaggaaagtcaaaatcgaaaatatcattgatatctgcgagggtggtcttgcctacgatggtgctcttcttgtgagtgcattgtgtgaatttgtagaaatgctggaccgcgaaggaacaggtgacccgatcaatcgtctccaaattttccaaaagcgactgaaatatggtctgccgaccgaaaccaccattgccctttacgagcttggcttttcggaccgcgtcatcgctcaggacctcgccgcatccttgaacttggcagcgactcagaagaaggatctcgtgaaggcgctgaaaaaagatcgggacggagccagggcggtaatggagaaatacccaagctatttccaggagaggatgaatgaactcctgtag

SEQ ID NO: 56534 - DNA, 849 bp, Escherichia coli DEC14C; identical to SEQ ID NO: 56532

SEQ ID NO: 56535 - DNA, 3144 bp, Escherichia coli DEC14C; identical to SEQ ID NO: 56533

SEQ ID NO: 56536 - DNA, 849 bp, Escherichia coli DEC14D; identical to SEQ ID NO: 56532

SEQ ID NO: 56537 - DNA, 3144 bp, Escherichia coli DEC14D; identical to SEQ ID NO: 56533

SEQ ID NO: 56538 - DNA, 780 bp, Escherichia coli KTE90
atggcaaatttcgaggactggtgtgattcgacagagcgtaatatcagcgaccattatttgcagtcaataacggccagggatgccgagtgtatgttcggcgttcaggttatggccgcgctaatacctgaacactatgcgtcaccaagaaatatcgctaacgcatttgaagctctaggtaaaccggggctggcggcatacattgctggaaaattgcctgaaacgaaacagattcgttccggtgatttgggtgagatatttgcaactgaatggataaatgcacgtagcaatggctataaaacgcctataaaaagattgcgctggaaagatcatcgcaatatgtcgatgcgtggtgaggacgtcattggtatttacatagatcagtcttctcaacaactttttttccttaaaaccgaagcgaaaagtcgcgccaaaatgacgggagaggtggtttctgaagcccgcgataacttgaataaagagcaagggctgccatcttcacatgccctaatgttcatagcagatcgcctgaatgaacagggtgaggagcttttggctaaagcgatcttaaatgcaacgcttcggcaaggaattgttccaggatgcgtccggcatcttatctttctattatcgggcaactcttcagaaactatgctgaccacttcaattgaaaagtatacaggtcaaaataatcagtggggtgtttgtctaagaattgctcgccatggtgagtttattgccgcaacttttgaaaaggtgattagcgatgccagcaacagctga

SEQ ID NO: 56539 - DNA, 3525 bp, Escherichia coli KTE90
atgccagcaacagctgatgaaattatcgaagctattaaggaagcttcagctgtaggttttcgcgggcgcctgattgcacgcgggcaagcccggtcggtgatctggcgagacggtgacttgccgccggatgcaccggagtttagcgcactgctcagtcaggaccttcaaggctatgcttatgccctaatcgatctcggccttcgtcttcgagaacttaatggagacgacgcctatgcgcgaattgcttttgaacaggccggaaccgcactcgagtcggctattgctaaaggaaaacgcgacagccgggatacagattttcacttcgtaatggctgctgcaagctatcaccttgcgcatctttcagcacgagcctattcgttactcgcaatggttggtcaggatgataatttttcaccaatagagagggctcttacacaactgatccggcgtgatttgcgtactctgcgcgataatgcgttgggctttcggctcagaggtgatggcagtgacgtgaaaattactgaaatcctccaggctcgcctaaacttgccgcaagacgagaacggtgacagtgagtcagaggaggacatcctttttgatgggcttgatttggcactgactgacgcctatatgtcggccatttctctctaccttctcgctgtagaaaggggagaatcacgtttgctttccagggctattgaaaaattaagaattagtctaagtatatgtgctcagtttaatatgctaccccagtggtggctaaactttattaccattcatctgttatctgacctttggtcagatacattccatgaaagattgccactggttccagttggtggtgacgctgctgaatggcccgcgcttcgggaactgtttattgcactgcttcaaagacgacctcgagccgaaattgatctctggccatcgcagagagaggccgccggacgctctgttaatgacaatgacgatttggttgtttcgttgccaaccagcgctggaaaaactcgtattgctgaattgtgtattcttcgctgtctggcgggtggcaagcgtgttgttttcatcaccccgcttcgtgcgctttctgcacaaacagaagccactctctccagaacatttgggccgcttgggaaaacaatatcaatgctgtatggcagcattggcgtaagtggtatggatgaggatgcaattcgccagcgtgacatcgtcgtcgccacgcctgaaaaacttgactttgctctccggaatgacccgtcaattattaatgatgtaggactttttatttttgatgaggggcacatgattggggccgatgaacgagaggttcggtatgaagttcaaattcaacggctgttcagcagacaggatgccgatacgcgcagaattgtctgcctctcggcaattctacctgatggtgagcaactcgatgattttgccggttggctccgtcgtgacaagcccggaggaccaatcaaaaataattggcgaccgacccgcttgcagtttggcgaggtcatatggtccgctccagcaggtcggcttaatctcagcgttggttatgaggcggcttgggtatcgcgttttatcgtcagcagacaaccgccaaaggttaaattacctaataaaaagcagcgaacaaaaatgtttccctctgataacaaggagctctgcttagcgacagcctggcgtctaattgaagatggacagaccgtacttatctactgcccacttcgccggagcgtcgaaccgtttgccgagacaattgtcgatctgcatcagcgcggactactgccatctttatttgatgctgccccggacattctggatacggctatctcgctgggagaagaatggttgggggcacacagcccgatacttgcctgcctacggttgggcgtggctcttcatcatggcgcattgcctacggcttaccgcaaagaaatcgaacgtttgctgcgagatggggtacttaaagtgacgatctcatcaccgacgctagcacaaggtcttaatctttcggcaacagctatcgtcatgcattctcttcatcggaatcgcgagcttatcaaagtgtccgagttcagaaacgtcataggcagagcagggcgcgcatatgtagatgttgaagggctggtgatttatccaatattcgataaagtaaataaacgccagactaactggcataccctcacatctgacacgggggcccgtgagatggagagcggactaatacagcttgtctgtgtgttattgattcgcatgcatacacggcttggtggggatttaaaagcactcactgaatatgtgaccaacaacgccgtagcgtgggaatttccagaaattatgaccgaatctccgcaagaaagagatattgcgcaggccatctgggaaaaacaactttcaacgcttgatactgctattctgagccttcttggtgagaatgatatcccggatgaccagattgaaactgctcttgatgacattcttcagtcttcactttggcaacgcagtttgcagcgttatagggatgagaatgaacggattttgctgaaatcgggactcctgtcccgcagccgctacatctggcagcgctcaacggcagcagggcgccgggggtatttcctgtcgggggtaggacttacaaccgggctacgacttgatgctattgccgctaaggccaaccaactattgattgatgcgaatgcggctataatgggcggtgatgccgaagaggcaattgctgctatcacggcgctcgctgaagaggtctttaccttctatccgtttatacccgatccattgcctggcgactggagaggtattttacgttcctggctattgggtgaacccatgactaacgtcgcgaatacgcaggcgtctgaaacgcttcaattcgtcgagaatgggctggtgtatcgacttccgtgggcaatggaggctattagggtacgtgcaacagctaatggagacctcataggtgatacagataccacgctagacgattatgagttaggttttgcggttgctgctgttgaaacaggtaccttgagccgttcgtcttcactgcttattcaggcgggttttagctctaggcttgcagccataaaagtggttacagacactactgccgattttcaatccggccaggagcttagaaggtggctgaactctgaagaagtgataagccacacggataatcatgactggcctacacctgaaaccagagtgatgtggctggaattcttgggtagtctcagccccaaaggcagccaggtttggagtcgtcatcgttataacggaatggtggactggagagatactccggcagtgatcggcacaccattgcagctttacactgttgatggtattcatcacgtactggctgatgatggcactcctctgggaagtataaatggcagaattaacacaaacagaagaggtcttcttagagttgaggtggatgatgagaatggtcgtgccatgttcgattatttaggaccggacgactttatttctacctga

SEQ ID NO: 56540 - DNA, 780 bp, Escherichia coli KTE91; identical to SEQ ID NO: 56538

SEQ ID NO: 56541 - DNA, 3525 bp, Escherichia coli KTE91; identical to SEQ ID NO: 56539

SEQ ID NO: 56542 - DNA, 780 bp, Escherichia coli KTE184; identical to SEQ ID NO: 56538

SEQ ID NO: 56543 - DNA, 3525 bp, Escherichia coli KTE184; identical to SEQ ID NO: 56539

SEQ ID NO: 56544 - DNA, 810 bp, Escherichia coli KTE19
atgccatggactaatgagcatattcagtggctccaggatactggaaatgtcctgacgttagcatgtggtagggaagcaaaagttttctgctttcgtcatgatattaatgatcaagcaaaaatgactgcatgggccaaacattttagaaaccattattgtaatgataatcaaattgatttgattaaagcccctgggcaaacaagatcagattatttacttacgatgaagttcccaaatgctactacagcacctgggccaagtattcgagcaggtgattttgcagaaatattaattgctgattatttgacatatttacggaattatcttgtacctagaactcgttatgatcgtaaaggtgtacctaatgaatctaccaaaggttctgatgtattggcttttaaacaagtacaggctaatccaagggatgatgaattattagtttatgaagtcaaagcaaaattaagtgccggcacaaaatcaatgcttcaagaggctatagatcactctgctaaagatcatttacgtttggctgaatctctgaatgggataaaacagcgtatgattgatcgtaatgaactagggagcgtgggagtaataaatagatttcaagactcggttaatcaaccctacaaattgagatttggtgcagctgcagtatgttctgatagcgcttatgacgctgcaatacttgctggtgccaattctgaagcgcatccttttaatcaagatctagaacttttagcaatccatgggagcgaactgatggaacttgctcatgcattatacgagagagcagctaatgagatttga

SEQ ID NO: 56545 - DNA, 3114 bp, Escherichia coli KTE19
atgagatttgagaatcaatcagcaaagctactttcgattactaaatcaaaagctaagatgtatgaatttgggttggatgaagtgcaccatattcgtttaactgaatcgccaagtaatttattattaatgactattggcatattgggtgatgtgtgtcgtgaagagttatcagttgaaaggaatcatgttcttttcgagcaaaggaaactagagttaagaaatgtagcaagatattttgatgctttaatgggttcaaggcaagaaataatatatgattattatctttgcttattaggagcagcctcatattatcttgctgatatgccgggtagtgcaattgttctatctaataagctagaaaatttaaataatggtttaactgaatctcgtatagaattacttttggagtggttgttaaaatcgaaatataatgagccgatgacatttgataatgaaaaagaaatttccaaattaatttgttcattaacaagtatggtttgtgttttctttaatgaaaatattgatgtaactactgatgtgttagaagtgacaaaatcgttgagagatttttgtcatgaaagaggaagtgatagagagttattgttagccgatatcgtcgcctcggttattaaacataaaataaataactcttcatttaatttactcccgcaatatacaggattatctattgaagcatggaaacctgccttatcaaagccaacatttatcagggagttttggccggcccaaaagctactcggtgatgctggagtatttagtgggacttccgcagtaattcagctgcctacaagtgccgggaaaacaaagtcagccgagctgattatacgctccgcttttttatctggcagggcttctgtagcggtgattatagctccttttcgttctttatgtcgggaaataagtacttctttagccgcagcgtttggtaatgaagacgtcaaaattaatcaactcaatgatattccacaaatagatgaatttgacgatgcattatttgcagaaataattgaaatagaagaaagtgatgttacaccccttacagtaattgtagcgactcctgaaaaactaatctatttattgcgccacaaaccagagttatcggaaagtatatcactcgtaatttatgatgaaggacatcaatttgatactggatcgcgtggagttacatatgagttactcctaaccagcttgaaacgcgaacttgaaaaaaacactcagcatgttttaatctctgccgttttatcaaatgcagaatcgattggaaattggttatatgacggtgagggaaaggtagtcaacggagcagaatgtttatctactgaacgtagtatagcattttcaagttggaaaaggggtatgggacaatttcattatatagatcctttcgatattaatacagaggagtttttcgtgcctagagtaatggaatcattagaaattcctaggcaaggaagagagactgcagaaagattctttcctccacgtgacgataaatcattaattgctgcgtacttgggtatcaagctctgtgaacatggtccggtagctgtattctgtggacaaaaaagctccgtcataaaaatttgccgagaagttatcaaaccattagagcgtattgactcgctcaatgctcctatagttcatagcgatcaggatgagataaaaaaaataggtaaattatccgaagtccatttaggaagtagttcagttattacgaaagccattaaaagagggattcttccccacagtgcgaacattccaaatggtttgcgaatatcggttgaatatgccatggagaatggattagggcgttgtgtggtatgcacatctacattagctcaaggtgtcaatcttcctattaaatatttagttgtatcaggtgtgtttcaaggtgaaaaacaaatttcaacacgtgatttccataatcttttaggacgggctggcagggctgggaaacatacagaagggagtattatattcgctgatacggaattatttgatcaacgatatacaagtaaaaggtggcagtggtcccagatgagtaatttattagacccttctaagtctgaggagtgtttaagtagtcttttaactctagtaaagcctttttacgaagatccttttgccattgatcctatagattttctacaatccccagaaacttatcaacaatccgttattagaaatggtcatctacaacaaatcgatgttaaggatcttttgaagcaaatgagccagagagttaactatctagaaagtcttgaaagttttctgctagctaatgttaatagagatgaaatgcttgaagatcaagcattagtggaagtgtataaaaagacttttgcattctctctagctaatgataatgagaaacaaaaactcgcagaagtgttcacagttgttgccgaaaaggttaagcaaattgatgaagaaaaacgttcttactatggtagagcattactgggtattcacgagttagaatatatcgaaaattggattaaaacaaatgtcgagttactatctactgtgcaaaatgtagctggcatgataactgtattgtggccaatgattgaaagcctagcgacagataatagtttaggtaaattgataggagaaggagcaggtttaagaattgcaaatctttggtgttctgagatttcatacaatgagatcttatcacaagctaaccgtaataactttaaatttagagctggtagccaagaacgtaatttgaaaatagaaaatatcattgatatttgcgatagtagcttgggctatgatgcgatgctagttgtaggagcgtgtgctgatttattagagaatatgtttagagacaagccagaaatagtaatggttagacaattacaaatggctttacgtattggattatcagatggtttatcattggatctttatggtattggattgacggatagagcggtagcatcaggtgtagcgaaggtacttagagactctggtttagatatagattcatatagtaaggagatggctttctcacatcgacacattattatgcctgagctgatcaagtatccaaccgttttcacagcttcgctctatggcggagaataa

SEQ ID NO: 56546 - DNA, 777 bp, Escherichia coli KTE41
gtggggctatatgagaagtggtgtgaatccattaaagaaaatgatgaacgcaagtattactggacgtatgtcgagaaggacggcggccgcgatgatatccgcgaggaccttgctgagaccattcgctcgcactacgaacgacttgaacgcatcgccgatgacgtagggcgactaggatacaaggttgctgccaagatcctccgcgaggcaatgcctaataccccgaagggccgctctggcgacctcggcgaaatccttgcgactgaactagttgaggaagaaatcggtctgcgggtacccgtgcgccggctccgttacaaggacggccgtaacatggccatgcgcggcgatgacatcatcggcgcgggctaccaaggcaataagctctggctgctaaaaggtgaagctaaaagtaaccagaagcttggcaaaaccacggtcaccgccgcccgcaaggtcctcgaccgcgacaatggccgctgcacgcctgactcgctgctgttcgtcgccaatcgcctgctggagagcaacgacgctggcgataacgcactgggtcgcgaccttcgtgacgaagtgggtcttaagtctatgccagccgatcgcatcgaccacatgctcttcaccgtgtcgggtaacggccctcacgcttccctgaaagagaaccttgaagccgctggagtcaacagggaccattacgtcgtgaacattcacgtcgaagaccatcaggatttcattgcggcaatgtacctagaggcggaagatcttggagacgactga

SEQ ID NO: 56547 - DNA, 3501 bp, Escherichia coli KTE41
ttggagacgactgaagaattaagcaccttcctgacggccgctacagttgacggtattctcgggcgcctcctctatcgcggtgcagcttggtcgttgatgcgcaagaatggcgtattgccgcaaaacgctccgccgcttggcgcaaccatcgaaacagatcttgccgagcacggttttgccctgcttcgaggcgcaatggcactgcgggctcaggctggtgcttcggaactcactggcaaggcctttgagcgcgcagccaacgccttcgaagccctcgtgcgtaatggtgatccagagtcgcctgatcgcggattccgccgcaccattgctgctgcagcctaccatctagccggcttctcggccgtcgccttttcaatcttcaacgagatagaggaagaccttaacgtctcacccggggaaatagcgatccgacacctgatactgcgcgatctcgatcaacttcgcggcttcgttcgcgactggttgaattatggggctcacggcgatgagcagatcgcggcggccctgcagggcggagatgctgacgtcgacgaagtactgtcgacaattctcaatacgacgatctgccgtgccctggcatttttcgacttcgcgcttgagacgggcgaggttgagtcgttcgaagccgcgcgagggctccttaccaccgctgtcgggcttgccgacaacgctgagaacgtcccgctgtggtggatctcgaacctctgccgtcacctgatcgacgacttgtggcaacactcactacaccagaatttgccgactgagccacccgagggtgcggaggaaagatatcccgacctgcggcggttgtttatatcttccctttacgcccgcaagacctcagaagtggagctatggccatcgcagcgcgaagccgcccagcgctccacagacgtcacggacgatctggtcgtcgccctgccgaccagcgcgggcaaaacacgggtggcagagattgccgcgttaatgaccctatcctccgcacgccgggtgctaatcgtcacaccgctgcgcgctctttcggcccagaccgaacgaactttcaggaagaccttcgcgcccctagggtttggtgtctcttctctctacggcgccagcggcctttcggccggtgatgaagacgccctccgcacacgggagatcatcattgcgacgcccgaaaaactcgacttcgcgctgagaagcgaccagacgttgattgacgatgtcggcctgatcgtcctcgacgaaggccacatgatcggtcctagtgagcgcgaaatccgctatgagacgctcgtgcagcgtctacttcggcgcacggatgcggcagagcgccgaatagtttgcctttccgcgatcctgccaagcggcgacgaactcgacgaccttaccgcatggattcgttccgacgaacccggggagcctgtgcgttccgactggcgcccaacgcgccagagattcggcgcgcttacctggcgaggtaaggacgcgttgctacggctcgatctagacgacgatggccccttccttgacaaattcgtcgcggaaaaaccagcgctcgggaaggagaagaagccctatccacgcaagaactcgcacctcgctctgttcgcggcatgggagttcgcgagccagggcaagcgcaccttgatcttctctacccaagcaaactgggtcgagagctacggcaaacaagtcgtggacctctgcaagcgcggctatctggactcgttgctggaagacgagactccaatcgcccgcgccctagaagtcggcaaggaatggttgggcgaggatcacccagccgtggccagcctgaaggtgggcgttgccattcatcacggccgactgccgagcccgttcctacgcgaactggaactgcttctatccgaaggagcgctaaaggtcattgtcgcttcgccgacgctctcgcagggcctcaatctcaacgctgccgtgctgcttgtgcccgcgctatatcgcgcctcagagaagatcaaaggagaggagttcgcgaacgtggccggccgcgccggacgtgcattcgtcgatgtcgaggggctgatcgtccatgtcatgttcgacaaaatcaaatggcgaaagaaagaatggagggaactggtcgcctctgccaaggacaggacgcttaaaagcggccttattcagatcgttgccgaaatccttgagcgtctatcacgcgagggcgtcttggatatagatgacgcctgggaatatctcgccaacgcccgcgaggcttggaggtcacctgaagaagaagcagtggtagcagaacgactggcagccgcagtggaatacgacgcttccaccgacgatgaagacgagacggatgacgaggaggaagccatcgacgaggagcccctgtctcagctcgtcgaacgcctcgacgccaccgtattcggtctgatcgaagccctagacgctgatcgcgccgatctacctaaacttctagacgaggcgctcagggggtcactctgggctcgccaaattgctcgggaggacgaggatgtcgcttccctgcaccggaaggtattcgaagcacgcgctgctctcatctggaaagctaccaccccccctacgcgacgcgggcatttcgcgatgggagtagggctcgaagctggcctcctcatcgacgctatggcggacgagttggccgaactcatcgacagggcagacagtgcagcgttgagcggcgacatcaacgaactcgccgatgctctcggcggactcggcgaacgcctgctgttcatgcggcctttcatccctgacaaggcgaacgcgctgccgccgaactggaaagctatcctacgtagttgggtgtccggggaagaagtctccaagatcggcccgcagaacatgcgggcggtcgaagatgccttcacctatcggctagtctgggcgctagaagccgtccgcacccggcgcatgtccttcggctggtcgccggatacggtggcgggcgccgctgcggctgcggtcgaaaccggtgtcccacagttcatgatggcgatgctgatccgcgcaggcctgccgtcacggcgcgcggcaatggcggccatcgaagatgctgaaccaatcttcgtcacgcccgcagaaatgcgggcctggcttgaatccgacgagattacggccaaaaccgacgcaggcgactggccaacacccgacacctccgcgttatgggcccgcttccgaaccgaagctctcagcggaggcatccagaaatggtccgtcgaacgctataagcgcctactcgataccgagtcctccccgcccgctggcctctatcgaatcctcaccgacgaaggggacgcgcggacttggctgacaacccccgactaccagcggatcgccgtcttcaagaagccagcggttgatcccaagcccagtctattctcgggacagttgccgggcaaaacccggctcgtggatgctctacgcgtcggccgcggaaagttgcgttggccgactgccgacgtctaa

SEQ ID NO: 56548 - DNA, 780 bp, Escherichia coli KTE68; identical to SEQ ID NO: 56538

SEQ ID NO: 56549 - DNA, 3525 bp, Escherichia coli KTE68
atgccagcaacagctgatgaaattatcgaagctattaaggaagcttcagctgtaggttttcgcgggcgcctgattgcacgcgggcaagcccggtcggtgatctggcgagacggtgacttgccgccggatgcaccggagtttagcgcactgctcagtcaggaccttcaaggctatgcttatgccctaatcgatctcggccttcgtcttcgagaacttaatggagacgacgcctatgcgcgaattgcttttgaacaggccggaaccgcactcgagtcggctattgctaaaggaaaacgcgacagccgggatacagattttcacttcgtaatggctgctgcaagctatcaccttgcgcatctttcagcacgagcctattcgttactcgcaatggttggtcaggatgataatttttcaccaatagagagggctcttacacaactgatccggcgtgatttgcgtactctgcgcgataatgcgttgggctttcggctcagaggtgatggcagtgacgtgaaaattactgaaatcctccaggctcgcctaaacttgccgcaagacgagaacggtgacagtgagtcagaggaggacatcctttttgatgggcttgatttggcactgactgacgcctatatgtcggccatttctctctaccttctcgctgtagaaaggggagaatcacgtttgctttccagggctattgaaaaattaagaattagtctaagtatatgtgctcagtttaatatgctaccccagtggtggctaaactttattaccattcatctgttatctgacctttggtcagatacattccatgaaagattgccactggttccagttggtggtgacgctgctgaatggcccgcgcttcgggaactgtttattgcactgcttcaaagacgacctcgagccgaaattgatctctggccatcgcagagagaggccgccggacgctctgttaatgacaatgacgatttggttgtttcgttgccaaccagcgctggaaaaactcgtattgctgaattgtgtattcttcgctgtctggcgggtggcaagcgtgttgttttcatcaccccgcttcgtgcgctttctgcacaaacagaagccactctctccagaacatttgggccgcttgggaaaacaatatcaatgctgtatggcagcattggcgtaagtggtatggatgaggatgcaattcgccagcgtgacatcgtcgtcgccacgcctgaaaaacttgactttgctctccggaatgacccgtcaattattaatgatgtaggactttttatttttgatgaggggcacatgattggggccgatgaacgagaggttcggtatgaagttcaaattcaacggctgttgcgcagacaggatgccgatacgcgcagaattgtctgcctctcggcaattctacctgatggtgagcaactcgatgattttgccggttggctccgtcgtgacaagcccggaggaccaatcaaaaataattggcgaccgacccgcttgcagtttggcgaggtcatatggtccgctccagcaggtcggcttaatctcagcgtcggttatgaggcggcttgggtatcgcgttttatcgtcagcagacaaccgccaaaggttaaattacctaataaaaagcagcgaacaaaaatgtttccctctgataacaaggagctctgcttagcgacagcctggcgtctaattgaagatggacagaccgtacttatctactgcccacttcgccggagcgtcgaaccgtttgccgagacaattgtcgatctgcatcagcgcggactactgccatctttatttgatgctgccccggacattctggatacggctatctcgctgggagaagaatggttgggggcacacagcccgatacttgcctgcctacggttgggcgtggctcttcatcatggcgcattgcctacggcttaccgcaaagaaatcgaacgtttgctgcgagatggggtacttaaagtgacgatctcatcaccgacgctagcacaaggtcttaatctttcggcaacagctatcgtcatgcattctcttcatcggaatcgcgagcttatcaaagtgtccgagttcagaaacgtcataggcagagcagggcgcgcatatgtagatgttgaagggctggtgatttatccaatattcgataaagtaaataaacgccagactaactggcataccctcacatctgacacgggggcccgtgagatggagagcggactaatacagcttgtctgtgtgttattgattcgcatgcatacacggcttggtggggatttaaaagcactcactgaatatgtgaccaacaacgccgtagcgtgggaatttccagaaattatgaccgaatctccgcaagaaagagatattgcgcaggccatctgggaaaaacaactttcaacgcttgatactgctattctgagccttcttggtgagaatgatatcccggatgaccagattgaaactgctcttgatgacattcttcagtcttcactttggcaacgcagtttgcagcgttatagggatgagaatgaacggattttgctgaaatcgggactcctgtcccgcagccgctacatctggcagcgctcaacggcagcagggcgccgggggtatttcctgtcgggggtaggacttacaaccgggctacgacttgatgctattgccgctaaggccaaccaactattgattgatgcgaatgcggctataatgggcggtgatgccgaagaggcaattgctgctatcacggcgctcgctgaagaggtctttaccttctatccgtttatacccgatccattgcctggcgactggagaggtattttacgttcctggctattgggtgaacccatgactaacgtcgcgaatacgcaggcgtctgaaacgcttcaattcgtcgagaatgggctggtgtatcgacttccgtgggcaatggaggctattagggtacgtgcaacagctaatggagacctcataggtgatacagataccacgctagacgattatgagttaggttttgcggttgctgctgttgaaacaggtaccttgagccgttcgtcttcactgcttattcaggcgggttttagctctaggcttgcagccataaaagtggttacagacactactgccgattttcaatccggccaggagcttagaaggtggctgaactctgaagaagtgataagccacacggataatcatgactggcctacacctgaaaccagagtgatgtggctggaattcttgggtagtctcagccccaaaggcagccaggtttggagtcgtcatcgttataacggaatggtggactggagagatactccggcagtgatcggcacaccattgcagctttacactgttgatggtattcatcacgtactggctgatgatggcactcctctgggaagtataaatggcagaattaacacaaacagaagaggtcttcttagagttgaggtggatgatgagaatggtcgtgccatgttcgattatttaggaccggacgactttatttctacctga

SEQ ID NO: 56550 - DNA, 771 bp, Escherichia coli UMEA 3108-1
atggcgaattttgatgtttggtgtgattctgtaaacgttaatttaggtgcgaacttccttcaaaaactcactgctaggggcgcagattttgataacagcgtggtatctaccgcttccattgtgcctcaccattatgcctcacctgaaaacatcgcaacagcttttgaattacttggtaagccaggggttgcaggatttatcaaagattttctccctatttctaagcaaactcgttcgggtgatattggtgaaattctggcaactgagtggattaatgcaagaagcaatggttataaggtcccacttaatcggctacgttggaaagatcaccgtaatttagctatgcgtggagaggatgttatcggtatgtatatcgatcctcaaactgaaactcttttcttccttaaaacggaagcaaagagtcgtgcaactatgaacgctagcaccataatagatgcccgaaataacttagataaagagcagggattgcctaccgcacatgcactggcgtttatcgccactcgtcttcttgaaacaggacaaaaggagttggggcggcagattcttaaggcatcgttgagccagggaatacagcctggtcacgtccgtcaccttgtttttctgctttcaggtaatgcctctgatgtattgcttactacatctatcaatgcatacaaagggaatattcagcagtttggagtcactgtgatggttgctcgccacggtgaattcatccaggaggtttttgatagggtgattagccatgcttga

SEQ ID NO: 56551 - DNA, 3525 bp, Escherichia coli UMEA 3108-1
atgcttgaaacttctgaagaaattattgaagccatccgcgctgccactgctaccggatttcgtggccgattgattgcccgtgggcaagctagggctatgatctggcgtaacggcatattaccagacgaggctcccgaattcacttttcaattaagtgaagaccttcaggggtacgcttactcacttatcggcctgggtttaagactccgtgagataaatggggagagcgcctattcacgacttgcgtttgagtatgctgccactgccttggagtcagtgattgcaaagggggaccggcacaatgacgatagtgattttcatttcgtcatggccgcagccagttatcatctggcgcatctctctgctcgtgcttattctcttttagcgatagttaatgaagatcagaatttttcagctatcgaacagatcttgacgaaacttattcaacgagatttcagcacactacgctccagtgttctttcctatcgcgccgatggtgaaggtagtgaagagagaattatagaaggaattcgaggagcggcgttcccttatgaggaacgcgatgatgattctgctgatgtggaacatgaccctttgttagaggggctcgacacagctctaaccgatatctacatgtcagcgatttctctttacattctggccgtcgaaagaggtgagcgtatattcctcactaaggctattcataaattacgtacaggccttgaggtttgctctcgctttaatatgttgcctcagtggtgggtcattttaattactattcaccttttatctgatctctggtctgatactttccacgaattactgccgacaaactctgtcggtggtgaagctggaacgtggccagatctgcgcgaggcgttcatttcacttctcatgcggcgctcgcgggccgaaatcgatctctggccctcacagagagaggctgcattacgtgcagttaatgatgaagatgacctagttgtctctttaccgacaagcgcagggaaaacacgtatagccgaattgtgtattcttcgttgcctcgctggcaaaaaacgaattgtctttgtcacgccacttcgtgcactttcagcgcagacagaagcttccctctccagaacgttcaatccccttggtaaatcgatttctgcactttatggcagcatcggcgtcagtggaatggatgaagacgccattcggaagcgcgacatagtggtcgctacgcctgaaaagctcgactttgcactgcgcaatgacccttcacttattaatgatgtcggactattcatttttgatgaggggcacatgattggggcagatgagcgtgaagtacgctatgaagttcaaatacaacgactgttacgtagacaagatgctaatgaacgcagaatagtctgtctatcagctattttacccgacggtgaccaactggatgatttcgccaattggttacgtcgcgataagcttggtggtgtgatcaagagtgattggcgaccgacacgactacgttttggtgaagtaatctggatgggtaataccggcagacttaatctgagcattggcgaagagaaaacatggatttctcgcttcttgaatagtactccgcctccagtaattaaactttctggaaaaaagcagcgcaaaaaaacctttccaagcacgtctaatgagctctgcctcgcaactgcatggcgactggttgaagatggacaaacggtgcttatctattgtccattacggagaagtgtggagccgtttgctgaaatgattgttgatctacaccaacgtgggttactccgttccttgtttgatggggatatagctgttcttgcccaagctttagctcttggagaagaatggctaggcgctcacagcccgataatagcatgtttgcgccttggagtagctcttcaccatggcgccttgccaacagcctaccgtaaagaagtagagcgattgctccgtgatggcgttctaaagttaacagtatcttctcctactcttgcgcaggggcttaatctgtctgccacggcaatagttatgcactcactgcacagaaataaacagcttatcaacatctctgaattcaggaatgttataggtcgagctggacgagcatatgtcgatgtggaaggccttgtcatttatcccatttttgaacagatgacaaaacgtcaaagaaattggagtagactcacggaggacatgggagcaagagaaatggagagtggattagtacagcttgtaatctctctactgaagcgaatgagtcaattactgggcgatgacatcgatgtagtcagtgattacgtgctaaataatgcgatggtttggtcattcccaataattgcagcggaagatgcttctgaaagggaaagacaggctgctctctgggaaaaacaaattgcaacgttagatacagccattctgagcctgattggtgaaactgaaatactcgacattgatattgaagccactcttgatgatgtattgcagtcttcgctgtggtaccgaagccttcagcgttaccctaacgatagttatcgtagattgattcagtccggattgttagtacgcagtcattatatctggcatcactcaacgccagcagcccgccgaggatatttcctgtctggggtagggctcaaaactggcttacagctcgatgccattgcacaagttgctaatcaaatactgattgaagctaacggtgcaatactattaggtgatgaagagagagcaattgctgcaattactgccttagctgagcaagtatttaccttctatccttttactccaacacctttacctgataattggcaagcgatcctacgctcgtggttgttaggtgaacccataactactgtcgccaacgtagtgaaatcagaaacgctacagtttgtcgagactggtctcgtgtatcgacttccttgggcaatggaggcaatccgggtgcgtgctatcgcgaatggagatattgttgatgatgatggcttaaccatggatgactatgatcttgatttggcggttgctgcacttgaaacaggaacacttaatcgttctgtatcattactgatccaagcagggtttaattcaaggctagcagcgataaaagttgtggcagacaccggggctgatttccaatctggcagagagctccgaaggtggctgcgatcagaccttgtgagttactggagtgaatttgcagactggccgacacccgaaactcacgcaatgtgggttgattttgccaaagagataaaccccgaagaagaccagacatggacgcttcgtaaatatacaagtatagtcaactggaaggctcctgttcctcaacctggaacaccgcttcattttcatcaaatgaatggagttaattacatccttgctgaggatggcttccctttaggaagcatcgcagctgcaatcaacacagaaagaaaaggtctactgcgtgttaaggttggagataagttgaacgtagagcttgattatatcgggccaaatgatatcagagcacgctaa

SEQ ID NO: 56552 - DNA, 780 bp, Escherichia coli 1-392-07_S4_C2; identical to SEQ ID NO: 56538

SEQ ID NO: 56553 - DNA, 3525 bp, Escherichia coli 1-392-07_S4_C2
atgccagcaacagctgatgaaattatcgaagctattaaggaagcttcagctgtaggttttcgcgggcgcctgattgcacgcgggcaagcccggtcggtgatctggcgagacggtgacttgccgccggatgcaccggagtttagcgcactgctcagtcaggaccttcaaggctatgcttatgccctaatcgatctcggccttcgtcttcgagaacttaatggagacgacgcctatgcgcgaattgcttttgaacaggccggaaccgcactcgagtcggctattgctaaaggaaaacgcgacagccgggatacagattttcacttcgtaatggctgctgcaagctatcaccttgcgcatctttcagcacgagcctattcgttactcgcaatggttggtcaggatgataatttttcaccaatagagagggctcttacacaactgatccggcgtgatttgcgtactctgcgcgataatgcgttgggctttcggctcagaggtgatggcagtgacgtgaaaattactgaaatcctccaggctcgcctaaacttgccgcaagacgagaacggtgacagtgagtcagaggaggacatcctttttgatgggcttgatttggcactgactgacgcctatatgtcggccatttctctctaccttctcgctgtagaaaggggagaatcacgtttgctttccagggctattgaaaaattaagaattagtctaagtatatgtgctcagtttaatatgctaccccagtggtggctaaactttattaccattcatctgttatctgacctttggtcagatacattccatgaaagattgccactggttccagttggtggtgacgctgctgaatggcccgcgcttcgggaactgtttattgcactgcttcaaagacgacctcgagccgaaattgatctctggccatcgcagagagaggccgccggacgctctgttaatgacaatgacgatttggttgtttcgttgccaaccagcgctggaaaaactcgtattgctgaattgtgtattcttcgctgtctggcgggtggcaagcgtgttgttttcatcaccccgcttcgtgcgctttctgcacaaacagaagccactctctccagaacatttgggccgcttgggaaaacaatatcaatgctgtatggcagcattggcgtaagtggtatggatgaggatgcaattcgccagcgtgacatcgtcgtcgccacgcctgaaaaacttgactttgctctccggaatgacccgtcaattattaatgatgtaggactttttatttttgatgaggggcacatgattggggccgatgaacgagaggttcggtatgaagttcaaattcaacggctgttgcgcagacaggatgccgatacgcgcagaattgtctgcctctcggcaattctacctgatggtgagcaactcgatgattttgccggttggctccgtcgtgacaagcccggaggaccaatcaaaaataattggcgaccgacccgcttgcagtttggcgaggtcatatggtccgctccagcaggtcggcttaatctcagcgttggttatgaggcggcttgggtatcgcgttttatcgtcagcagacaaccgccaaaggttaaattacctaataaaaagcagcgaacaaaaatgtttccctctgataacaaggagctctgcttagcgacagcctggcgtctaattgaagatggacagaccgtacttatctactgcccacttcgccggagcgtcgaaccgtttgccgagacaattgtcgatctgcatcagcgcggactactgccatctttatttgatgctgccccggacattctggatacggctatctcgctgggagaagaatggttgggggcacacagcccgatacttgcctgcctacggttgggcgtggctcttcatcatggcgcattgcctacggcttaccgcaaagaaatcgaacgtttgctgcgagatggggtacttaaagtgacgatctcatcaccgacgctagcacaaggtcttaatctttcggcaacagctatcgtcatgcattctcttcatcggaatcgcgagcttatcaaagtgtccgagttcagaaacgtcataggcagagcagggcgcgcatatgtagatgttgaagggctggtgatttatccaatattcgataaagtaaataaacgccagactaactggcataccctcacatctgacacgggggcccgtgagatggagagcggactaatacagcttgtctgtgtgttattgattcgcatgcatacacggcttggtggggatttaaaagcactcactgaatatgtgaccaacaacgccgtagcgtgggaatttccagaaattatgaccgaatctccgcaagaaagagatattgcgcaggccatctgggaaaaacaactttcaacgcttgatactgctattctgagccttcttggtgagaatgatatcccggatgaccagattgaaactgctcttgatgacattcttcagtcttcactttggcaacgcagtttgcagcgttatagggatgagaatgaacggattttgctgaaatcgggactcctgtcccgcagccgctacatctggcagcgctcaacggcagcagggcgccgggggtatttcctgtcgggggtaggacttacaaccgggctacgacttgatgctattgccgctaaggccaaccaactattgattgatgcgaatgcggctataatgggcggtgatgccgaagaggcaattgctgctatcacggcgctcgctgaagaggtctttaccttctatccgtttatacccgatccattgcctggcgactggagaggtattttacgttcctggctattgggtgaacccatgactaacgtcgcgaatacgcaggcgtctgaaacgcttcaattcgtcgagaatgggctggtgtatcgacttccgtgggcaatggaggctattagggtacgtgcaacagctaatggagacctcataggtgatacagataccacgctagacgattatgagttaggttttgcggttgctgctgttgaaacaggtaccttgagccgttcgtcttcactgcttattcaggcgggttttagctctaggcttgcagccataaaagtggttacagacactactgccgattttcaatccggccaggagcttagaaggtggctgaactctgaagaagtgataagccacacggataatcatgactggcctacacctgaaaccagagtgatgtggctggaattcttgggtagtctcagccccaaaggcagccaggtttggagtcgtcatcgttataacggaatggtggactggagagatactccggcagtgatcggcacaccattgcagctttacactgttgatggtattcatcacgtactggctgatgatggcactcctctgggaagtataaatggcagaattaacacaaacagaagaggtcttcttagagttgaggtggatgatgagaatggtcgtgccatgttcgattatttaggaccggacgactttatttctacctga

SEQ ID NO: 56554 - DNA, 780 bp, Escherichia coli; identical to SEQ ID NO: 56508

SEQ ID NO: 56555 - DNA, 3534 bp, Escherichia coli
atgccaacaacccctgatgctatcattgctgctataacggacgcggcgacggtcggctttcgcggcaggctaattgcacgaggtcaggcacgtgcaatgatctggcgtgacggtgttcttcctcctggtgcgccggatttctcggctcaactcagcttcgatcttcacagttacgcgtatggtttgcttggactaggtctgcgccttttagagtcagatggcgacccgaatcaagcacggatcgcattcgaacaggcggcgacagcgcttgagtcggtcatggccaacggcaatcgcgaagaagctgatcgcgatttccattttctccttgcagctgccagttatcacctcgcgcacctttctgcccgggcctattccctcctcgcaattgtggccgatgaagcaaatttctcgccgatcgagcatgcgctaactctgttgatacgccgagatatcaattcgctgcgtacacgcgtatatacctttcgtctcgatggtcgtggatctgatgcgaccattacgacattcttacagcagcatctcaccgagtccatcgttgccgatgcggcggaacgagatggaaaggactttcttttcgaaggcctgaatctcgcactgacagatgttttcttcggtgccttttcgatgttcctgctcgccctagatcgcggtgaatatactcttctcgaaaaagcgatcgcccagcttcgtgaaaacctcgatatctgcggggagctgaaccttataccgcaatggtgggtgcaccggattgctatccatctgcttaaagatttctggtcgaacaccttccacgaaaaagttccgctgcttcccgctggcggcgttgccccttcgtggcctgtccttcgtgaactctttattggcttgctcgctcgacgcccaagggcagaggtcgacttgtggccgtcgcagattgaagcggcatcgcgagctgtcaaccagaccgacaacctcgttgtttcgttgccgaccagcgcaggtaagacccgcatcgctgaattgtctattctgagatgtttagccggtgggaggcgtgccattgtcgtgaccccgcttcgcgctctatctgcgcaaaccgaagccacacttcagcgtaccttcgggccactcggcaagaccatttctgccctttatggcagtatcggagtgtccggcttcgacgaagatgccatccgcgggcgtgatattgttgtcgcaaccccagagaagctcgatttcgccttgaggaacgatccgtcactgctcgacgatgtgggcttgctcgttttcgatgagggccatatgattggttcaggtgagcgcgaagttcgttacgaggttcagattcagcgcctcttacgtcgtaaggacgcagatcaacgccgcatagtctgtctatcggcaattcttccggacggagatcaaatggaagacttctcggcgtggctacggcgcgatcaaccgggaggtcccattaagaacgattggcgtccgacgcgtttgcggttcggcgaggtcacttggaattcgccgacagcgcgcctaaatcttcgcgttggtgaggaaaggccatttgtgcccagatttctgactggtgcggcaccgccgctgttcgtaccaccgaagaagcgtcgcaaccgactctttccggacaatcagcaggagttgagccttgcaaccgcatggcgtctagtcagagatggtcagacagtgttgatctattgcccagagcgtcgcagcgtcgaaccatttgccaaggtcatcgttgacttgcactcgcgcggtgcactcgagtctttgctaacagtcgaattgaccactttgcagatcgctatagcactcggtgaggaatggcttgggacagacagctatattctgaaatgccttcggcttggtgtggctcttcaccatggtgccttgccgacagcttatcgcaaggaaatcgagcgccttctgcgagaaggtatactcaaggtcacgatctcatcgccgactctggcgcagggactcaatctctcggcgacagcggtcgtcatgcactcgctctaccggcacggtgaaatgatcaaggtttcggaattcaagaatgtcatcggccgagcaggccgtgcttatattgatgtagaaggccttgttctctatcccatctttgaagatgtgaataacaggaagcacaacaaatgggtcaatctgatagaagaccacggtgctcgtgagatggaaagcgggctcatccagctcatcttctcgctgctgagccgcatgcactctcacattggcggtgatctcgaccatttgatcgactatgttgtcaataatgctgctgcgtgggtcttcccagaggttgccggtgaaaaggttgatgagcgagagcaggcgctgaaagagtgggatcgccatatggcgacactagataccgccattctcagtctcattggtgaggccgatgtacccgatgaccagatcgagaccgctctcgacagtattctccaatcttcactctggcaacgccgcctgctgcgtgttaacgacgaatcacgggctgcctatcgcaccgcgctgtttactcggagccgttatatctgggcgaattcgactgccgtcacacggcgtggttattttctggctgggcttggccttgaagctggacgtgcgctggatgcaattgcaccggagacgaacaatctgctcatgcaagctaatgcagccttggttgtatcagatcatgaggctgcaatcactgcgatcacagatatcgccgaacgcgtgttcaccttttatccgtttgaaccagacacgctcccggcgaattggcgtgaaatcctcagaggttggctgcttgggcatccgttggcaatgatgatcgccggagaggaggtagacgcattgcaatttattgagggcggtctgggctatcgtcttccttgggctatggaggcgttgcgggtacgtgccgccgccaacggtgataccgttggcatgccagcactagcgttggaagattatgaactcggccttgctgttccagctgtcgaaacggggacgatgaaccgctcagcctcaatactgatccaggcgggttttaattcacgacaggcggccatcaaagccgtcaccgatacggctgctaacttcacgaacggggcggaattgcgcgattggttgcgttcacctggtctcgctgtctattcggcacaaccaaactggccaacggccgaagctcggactatatggctcgaattcatccaggaatttgctccgtcagacaacctttcttgggcgcggcgagattatcttggaaacgtcaattggttcgatgttccggcgccttccggaactccagtcggtctctttcattggaacggacaaccgctagtgcttgcaccagatgggcacgcgattggtctgctacaacaccctcttaaccttaatcggcgaggacttgtgcgagcgacggtcgctatgaataacggccagatcaatctgagctatctcggccctgatgatttgtgggtagttgcgaagccacattaa

SEQ ID NO: 56556 - DNA, 849 bp, Escherichia coli C691-71 (14b); identical to SEQ ID NO: 56532

SEQ ID NO: 56557 - DNA, 3144 bp, Escherichia coli C691-71 (14b); identical to SEQ ID NO: 56533

SEQ ID NO: 56558 - DNA, 780 bp, Escherichia coli; identical to SEQ ID NO: 56508

SEQ ID NO: 56559 - DNA, 3534 bp, Escherichia coli; identical to SEQ ID NO: 56555

SEQ ID NO: 56560 - DNA, 780 bp, Escherichia coli; identical to SEQ ID NO: 56508

SEQ ID NO: 56561 - DNA, 3534 bp, Escherichia coli
atgccaacaacccctgatgctatcattgctgctataacggacgcggcgacggtcggctttcgcggcaggctaattgcacgaggtcaggcacgtgcaatgatctggcgtgacggtgttcttcctcctggtgcgccggatttctcggctcaactcagcttcgatcttcacagttacgcgtatggtttgcttggactaggtctgcgccttttagagtcagatggcgacccgaatcaagcacggatcgcattcgaacaggcggcgacagcgcttgagtcggtcatggccaacggcaatcgcgaagaagctgatcgcgatttccattttctccttgcagctgccagttatcacctcgcgcacctttctgcccgggcctattccctcctcgcaattgtggccgatgaagcaaatttctcgccgatcgagcatgcgctaactctgttgatacgccgagatatcaattcgctgcgtacacgcgtatatacctttcgtctcgatggtcgtggatctgatgcgaccattacgacattcttacagcagcatctcaccgagtccatcgttgccgatgcggcggaacgagatggaaaggactttcttttcgaaggcctgaatctcgcactgacagatgttttcttcggtgccttttcgatgttcctgctcgccctagatcgcggtgaatatactcttctcgaaaaagcgatcgaccagcttcgtgaaaacctcgatatctgcggggagctgaaccttataccgcaatggtgggtgcaccggattgctatccatctgcttaaagatttctggtcgaacaccttccacgaaaaagttccgctgcttcccgctggcggcgttgccccttcgtggcctgtccttcgtgaactctttattggcttgctcgctcgacgcccaagggcagaggtcgacttgtggccgtcgcagattgaagcggcatcgcgagctgtcaaccagaccgacaacctcgttgtttcgttgccgaccagcgcaggtaagacccgcatcgctgaattgtctattctgagatgtttagccggtgggaggcgtgccattgtcgtgaccccgcttcgcgctctatctgcgcaaaccgaagccacacttcagcgtaccttcgggccactcggcaagaccatttctgccctttatggcagtatcggagtgtccggcttcgacgaagatgccatccgcgggcgtgatattgttgtcgcaaccccagagaagctcgatttcgccttgaggaacgatccgtcactgctcgacgatgtgggcttgctcgttttcgatgagggccatatgattggttcaggtgagcgcgaagttcgttacgaggttcagattcagcgcctcttacgtcgtaaggacgcagatcaacgccgcatagtctgtctatcggcaattcttccggacggagatcaaatggaagacttctcggcgtggctacggcgcgatcaaccgggaggtcccattaagaacgattggcgtccgacgcgtttgcggttcggcgaggtcacttggaattcgccgacagcgcgcctaaatcttcgcgttggtgaggaaaggccatttgtgcccagatttctgactggtgcggcaccgccgctgttcgtaccaccgaagaagcgtcgcaaccgactctttccggacaatcagcaggagttgagccttgcaaccgcatggcgtctagtcagagatggtcagacagtgttgatctattgcccagagcgtcgcagcgtcgaaccatttgccaaggtcatcgttgacttgcactcgcgcggtgcactcgagtctttgctaacagtcgaattgaccactttgcagatcgctatagcactcggtgaggaatggcttgggacagacagctatattctgaaatgccttcggcttggtgtggctcttcaccatggtgccttgccgacagcttatcgcaaggaaatcgagcgccttctgcgagaaggtatactcaaggtcacgatctcatcgccgactctggcgcagggactcaatctctcggcgacagcggtcgtcatgcactcgctctaccggcacggtgaaatgatcaaggtttcggaattcaagaatgtcatcggccgagcaggccgtgcttatattgatgtagaaggccttgttctctatcccatctttgaagatgtgaataacaggaagcacaacaaatgggtcaatctgatagaagaccacggtgctcgtgagatggaaagcgggctcatccagctcatcttctcgctgctgagccgcatgcactctcacattggcggtgatctcgaccatttgatcgactatgttgtcaataatgctgctgcgtgggtcttcccagaggttgccggtgaaaaggttgatgagcgagagcaggcgctgaaagagtgggatcgccatatggcgacactagataccgccattctcagtctcattggtgaggccgatgtacccgatgaccagatcgagaccgctctcgacagtattctccaatcttcactctggcaacgccgcctgctgcgtgttaacgacgaatcacgggctgcctatcgcaccgcgctgtttactcggagccgttatatctgggcgaattcgactgccgtcacacggcgtggttattttctggctgggcttggccttgaagctggacgtgcgctggatgcaattgcaccggaggcgaacaatctgctcatgcaagctaatgcagccttggttgtatcagatcatgaggctgcaatcactgcgatcacagatatcgccgaacgcgtgttcaccttttatccgtttgaaccagacacgctcccggcgaattggcgtgaaatcctcagaggttggctgcttgggcatccgttggcaatgatgatcgccggagaggaggtagacgcattgcaatttattgagggcggtctgggctatcgtcttccttgggctatggaggcgttgcgggtacgtgccgccgccaacggtgataccgttggcatgccagcactagcgttggaagattatgaactcggccttgctgttccagctgtcgaaacggggacgatgaaccgctcagcctcaatactgatccaggcgggttttaattcacgacaggcggccatcaaagccgtcaccgatacggctgctaacttcacgaacggggcggaattgcgcgattggttgcgttcacctggtctcgctgtctattcggcacaaccaaactggccaacggccgaagctcggactatatggctcgaattcatccaggaatttgctccgtcagacaacctttcttgggcgcggcgagattatcttggaaacgtcaattggttcgatgttccggcgccttccggaactccagtcggtctctttcattggaacggacaaccgctagtgcttgcaccagatgggcacgcgattggtctgctacaacaccctcttaaccttaatcggcgaggacttgtgcgagcgacggtcgctatgaataacggccagatcaatctgagctatctcggccctgatgatttgtgggtagttgcgaagccacattaa

SEQ ID NO: 56562 - DNA, 780 bp, Escherichia coli; identical to SEQ ID NO: 56508

SEQ ID NO: 56563 - DNA, 3534 bp, Escherichia coli; identical to SEQ ID NO: 56555

SEQ ID NO: 56564 - DNA, 780 bp, Escherichia coli VL2732; identical to SEQ ID NO: 56508

SEQ ID NO: 56565 - DNA, 3534 bp, Escherichia coli VL2732
atgccaacaacccctgatgctatcattgctgctataacggacgcggcgacggtcggctttcgcggcaggctaattgcacgaggtcaggcacgtgcaatgatctggcgtgacggtgttcttcctcctggtgcgccggatttctcggctcaactcagcttcgatcttcacagttacgcgtatggtttgcttggactaggtctgcgccttttagagtcagatggcgacccgaatcaagcacggatcgcattcgaacaggcggcgacagcgcttgagtcggtcatggccaacggcaatcgcgaagaagctgatcgcgatttccattttctccttgcagctgccagttatcacctcgcgcacctttctgcccgggcctattccctcctcgcaattgtggccgatgaagcaaatttctcgccgatcgagcatgcgctaactctgttgatacgccgagatatcaattcgctgcgtacacgcgtatatacctttcgtctcgatggtcgtggatctgatgcgaccattacgacattcttacagcagcatctcaccgagtccatcgttgccgatgcggcggaacgagatggaaaggactttcttttcgaaggcctgaatctcgcactgacagatgttttcttcggtgccttttcgatgttcctgctcgccctagatcgcggtgaatatactcttctcgaaaaagcgatcgcccagcttcgtgaaaacctcgatatctgcggggagctgaaccttataccgcaatggtgggtgcaccggattgctatccatctgcttaaagatttctggtcgaacaccttccacgaaaaagttccgctgcttcccgctggcggcgttgccccttcgtggcctgtccttcgtgaactctttattggcttgctcgctcgacgccaaagggcagaggtcgacttgtggccgtcgcagattgaagcggcatcgcgagctgtcaaccagaccgacaacctcgttgtttcgttgccgaccagcgcaggtaagacccgcatcgctgaattgtctattctgagatgtttagccggtgggaggcgtgccattgtcgtgaccccgcttcgcgctctatctgcgcaaaccgaagccacacttcagcgtaccttcgggccactcggcaagaccatttctgccctttatggcagtatcggagtgtccggcttcgacgaagatgccatccgcgggcgtgatattgttgtcgcaaccccagagaagctcgatttcgccttgaggaacgatccgtcactgctcgacgatgtgggcttgctcgttttcgatgagggccatatgattggttcaggtgagcgcgaagttcgttacgaggttcagattcagcgcctcttacgtcgtaaggacgcagatcaacgccgcatagtctgtctatcggcaattcttccggacggagatcaaatggaagacttctcggcgtggctacggcgcgatcaaccgggaggtcccattaagaacgattggcgtccgacgcgtttgcggttcggcgaggtcacttggaattcgccgacagcgcgcctaaatcttcgcgttggtgaggaaaggccatttgtgcccagatttctgactggtgcggcaccgccgctgttcgtaccaccgaagaagcgtcgcaaccgactctttccggacaatcagcaggagttgagccttgcaaccgcatggcgtctagtcagagatggtcagacagtgttgatctattgcccagagcgtcgcagcgtcgaaccatttgccaaggtcatcgttgacttgcactcgcgcggtgcactcgagtctttgctaacagtcgaattgaccactttgcagatcgctatagcactcggtgaggaatggcttgggacagacagctatattctgaaatgccttcggcttggtgtggctcttcaccatggtgccttgccgacagcttatcgcaaggaaatcgagcgccttctgcgagaaggtatactcaaggtcacgatctcatcgccgactctggcgcagggactcaatctctcggcgacagcggtcgtcatgcactcgctctaccggcacggtgaaatgatcaaggtttcggaattcaagaatgtcatcggccgagcaggccgtgcttatattgatgtagaaggccttgttctctatcccatctttgaagatgtgaataacaggaagcacaacaaatgggtcaatctgatagaagaccacggtgctcgtgagatggaaagcgggctcatccagctcatcttctcgctgctgagccgcatgcactctcacattggcggtgatctcgaccatttgatcgactatgttgtcaataatgctgctgcgtgggtcttcccagaggttgccggtgaaaaggttgatgagcgagagcaggcgctgaaagagtgggatcgccatatggcgacactagataccgccattctcagtctcattggtgaggccgatgtacccgatgaccagatcgagaccgctctcgacagtattctccaatcttcactctggcaacgccgcctgctgcgtgttaacgacgaatcacgggctgcctatcgcaccgcgctgtttactcggagccgttatatctgggcgaattcgactgccgtcacacggcgtggttattttctggctgggcttggccttgaagctggacgtgcgctggatgcaattgcaccggagacgaacaatctgctcatgcaagctaatgcagccttggttgtatcagatcatgaggctgcaatcactgcgatcacagatatcgccgaacgcgtgttcaccttttatccgtttgaaccagacacgctcccggcgaattggcgtgaaatcctcagaggttggctgcttgggcatccgttggcaatgatgatcgccggagaggaggtagacgcattgcaatttattgagggcggtctgggctatcgtcttccttgggctatggaggcgttgcgggtacgtgccgccgccaacggtgataccgttggcatgccagcactagcgttggaagattatgaactcggccttgctgttccagctgtcgaaacggggacgatgaaccgctcagcctcaatactgatccaggcgggttttaattcacgacaggcggccatcaaagccgtcaccgatacggctgctaacttcacgaacggggcggaattgcgcgattggttgcgttcacctggtctcgctgtctattcggcacaaccaaactggccaacggccgaagctcggactatatggctcgaattcatccaggaatttgctccgtcagacaacctttcttgggcgcggcgagattatcttggaaacgtcaattggttcgatgttccggcgccttccggaactccagtcggtctctttcattggaacggacaaccgctagtgcttgcaccagatgggcacgcgattggtctgctacaacaccctcttaaccttaatcggcgaggacttgtgcgagcgacggtcgctatgaataacggccagatcaatctgagctatctcggccctgatgatttgtgggtagttgcgaagccacattaa

SEQ ID NO: 56566 - DNA, 780 bp, Escherichia coli; identical to SEQ ID NO: 56538

SEQ ID NO: 56567 - DNA, 3525 bp, Escherichia coli; identical to SEQ ID NO: 56549

SEQ ID NO: 56568 - DNA, 777 bp, Escherichia coli; identical to SEQ ID NO: 56546

SEQ ID NO: 56569 - DNA, 3501 bp, Escherichia coli
ttggagacgactgaagaattaagcaccttcctgacggccgctacagttgacggtattctcgggcgcctcctctatcgcggtgcagcttggtcgttgatgcgcaagaatggcgtattgccgcaaaacgctccgccgcttggcgcaaccatcgaaacagatcttgccgagcacggttttgccctgcttcgaggcgcaatggcactgcgggctcaggctggtgcttcggaactcactggcaaggcctttgagcgcgcagccaacgccttcgaagccctcgtgcgtaatggtgatccagagtcgcctgatcgcggattccgccgcaccattgctgctgcagcctaccatctagccggcttctcggccgtcgccttttcaatcttcaacgagatagaggaagaccttaacgtctcacccggggaaatagcgatccgacacctgatactgcgcgatctcgatcaacttcgcggcttcgttcgcgactggttgaattatggggctcacggcgatgagcagatcgcggcggccctgcagggcggagatgctgacgtcgacgaagtactgtcgacaattctcaatacgacgatctgccgtgccctggcatttttcgacttcgcgcttgagacgggcgaggttgagtcgttcgaagccgcgcgagggctccttaccaccgctgtcgggcttgccgacaacgctgagaacgtcccgctgtggtggatctcgaacctctgccgtcacctgatcgacgacttgtggcaacactcactacaccagaatttgccgactgagccacccgagggtgcggaggaaagatatcccgacctgcggcggttgtttatatcttccctttacgcccgcaagacctcagaagtggagctatggccatcgcagcgcgaagccgcccagcgctccacagacgtcacggacgatctggtcgtcgccctgccgaccagcgcgggcaaaacacgggtggcagagattgccgcgttaatgaccctatcctccgcacgccgggtgctaatcgtcacaccgctgcgcgctctttcggcccagaccgaacgaactttcaggaagaccttcgcgcccctagggtttggtgtctcttctctctacggcgccagcggcctttcggccggtgatgaagacgccctccgcacacgggagatcatcattgcgacgcccgaaaaactcgacttcgcgctgagaagcgaccagacgttgattgacgatgtcggcctgatcgtcctcgacgaaggccacatgatcggtcctagtgagcgcgaaatccgctatgagacgctcgtgcagcgtctacttcggcgcacggatgcggcagagcgccgaatagtttgcctttccgcgatcctgccaagcggcgacgaactcgacgaccttaccgcatggattcgttccgacgaacccggggagcctgtgcgttccgactggcgcccaacgcgccagagattcggcgcgcttacctggcgaggtaaggacgcgttgctacggctcgatctagacgacgatggccccttccttgacaaattcgtcgcggaaaaaccagcgctcgggaaggagaagaagccctgtccacgcaagaactcgcacctcgctctgttcgcggcatgggagttcgcgagccagggcaagcgcaccttgatcttctctacccaagcaaactgggtcgagagctacggcaaacaagtcgtggacctctgcaagcgcggctatctggactcgttgctggaagacgagactccaatcgcccgcgccctagaagtcggcaaggaatggttgggcgaggatcacccagccgtggccagcctgaaggtgggcgttgccattcatcacggccgactgccgagcccgttcctacgcgaactggaactgcttctatccgaaggagcgctaaaggtcattgtcgcttcgccgacgctctcgcagggcctcaatctcaacgctgccgtgctgcttgtgcccgcgctatatcgcgcctcagagaagatcaaaggagaggagttcgcgaacgtggccggccgcgccggacgtgcattcgtcgatgtcgaggggctgatcgtccatgtcatgttcgacaaaatcaaatggcgaaagaaagaatggagggaactggtcgcctctgccaaggccaggacgcttaaaagcggccttattcagatcgttgccgaaatccttgagcgtctatcacgcgagggcgtcttggatatagatgacgcctgggaatatctcgccaacgcccgcgaggcttggaggtcacctgaagaagaagcagtggtagcagaacgactggcagccgcagtggaatacgacgcttccaccgacgatgaagacgagacggatgacgaggaggaaaccatcgacgaggagcccctgtctcagctcgtcgaacgcctcgacgccaccgtattcggtctgatcgaagccctagacgctgatcgcgccgatctacctaaacttctagacgaggcgctcagggggtcactctgggctcgccaaattgctcgggaggacgaggatgtcgcttccctgcaccggaaggtattcgaagcacgcgctgctctcatctggaaagctaccaccccccctacgcgacgcgggcatttcgcgatgggagtagggctcgaagctggcctcctcatcgacgctatggcggacgagttggccgaactcatcgacagggcagacagtgcagcgttgagcggcgacatcaacgaactcgccgatgctctcggcggactcggcgaacgcctgctgttcatgcggcctttcatccctgacaaggcgaacgcgctgccgccgaactggaaagctatcctacgtagttgggtgtccggggaagaagtctccaagatcggcccgcagaacatgcgggcggtcgaagatgccttcacctatcggctagtctgggcgctagaagccgtccgcacccggcgcatgtccttcggctggtcgccggatacggtggcgggcgccgctgcggctgcggtcgaaaccggtgtcccacagttcatgatggcgatgctgatccgcgcaggcctgccgtcacggcgcgcggcaatggcggccatcgaagatgctgaaccaatcttcgtcacgcccgcagaaatgcgggcctggcttgaatccgacgagattacggccaaaaccgacgcaggcgactggccaacacccgacacctccgcgttatgggcccgcttccgaaccgaagctctcagcggaggcatccagaaatggtccgtcgaacgctataagcgcctactcgataccgagtcctccccgcccgctggcctctatcgaatcctcaccgacgaaggggacgcgcggacttggctgacaacccccgactaccagcggatcgccgtcttcaagaagccagcggttgatcccaagcccagtctattctcgggacagttgccgggcaaaacccggctcgtggatgctctacgcgtcggccgcggaaagttgcgttggccgactgccgacgtctaa

SEQ ID NO: 56570 - DNA, 777 bp, Escherichia coli
gtggggctatatgagaagtggtgtgaatccattaaagaaaatgatgaacgcaagtattactggacgtatgtcgagaaggacggcggccgcgatgatatccgcgaggaccttgctgagaccattcgctcgcactacgaacgacttgaacgcatcgccgatgacgtagggcgactaggatacaaggttgctgccaagatcctccgcgaggcaatgcctaataccccgaagggccgctctggcgacctcggcgaaatccttgcgactgaactagttgaggaagaaatcggtctgcgggtacccgtgcgccggctccgttacaaggacggccgtaacatggccatgcgcggcgatgacatcatcggcgcgggctaccaaggcaataagctctggctgctaaaaggtgaagctaaaagtaaccagaagcttggcaaaaccacggtcaccgccgcccgcaaggtcctcgaccgcgacaatggccgctgcacgcctgactcgctgctgttcgtcgccaatcgcctgctggagagcaacgacgctggcgataacgcactgggtcgcgaccttcgtgacgaagtgggtcttaagtctatgccagccgatcgcatcgaccacatgctcttcaccgtgtcgggtaacggccctcacgcttccctgaaagagaaccttgaagccgctggagtcaacagggaccattacgtcgtgaacattcacgtcgaagaccatcaggatttcattgcgtcaatgtacctagaggcggaagatcttggagacgactga

SEQ ID NO: 56571 - DNA, 3501 bp, Escherichia coli
ttggagacgactgaagaattaagcaccttcctgacgaccgctacagttgacggtattctcgggcgcctcctctatcgcggtgcagcttggtcgttgatgcgcaagaatggcgtattgccgcaaaacgctccgccgcttggcgcaaccatcgaaacagatcttgccgagcacggttttgccctgcttcgaggcgcaatggcactgcgggctcaggctggtgcttcggaactcactggcaaggcctttgagcgcgcagccaacgccttcgaagccctcgtgcgtaatggtgatccagagtcgcctgatcgcggattccgccgcaccattgctgctgcagcctaccatctagccggcttctcggccgtcgccttttcaatcttcaacgagatagaggaagaccttaacgtctcacccggggaaatagcgatccgacacctgatactgcgcgatctcgatcaacttcgcggcttcgttcgcgactggttgaattatggggctcacggcgatgagcagatcgcggcggccctgcagggcggagatgctgacgtcgacgaagtactgtcgacaattctcaatacgacgatctgccgtgccctggcatttttcgacttcgcgcttgagacgggcgaggttgagtcgttcgaagccgcgcgagggctccttaccaccgctgtcgggcttgccgacaacgctgagaacgtcccgctgtggtggatctcgaacctctgccgtcacctgatcgacgacttgtggcaacactcactacaccagaatttgccgactgagccacccgagggtgcggaggaaagatatcccgacctgcggcggttgtttatatcttccctttacgcccgcaagacctcagaagtggagctatggccatcgcagcgcgaagccgcccagcgctccacagacgtcacggacgatctggtcgtcgccctgccgaccagcgcgggcaaaacacgggtggcagagattgccgcgttaatgaccctatcctccgcacgccgggtgctaatcgtcacaccgctgcgcgctctttcggcccagaccgaacgaactttcaggaagaccttcgcgcccctagggtttggtgtctcttctctctacggcgccagcggcctttcgcccggtgatgaagacgccctccgcacacgggagatcatcattgcgacgcccgaaaaactcgacttcgcgctgagaagcgaccagacgttgattgacgatgtcggcctgatcgtcctcgacgaaggccacatgatcggtcctagtgagcgcgaaatccgctatgagacgctcgtgcagcgtctacttcggcgcacggatgcggcagagcgccgaatagtttgcctttccgcgatcctgccaagcggcgacgaactcgacgaccttaccgcatggattcgttccgacgaacccggggagcctgtgcgttccgactggcgcccaacgcgccagagattcggcgcgcttacctggcgaggtaaggacgcgttgctacggctcgatctagacgacgatggccccttccttgacaaattcgtcgcggaaaaaccagcgctcgggaaggagaagaagccctatccacgcaagaactcgcacctcgctctgttcgcggcatgggagttcgcgagccagggcaagcgcaccttgatcttctctacccaagcaaactgggtcgagagctacggcaaacaagtcgtggacctctgcaagcgcggctatctggactcgttgctggaagacgaggctccaatcgcccgcgccctagaagtcggcaaggaatggttgggcgaggatcacccagccgtggccagcctgaaggtgggcgttgccattcatcacggccgactgccgagcccgttcctacgcgaactggaactgcttctatccgaaggagcgctaaaggtcattgtcgcttcgccgacgctctcgcagggcctcaatctcaacgctgccgtgctgcttgtgcccgcgctatatcgcgcctcagagaagatcaaaggagaggagttcgcgaacgtggccggccgcgccggacgtgcattcgtcgatgtcgaggggctgatcgtccatgtcatgttcgacaaaatcaaatggcgaaagaaagaatggagggaactggtcgcctctgccaaggccaggacgcttaaaagcggccttattcagatcgttgccgaaatccttgagcgtctatcacgcgagggcgtcttggatatagatgacgcctgggaatatctcgccaacgcccgcgaggcttggaggtcacctgaagaagaagcagtggtagcagaacgactggcagccgcagtggaatacgacgcttccaccgacgatgaagacgagacggatgacgaggaggaaaccatcgacgaggagcccctgtctcagctcgtcgaacgcctcgacgccacagtattcggtctgatcgaagccctagacgctgatcgcgccgatctacctaaacttctagacgaggcgctcagggggtcactctgggctcgccaaattgctcgggaggacgaggatgtcgcttccctgcaccggaaggtattcgaagcacgcgctgctctcatctggaaagctaccaccccccctacgcgacgcgggcatttcgcgatgggagtagggctcgaagctggcctcctcatcgacgctatggcggacgagttggccgaactcatcgacagggcagacagtgcagcgttgagcggcgacatcaacgaactcgccgatgctctcggcggactcggcgaacgcctgctgttcatgcggcctttcatccctgacaaggcgaacgcgctgccgccgaactggaaagctatcctacgtagttgggtgtccggggaagaagtctccaagatcggcccgcagaacatgcgggcggtcgaagatgccttcacctatcggctagtctgggcgctagaagccgtccgcacccggcgcatgtccttcggctggtcgccggatacggtggcgggcgccgctgcggctgtggtcgaaaccggtgtcccacagttcatgatggcgatgctgatccgcgcaggcctgccgtcacggcgcgcggcaatggcggccatcgaagatgctgaaccaatcttcgtcacgcccgcagaaatgcgggcctggcttgaatccgacgagattacggccaaaaccgacgcaggcgactggccaacacccgacacctccgcgttatgggcccgcttccgaaccgaagctctcagcggaggcatccagaaatggtccgtcgaacgctataagcgcctactcgataccgagtcctccccgcccgctggcctctatcgaatcctcaccgacgaaggggacgcgcggacttggctgacaacccccgactaccagcggatcgccgtcttcaagaagccagcggttgatcccaagcccagtctattctcgggacagttgccgggcaaaacccggctcgtggatgctctacgcgtcggccgcggaaagttgcgttggccgactgccgacgtctaa

SEQ ID NO: 56572 - DNA, 777 bp, Escherichia coli; identical to SEQ ID NO: 56546

SEQ ID NO: 56573 - DNA, 3501 bp, Escherichia coli
ttggagacgactgaagaattaagcaccttcctgacggccgctacagttgacggtattctcgggcgcctcctctatcgcggtgcagcttggtcgttgatgcgcaagaatggcgtattgccgcaaaacgctccgccgcttggcgcaaccatcgaaacagatcttgccgagcacggttttgccctgcttcgaggcgcaatggcactgcgggctcaggctggtgcttcggaactcactggcaaggcctttgagcgcgcagccaacgccttcgaagccctcgtgcgtaatggtgatccagagtcgcctgatcgcggattccgccgcaccattgctgctgcagcctaccatctagccggcttctcggccgtcgccttttcaatcttcaacgagatagaggaagaccttaacgtctcacccggggaaatagcgatccgacacctgatactgcgcgatctcgatcaacttcgcggcttcgttcgcgactggttgaattatggggctcacggcgatgagcagatcgcggcggccctgcagggcggagatgctgacgtcgacgaagtactgtcgacaattctcaatacgacgatctgccgtgccctggcatttttcgacttcgcgcttgagacgggcgaggttgagtcgttcgaagccgcgcgagggctccttaccaccgctgtcgggcttgccgacaacgctgagaacgtcccgctgtggtggatctcgaacctctgccgtcacctgatcgacgacttgtggcaacactcactacaccagaatttgccgactgagccacccgagggtgcggaggaaagatatcccgacctgcggcggttgtttatatcttccctttacgcccgcaagacctcagaagtggagctatggccatcgcagcgcgaagccgcccagcgctccacagacgtcacggacgatctggtcgtcgccctgccgaccagcgcgggcaaaacacgggtggcagagattgccgcgttaatgaccctatcctccgcacgccgggtgctaatcgtcacaccgctgcgcgctctttcggcccagaccgaacgaactttcaggaagaccttcgcgcccctagggtttggtgtctcttctctctacggcgccagcggcctttcggccggtgatgaagacgccctccgcacacgggagatcatcattgcgacgcccgaaaaactcgacttcgcgctgagaagcgaccagacgttgattgacgatgtcggcctgatcgtcctcgacgaaggccacatgatcggtcctagtgagcgcgaaatccgctatgagacgctcgtgcagcgtctacttcggcgcacggatgcggcagagcgccgaatagtttgcctttccgcgatcctgccaagcggcgacgaactcgacgaccttaccgcatggattcgttccgacgaacccggggagcctgtgcgttccgactggcgcccaacgcgccagagattcggcgcgcttacctggcgaggtaaggacgcgttgctacggctcgatctagacgacgatggccccttccttgacaaattcgtcgcggaaaaaccagcgctcgggaaggagaagaagccctatccacgcaagaactcgcacctcgctctgttcgcggcatgggagttcgcgagccagggcaagcgcaccttgatcttctctacccaagcaaactgggtcgagagctacggcaaacaagtcgtggacctctgcaagcgcggctatctggactcgttgctggaagacgagactccaatcgcccgcgccctagaagtcggcaaggaatggttgggcgaggatcacccagccgtggccagcctgaaggtgggcgttgccattcatcacggccgactgccgagcccgttcctacgcgaactggaactgcttctatccgaaggagcgctaaaggtcattgtcgcttcgccgacgctctcgcagggcctcaatctcaacgctgccgtgctgcttgtgcccgcgctatatcgcgcctcagagaagatcaaaggagaggagttcgcgaacgtggccggccgcgccggacgtgcattcgtcgatgtcgaggggctgatcgtccatgtcatgttcgacaaaatcaaatggcgaaagaaagaatggagggaactggtcgcctctgccaaggccaggacgcttaaaagcggccttattcagatcgttgccgaaatccttgagcgtctatcacgcgagggcgtcttggatatagatgacgcctgggaatatctcgccaacgcccgcgaggcttggaggtcacctgaagaagaagcagtggtagcagaacgactggcagccgcagtggaatacgacgcttccaccgacgatgaagacgagacggatgacgaggaggaaaccatcgacgaggagcccctgtctcagctcgtcgaacgcctcgacgccaccgtattcggtctgatcgaagccctagacgctgatcgcgccgatctacctaaacttctagacgaggcgctcagggggtcactctgggctcgccaaattgctcgggaggacgaggatgtcgcttccctgcaccggaaggtattcgaagcacgcgctgctctcatctggaaagctaccaccccccctacgcgacgcgggcatttcgcgatgggagtagggctcgaagctggcctcctcatcgacgctatggcggacgagttggccgaactcatcgacagggcagacagtgcagcgttgagcggcgacatcaacgaactcgccgatgctctcggcggactcggcgaacgcctgctgttcatgcggcctttcatccctgacaaggcgaacgcgctgccgccgaactggaaagctatcctacgtagttgggtgtccggggaagaagtctccaagatcggcccgcagaacatgcgggcggtcgaagatgccttcacctatcggctagtctgggcgctagaagccgtccgcacccggcgcatgtccttcggctggtcgccggatacggtggcgggcgccgctgcggctgcggtcgaaaccggtgtcccacagttcatgatggcgatgctgatccgcgcaggcctgccgtcacggcgcgcggcaatggcggccatcgaagatgctgaaccaatcttcgtcacgcccgcagaaatgcgggcctggcttgaatccgacgagattacggccaaaaccgacgcaggcgactggccaacacccgacacctccgcgttatgggcccgcttccgaaccgaagctctcagcggaggcatccagaaatggtccgtcgaacgctataagcgcctactcgataccgagtcctccccgcccgctggcctctatcgaatcctcaccgacgaaggggacgcgcggacttggctgacaacccccgactaccagcggatcgccgtcttcaagaagccagcggttgatcccaagcccagtctattctcgggacagttgccgggcaaaacccggctcgtggatgctctacgcgtcggccgcggaaagttgcgttggccgactgccgacgtctaa

SEQ ID NO: 56574 - DNA, 780 bp, Escherichia coli; identical to SEQ ID NO: 56538

SEQ ID NO: 56575 - DNA, 3525 bp, Escherichia coli; identical to SEQ ID NO: 56549

SEQ ID NO: 56576 - DNA, 810 bp, Klebsiella oxytoca HKOPL1
atgctacccgaccatttaaaaggtttacatttaaggtcagcaggtttgataaccgttgaaggccggaccataaatgtttgggagttttcgcccccaactgatccggcgattcttgacagttgggcactgcattttcgtcggcaatactgtacagaccaggagcttcctgagctcttgtccgggacaggaatgacgatagaacagtatctaaatgcacatattttccccgacaaagtcaaggctcccgggccatcaattcgttctggtgatttcgctgaatttctcatttccgactacttggagttcacgctcaatctgtgggtgccccgaggaaaatacgctgacaaagccagcaacaatgagtccgtcaaaggcgttgatatactaggcttccatcagttggatattgctactcccaatcgaggggatgccctttatgcctttgaagttaaagcgtctctttcaggtagtatatatggtggccagctccaaaatgctgttgacgatggttctaacgatcaacacataaggcaagctttcacgttaaacgccactaaacgtcggtaccttcgtgaaggaaagacactggaagtgagccgaattgcacggtttcagaatcctgcagataacccttataaatattactcaggtgcggtagctgttctttgctacacagctttcaatgaagaagagcttgccaagacactggccgacacgcactcaaatgaggcagaactttatctgatggttgtgagagccgatcttcagatgaaactggttcatgaactttacgagagggcctgcaaatga

SEQ ID NO: 56577 - DNA, 3141 bp, Klebsiella oxytoca HKOPL1
atgaaggctggattcaatagcaaacgcctctttggcataacacgctcgaaaggtaagatgtacgaatttggtctggatgagtctcagcatctcagaatgcctgaaggttcagatcctctgcagctgtttattatgaccgtggcaaccttgggcgacgttaccggggtgctggctgagctgtcacagccattagtttctcttccccctgagccgcaagcagagctgaatttctgcgccagcttttttgacgcagttctggattctggatttgcacaaggcctcgaaagcacaacattactattagcctctgccgcctattatgtggctcgacgaccgggaagtagcttagtccttgcccgtcgaattgaacctaaggaagaagacaacaatgttgagcatttgcttcaatggttgctcaaagcggactggaggacttactggcttttagacgacaaacgttatggaccgctactaacatcgttttcgcgtgcggttgctaaccattttgccggaggtacccagctacaagagattgatgtgctaatgaaactcctcaggaatgaggcttataaaatgggcactcccgaggaagtgctttatgcagatgtcgccatatcgatttgtcgtatgaggcttgcagcatctgcttgggtaaccctctcccaatattcaggtttatcagtggatcattggcggccggtcattcagagggaacgcttccctaaagaactctggccttctcagattcttttaggggaaagagggatattcagaggtgcctcgggcttgattcagatgcctacaagtgccgggaaaactaggtcgattgagttagttctgcgcagtgcattcatgtctgggcgcacgaagcttgcggttgtggttgcaccctttcgggcactctgccatgaaattgccttatcacttcggcaagatttggccggcgatgacattaaagtcaatgaactgacggatgccttgcagattgacttcgttgaacaaattgctgaccttttgggaagtgccccgccctcaacatcgaacgtattagtcctcacgcccgaaaagtttctctatgtgctgcgtcagtccccccaagctttgaaacacattggtcttgtcgtttacgacgaggggcaccagtttgatactggcgtgagaggtataacctatgaattgttgctcaccgaaatcaagggattgctgcctgatacagcgcagactctgcttatttcagctgtgatgcaaaatccacaggccattgctagctggctgatgggtgaggataaggcacaggttattgacggcgcaacgctattacctacgagccgatctgttgcctttgcaagctggacagagtcgcttggacagttaatgtttcatgaaaatggatatgacaaagaagactactttgttccgagaataatcgaagcggcacagctatcgggaattaaagcagacagctcgatatttccgacccggacgaaatcgagcgacgtatcgctctatctgggtctacgcgttattagtaagggatccgtagctattttctgtgggacaaagttgattgcaaatggtatagcaaaaagggctgtccagattgcggatgcaggatataacacgttatggccttcaacctacgctaatcctgaagaagtcatggcactgaaaactattattgagggtaatttcggtagcaattcctttcttttaaaagctgcaaagctgggtatatacacgcatcacagtaatacacctcagggtatacgcttagcactagaacatggtatgcagaaaggactgattaactttattgcatgcacatctacgcttgctcaaggtgtaaacttgcctattcgctatcttatcgtgcagggagtatatcagggggtaggacgtgtcaaagttcgcgacttccagaatcttattgggcgtgccggtcgtgcagggatgcatactgagggggttgtaatcttcgctgattcaacagtttgggacagaaggaaaaattggcgggaaggatggaaatttcaaagcgctgtggagcttctctctcctgatcgcgctgaaggcgtcaccagttcgctccttttattattaaaaccttttgcactcccccgtaaccaagtattgccttttgctgggggcgatttactggactttatggataaggaagttgactgggaaagctgggctcatctggtggcggattcagaccctcgcctcagtaagccgcaaaaagatgctctagtaaaagcgctgttgagctccttggcagaacggaaaaagatgacgcatacacttgaaagctatctaatggcaaactgtgctgctatggatgcaaccgcctttgaacagagggccggggaacttgcacgcgagacattggcgtactcgcttgcctctgccgaagaagctgagaaacttgaagaatacttcaggctggttgccagacgtattgagtcggttgagagttcacccttaaagcaggcattcttcggcaagacattgttgggcgcaaagcagactaaatttattgaagtatggtcaggcgaacatagagcaatgctgctagcgctggattcctgtcatgcatggctcaatgccgtctggccactactgaccgagctctgcgacaatcgttttttccgtagcgtcgagcctgcaggtgcagggttcgagatcgcactttcgtggatgtgcggaatgagttacggagaaatcttcaagaaagcatctctgatgcaggttaaaaagaaagccggtaagcgtaaacaaaaagtgagtgacgacgatattcttaagttcttggagagcacactggcatttgattgttcgctcattctagcagctcttgcacaattcctttttagtccagaggaaataatcggagagcaaggggcatcgctcgctcattttcagaagagcctaaaaaatggcctccctgacgcgctatccatgagtatatttgaggcgggatttgctgaccgttttatttctcaagctattcgcgacgctctcctccaggatggatatggaggcagctcatttgatgaggctaggcaaaatcatttaagcgttattgagcaagttgtcaaaggaacccctgcttatttcaattacgttttaagctcatactga

SEQ ID NO: 56578 - DNA, 780 bp, Klebsiella oxytoca
atggtcccgttctatgattggtgcgactcggctgacatgccattaggtaatcaccatgttcgagtcatgacgggccggccaggagaaattgcgactggcattcagatgacagctagggctatccccgcccactacactacagaggagcggattgccgccgcgcttgcgaagttaggtaagacagcagctgctcaaatgctcaacgatctccttccgcaaactgcgcatattaggtcgggtgaccttggcgagatctatgcaacagaatggattgatgcgtacagcggttatcgagcgcctatcaaaagactgcgctggaaggatcatcgaaatatggcaatgcgcggcgatgatgtcatcggtatgcttctcgacgctgaaacacagcgactcagcttcctgaaaacagaagctaaaagccgtattaacctgcgcgctcaaacgcttgaggaggctcggagcggcttagataaggatagcggccttccctcgtcgcatgcgttatcttttatctcggccagacttatggagataggcaccgatgcaccgctcgtagacgcaatcgacgaggcactctaccggcacggtatcccgcccgagagcgttaaacatctactcttcacgttttcaggtaacccaccacagacgctcctaacacaggcgctacaggcctatcctggcccgattggacaatggggtgtcggtttgcatatcgacaaccatgctgcttttgtcggagccgtctacgatcgagtaattgccgatgccaacaacccctga

SEQ ID NO: 56579 - DNA, 3534 bp, Klebsiella oxytoca
atgccaacaacccctgatgctatcattgctgctataacggacgcggcgacggtcggctttcgcggcaggctaattgcacgaggtcaggcacgtgcaatgatctggcgtgacggtgttcttcctcctggtgcgccggatttctcggctcaactcagcttcgatcttcacagttacgcgtatggtttgcttggactaggtctgcgccttttagagtcagatggcgacccgaatcaagcacggatcgcattcgaacaggcggcgacagcgcttgagtcggtcatggccaacggcaatcgcgaagaagctgatcgcgatttccattttctccttgcagctgccagttatcacctcgcgcacctttctgcccgggcctattccctcctcgcaattgtggccgatgaagcaaatttctcgccgatcgagcatgcgctaactctgttgatacgccgagatatcaattcgctgcgtacacgcgtatatacctttcgtctcgatggtcgtggatctgatgcgaccattacgacattcttacagcagcatctcaccgagtccatcgttgccgatgcggcggaacgagatggaaaggactttcttttcgaaggcctgaatctcgcactgacagatgttttcttcggtgccttttcgatgttcctgctcgccctagatcgcggtgaatatactcttctcgaaaaagcgatcgcccagcttcgtgaaaacctcgatatctgcggggagctgaaccttataccgcaatggtgggtgcaccggattgctatccatctgcttaaagatttctggtcgaacaccttccacgaaaaagttccgctgcttcccgctggcggcgttgccccttcatggcctgtccttcgtgaactctttattggcttgctcgctcgacgcccaagggcagaggtcgacttgtggccgtcgcagattgaagcggcatcgcgagctgtcaaccagaccgacaacctcgttgtttcgttgccgaccagcgcaggtaagacccgcatcgctgaattgtctattctgagatgtttagccggtgggaggcgtgccattgtcgtgaccccgcttcgcgctctatctgcgcaaaccgaagccacacttcagcgtaccttcgggccactcggcaagaccatttctgccctttatggcagtatcggagtgtccggcttcgacgaagatgccatccgcgggcgtgatattgttgtcgcaaccccagagaagctcgatttcgccttgaggaacgatccgtcactgctcgacgatgtgggcttgctcgttttcgatgagggccatatgattggttcaggtgagcgcgaagttcgttacgaggttcagattcagcgcctcttacgtcgtaaggacgcagatcaacgccgcatagtctgtctatcggcaattcttccggacggagatcaaatggaagacttctcggcgtggctacggcgcgatcaaccgggaggtcccattaagaacgattggcgtccgacgcgtttgcggttcggcgaggtcacttggaattcgccgacagcgcgcctaaatcttcgcgttggtgaggaaaggccatttgtgcccagatttctgactggtgcggcaccgccgctgttcgtaccaccgaagaagcgtcgcaaccgactctttccggacaatcagcaggagttgagccttgcaaccgcatggcgtctagtcagagatggtcagacagtgttgatctattgcccagagcgtcgcagcgtcgaaccatttgccaaggtcatcgttgacttgcactcgcgcggtgcactcgagtctttgctaacagtcgaattgaccactttgcagatcgctatagcactcggtgaggaatggcttgggacagacagctatattctgaaatgccttcggcttggtgtggctcttcaccatggtgccttgccgacagcttatcgcaaggaaatcgagcgccttctgcgagaaggtatactcaaggtcacgatctcatcgccgactctggcgcagggactcaatctctcggcgacagcggtcgtcatgcactcgctctaccggcacggtgaaatgatcaaggtttcggaattcaagaatgtcatcggccgagcaggccgtgcttatattgatgtagaaggccttgttctctatcccatctttgaagatgtgaataacaggaagcacaacaaatgggtcaatctgatagaagaccacggtgctcgtgagatggaaagcgggctcatccagctcatcttctcgctgctgagccgcatgcactctcacatcggcggtgatctcgaccatttgatcgactatgttgtcaataatgctgctgcgtgggtcttcccagaggttgccggtgaaaaggttgatgagcgagagcaggcgctgaaagagtgggatcgccatatggcgacactagataccgccattctcagtctcattggtgaggccgatgtacccgatgaccagatcgagaccgctctcgacagtattctccaatcttcactctggcaacgccgcctgctgcgtgttaacgacgaatcacgggctgcctatcgcaccgcgctgtttactcggagccgttatatctgggcgaattcgactgccgtcacacggcgtggttattttctggctgggcttggccttgaagctggacgtgcgctggatgcaattgcaccggaggcgaacaatctgctcatgcaagctaatgcagccttggttgtatcagatcatgaggctgcaatcactgcgatcacagatatcgccgaacgcgtgttcaccttttatccgtttgaaccagacacgctcccggcgaattggcgtgaaatcctcagaggttggctgcttgggcatccgttggcaatgatgatcgccggagaggaggtagacgcattgcaatttattgagggcggtctgggctatcgtcttccttgggctatggaggcgttgcgggtacgtgccgccgccaacggtgataccgttggcatgccagcactagcgttggaagattatgaactcggccttgctgttccagctgtcgaaacggggacgatgaaccgctcagcctcaatactgatccaggcgggttttaattcacgacaggcggccatcaaagccgtcaccgatacggctgctaacttcacgaacggggcggaattgcgcgattggttgcgttcacctggtctcgctgtctattcggcacaaccaaactggccaacggccgaagctcggactatatggctcgaattcatccaggaatttgctccgtcagacaacctttcttgggcgcggcgagattatcttggaaacgtcaattggttcgatgttccggcgccttccggaactccagtcggtctctttcattggaacggacaaccgctagtgcttgcaccagatgggcacgcgattggtctgctacaacaccctcttaaccttaatcggcgaggacttgtgcgagcgacggtcgctatgaataacggccagatcaatctgagctatctcggccctgatgatttgtgggtagttgcgaagccacattaa

SEQ ID NO: 56580 - DNA, 783 bp, Klebsiella pneumoniae UHKPC57
gtggggctatacgagaagtggtgtgactcaaccaaagaacaggaacagcgcaagtattactggatctatgtcgaaaaggatggtggccgcgacgatatccgcgatgaccttgctgagattatccgttcccattacgaccgactcgaacgtatcgtcgaggacgtaagtcggctcggatacaaggtagccgcaaaaatcctcagcgaagctatgcctcagacgtccagaagtcgctcaggcgatcttggcgagattcttgcgacagagttggttgaggaagagatcggcctgcgtgttcctgtacgccgtctccgctataaggacggccgcaacatggctatgcgcggcgacgactttattggtgccggatatgacggtaatggcgagaagctctggcttcttaaaggcgaagctaaaagtaacagggtgctgggtaaagctacggtcacgagcgctcgcaaggtactcaaccgcgataatggtcgttgcacgcctgattctctgttatttgttgccaataggctgttggagagtcaagaccctgatgacaacgagctaggccgcagtctccgtgacgaagtaggcctgaagttgcttcccgccgaccgtattgatcacatgctctttactatgtcgggcaacgggccccacgcgtcactaaaaaaggatctcgatgccacgagcaccaatcgagaccattacgtcgtgaatatccatatcgaagatcaccaggatttcatcgcagccatgtatcaagaggcggaagaccttggagacgattga

SEQ ID NO: 56581 - DNA, 3507 bp, Klebsiella pneumoniae UHKPC57
ttggagacgattgacgaactgacctcattccttgcggccgcaaccgccgatggcatccttagccgtctcctctatcgtggtacggcttggtcgttgatgcgcagggaaggcgtactaccaccgaatgcgccgcagttcggcgcgacaatcgaaaccgatcttgctgaacatggcttcgccctgctgcggggcgcgatggccctgcgtgctcaggctggggcttcgaatctgacgagtaaggcattcgaacgcgcagccaatgctttcgaggctcttattcgcaatggtgatccagaggctccaggccgcgggttccaccgcactatcgccgccgcggcctatcacttggctggcttttctgccgtcgcttattcgcttttcaacgagatgtcacaggatctcaatgcatcaccgggtgagatggctattcgacatctaatcctgcgcgatctaggccaattacgcacttttgttcgcgggtggttggacgacgagactcacgacgatgaacagattgccgaagtgctacggggagaaaacggggacattgatgaggtgttagcgaccatcctcaatactacaatctgcagagccttggcccattttgacttcgcactcgagacaggtgaatctgagccgattgagaaagcacgggcactgctcgccgtagcggttagtctggcagataattcggagaatgttcctttgtggtggatctcgaacctctgtcgccacctgattgatgacctttggcagcattcgctacatcagaatctgccgaccgagccgccagagggggcagaggacaaatacccagacctgcgtcaactgtttatctcgtcgctctatgcgcgcaagacttccgaggtggagctatggccgtctcaattggaagcggcccagcgttccacggacctcaccgacgatttggtcgtcgctttgccgaccagcgcaggcaagacgcgggtggccgagattgccgtgctgatgactttgtcttcagaacggcgggtgttgatcgtcacgccattgcgtgctttgtccgcccagaccgagcgatccttcagaaagaccttcgcgcccctcggttttagtgtttcctcgctttacggtgccagcggcctttcaactggcgatgaagatgccctgcgttcccgcgaaatcgtcatcgcaacaccagagaagctcgacttcgccctgcgaagtgacccatccctgatcgatgatgtcggtctgatcgtcctcgatgaagggcacatgatcggcccgagcgagcgcgaaatccgctacgaaacgttagtgcaacgtctgcttcgacgcgcggatgcgggcgaacgtcggattgtttgtctctccgctattctgccaagtggcgacgaactcgatgatctcaccgcatggatacgctccgacgaaccgggtgaacctgtgcgttccgactggcgccccacacggcagaggtttggcgcgctaatatggaggggcgaggatgcgctgctccggcttgacctcgatgacaatggtccgttcctcgaccaattcgtcgtacgaaaaccggcgcggggtcgggagaggaagccctatccgcgcaagaattcgcatctcgccttgttcgtggcgtgggaattcgctggacagggcaagcgaaccctgatcttttccacccaagcaaattgggtcgagagctacggcaaacaggtagtggacctatgtaggcgtggctatctggactcgctgttgggggataatgcgttgatcgcacgcgctttggaggtcggtaaggaatggttgggcgaagaccatcccgccgttgcctgcttgagggtcggtgttgcaatccaccacgggcggctgccgagcccgttcctgcgtgaggtggaagttttactatcagagggggtgctgaaggtcatcgtcgcgtcgccgacactgtcgcagggactcaatctcaacgccgctgtcttgttagtaccaacattatatcgtgcatctgagaagattaaaggcgaggaattcgcgaatgtggccgggcgcgctggtcgcgccttcgtggacgtcgagggcctcatcgtccatgtaatgttcgacaagataaattggcgaaaggaagaatggagagagctggtcgtctctgcgaaggcccgcacactgaagagcggactcatccagattgtcgccgagatccttgttcggctgtctcgcgaaggtgtcctaggtcgagatgatgcttgggaatacctcgccaacgcccgtgaggcttggcgatctcccgtagaagaaaccgctgtcgctgaacgcctagctgctgggggcgaatacgaagctggtgacgacgatgaaggcgctgatagcgatgatgataaggaagaaaccattgacgaggagccgctctcgcagatcgtcgaacgtctcgatgcaaccgtgttcggtctgctcgaggcgcttgatgctgatcgcaacgaccttccaaaactcttggatgacgcactcagaggctcactttgggcccgtcagatcgcccgcgaggatgaggacgtaatcccactgcataagaaggtgtttgaagcgcgtgccgctctcatctggaagaccaccacggctcaggcgcgacgggggcattttgccatgggcgttggacttgaggctggtctcaccattgacgccatggctgacgagttagctgatctcctcgatcgtgccgacgctgctgcgttgaacggtgacgtcaacgaacttgtcgaaaccctcggtggccttggtgaacgtctgctgttcatgagaccctttgttcccgacaatgcgaacgcgctgccgacgaattggaaggccatcctacgtagttgggtgtctggcgaagatgttgttaacatcggaccgcagaacatgcgggtcgttgaagaggctttcacctatcgtttggtttgggcattagaagctgtccgtgtccgacgaatgtctctcggctggtcgccggaaacggtggttggtggcgcggcagcagttgttgaaacaggcgtcccgcaattcatgatggcgatgttgatccgtgcaggccttccatcacggcgcgcggctatggcagcgatcaagtgtgccaatcctgtatttgtaactccttttgagatgcgagcttggcttgaatccgacgagattacggcctataccgtcgcaggcgactggccaacacctgacacggcctcgctatgggcacatttccgaaccgaagccctcagagcaggcattcaaaaatggtctgttgaacattataagcgtctgcttgataccgagactgcccctattgctggtctttatcggatcgtcactgacgagggggacggacggacttggctggcgacgccagactattcgcggattgccgcattcaaaaagtcggcggttgaccccaagcccagcctgttctcgggccgcgtgcccggcaacaccaggctggtggacgtattgcgaattggccgcggaaagctccgctggccacctgctgatgcataa

SEQ ID NO: 56582 - DNA, 783 bp, Klebsiella pneumoniae UHKPC179; identical to SEQ ID NO: 56580

SEQ ID NO: 56583 - DNA, 3507 bp, Klebsiella pneumoniae UHKPC179; identical to SEQ ID NO: 56581

SEQ ID NO: 56584 - DNA, 783 bp, Klebsiella pneumoniae 303K; identical to SEQ ID NO: 56580

SEQ ID NO: 56585 - DNA, 3507 bp, Klebsiella pneumoniae 303K; identical to SEQ ID NO: 56581

SEQ ID NO: 56586 - DNA, 774 bp, Klebsiella pneumoniae 909957
atgctatatcaacgttggtgcgacataactatccaagagcaagacaacaagcagctatggcgcttgtccgaacgcgatggaggaagggctgctatcgaagctaccctaactactcggatccgagctcactacgacaatttggccgaaatagctgaagacgtccgtgagttgggatatccaggcgcggctgcaattttggctgagcgcatgcctcgctccacccgagcacgttcgggagagcttggtgagatcctcgcgaccgagttggtcgaagaacatcttgaattcgaggttccgatccgtcgtctgcgatacaaggatggtcgagagatggcgctgcgcggcgacgatttcgtcggtctaaagctcgatgaccaacaaaatttgcactacttaaaaggcgagtctaagagtcgtgtaaaccttgccaacgccaccatctctgaggcgcgaaaagcactgtccagagacgatggcagacctacggcaacgtcccttctcttcgtcgcggatcgactcatggagggtgaaggcgaacgacggcagatgggtagacggattcgtaatgaagtcgccagtcgagctgcgccccaagggcgaaccagtcacatgctgttcaccttgtcgggcaacgccgcgcctcaggcactgtacgacgatctcgcagcggcggatctggttcgtccccatctttctgcaaatttacgcatagaagaccatcaggccttcattctggcctgctacgagagggctctggcacttggaaacgactga

SEQ ID NO: 56587 - DNA, 3402 bp, Klebsiella pneumoniae 909957
ttggaaacgactgaagaactgactgcattcctgctcgacatcacacaagacggatatcgaggtcgcttgcaggcccggggtcaagcaagggctcttattcgccatgaaggaaacttaccaccagacgctccagccttcagcgaagggatcgactccgatcttgcggactatggcttctcagtactacgtgcttccttggcgctacgcgagcttggaggcgatgcagtgatttggcgaaaaggcttcgtacaggcaggtggggcctttgaggcattggttcagaacgggtcacaggccgacgcatctcgagggttctatcgaacagtgggggctgcttcctatcacttggccaactactctgcgctggcattttcgcttctgtcgcaattacaggccgatcagaatcgttcgcctgccgaggatgctctcgcgctcctaatcgtgcgtgatcttcaaggcttggttcaacgtgcgagggagtggcttagcagcccagcgaaccgagatgagggaatcgccagagctgcggccgagggagcgcttgaccccgacgatatcgtttcgcgtgtagcgacgtcgacaatgttcagagcattggtgttctttgagtttgccctgcaaaccggccaagaatccctcgttgtagaagctcgcaacctgctgaaacgggcgatttcgttgaccaaagcggccagcgcggtgtcactctggtggattcttcgaatcaccgtgaacctgatagatgatctttgggcaagcagtctgcacaaggttctgccctccgaaggaccaccaggctcgcaagactacgcacaacttcggaagctttttgtctctgagttgtactgcaggaggtcatctgaggtcgaattgtggccttctcaacttctggcggcacagcgagccgtcgatgtctccgacgacctagtggtcgcgctccccacgagcgcgggcaagacgcggattgcagagatcgctgcgttgatggccctggcgtgtggtaaacgcgttttgatagtcacgccactcagggctctgtccgctcagaccgagcgctccttccgcaagacattcacacctcttggattttccgtctcgtcgctgtatggaagcagcggtgtagcaggaaatgacgaggatgcgctgcgggaacagaacatcgtcatagccaccccagaaaagttggattttgctttgcggaacgaccccgacatcatcaatgatgtcggcttgatcgtcctagacgaaggacatctgattggtccaagtgaacgcgagatccgctatgagaatctggtgcaacgattgctgcggcgcactgaccatggcaaccggcggatcgtttgtctttcggcaattctgccggcaggcgatcagctcaacgatctgactgcatggattcgcagtgatgcgccaggcgttccgatccagtccagttggcgccctacgcgtcagcgctttggcactctgtcttggctcggaaattctgcgcggctgagcttcgaccttgagccaaatggccctttcattcgacactttgtgccagaggtcccacccattcgccctcgtcgtacggcatttccaaaggacaacaaggagctaactctcgcagcggcatggaagttctctgagcaaggaaagagagctctcgtattttgcacccaacgagatcatgttgaaggatttgccgagacggccctggacctgcagcgacgaggctttctgccatctctgcttgccaacgcccaagaggttgaacgtgccatggccgtaggtagggagtggctaggcgccgaacatcctgcagtacgctgtctggccatcggcgttgcgattcatcatggtcgtcttcccggccccttcctgcgggaagtggaaacactacttgccgcaggcgttctacgcgttaccgtggcgtcacccaccttggcgcagggactgaacctcaatgcagcggtactgctgatcccaaatctgtacagggcgggcactctgatcacgggtgaggagtttgccaacgttgcgggccgcgccgggcgcgcattcgtggatctcgaaggactcgtgatccacgtaatgcatcagccagaaaattggcgccaccagcgatggagagagttggtcacgtcggccaaggctcggtcactctcaagcggcattattgtcgtggtcaacgaggtcatacggcgcctcgcgacgtcgggtgtttttgcgcgtggggatgccatggattacctgtctagcacgcaagatgcttggttcccggatgctgtagatgatgagatggagtcagactcaatggagagcctcatcgagcggttggatacaaccgtccttgggctcgtcgaagcgcttgacgcgcaaagtgcggatctaccaaggctgctcgatgaagcccttgcgggttcactttgggcaaggcaaatcgctcaccttgacggtgccgaaaagcagaagcaagtgtggattctcctcagtagagcacagctcatttggaacaaaacaacggtcgagcaacgcaaaggtcagttcgcgatgggagtgggcctagaatcgggccttgccatcgacgcgttggccgtcgtgctgactgagcttcttgaccgtgccgatgcagccgccctagccagtgacgcagatgccctgatcgctgctctcattggaatgggagagcggcttcttgcgatccgtcccttcgttccagatgacccactgccggcgaactggagagacttgctgggagcttgggtgcgagggcaagacgtagcagccatcggtcaagagggaatgcgcttcgtggacgacgcatttgtctatcgcctggtttgggcgattgaagccatccggatgaatcggcgcatcaatggaggcgaatcagaactacccgtcgaaggagctgctgccgcctgcctggaagctggactaccgtccaacgccatggccatgcttgttcgggccggactgccctcgcgggtggccgctaagacagccgtggagcaactcgcgcccgccttcacgaatcgcacggaaatgaaaacctggttacgatcggaagaagtagcaggcttcgaccatgttcctggatggcccacgcttgagactcataccatctggcagcagtttcggcacgacgttgtgtcaagcgtagatggcaggtgggcgtcgcaggagtggacgatgcaatgggcaacagactcaacagtgcctctgcgtattgacgttgatccgcaagatggacaagtgtcgatcgcgacgccagatttttcacagctcacaacaatcagacagaggcttcaggcggaactaccgagcctgcttgaagttgaatctctacagagcggaacgagtgtcaccatccgccgtattggaaaaggcgaggcgcgttgggtggataaggactga

SEQ ID NO: 56588 - DNA, 783 bp, Klebsiella pneumoniae BIDMC 40; identical to SEQ ID NO: 56580

SEQ ID NO: 56589 - DNA, 3507 bp, Klebsiella pneumoniae BIDMC 40; identical to SEQ ID NO: 56581

SEQ ID NO: 56590 - DNA, 840 bp, Klebsiella pneumoniae MGH 36
atggttacaatgactgctggacaaccgtactcagcttggctcaaaaaagctgaacatagcataaccacttctgacggcaatgagatagaggtatacgagctcgaaatcgatcttgaagcagggcttgtactatccgcatgggccaaacatttccgtgagcattactgtcttgatagccaaattgatcgcctgcgcagagggactaacaaatcgcgagccgagtatttgagagacttggtgtttcctgatgagtctgaagattttggcccagcaacgcgctccggtgattttgctgaaatccttatcgcggatctacttgaaagccattttggtttttgggttccacgtacccgatatgacaacaaaatggttcgcaacgagtccccaaagggaacagatgtcttagcgtttaagtttgatggcataggcccatcacggccatctacaaaagatatcttgatttcttttgagtcgaaagcacaactcagtggtaagaaagcaaagcctagattgcaagacgccgttatcgactcgataaaggatgtgtatcgaatttcagaatcccttaatgcgatgaagcgccgtttaattgatcgtcaagatgaagaaggtgcagatcgggtagaacgctttcaagaagggttggatgtcccttatgtacgaatgacaggggcggcggctgttttttgttcaagtctttatgattctgttcacatatctgaaactacagactgcacttcgcatgaaaatattaaaaaccttatgttggttgtgatacatgctaaatcgcttatgaaatttgttcacgctctctattggagggcagaaaatgaagcctaa

SEQ ID NO: 56591 - DNA, 3186 bp, Klebsiella pneumoniae MGH 36
atgaagcctaaaaaacgtgctcgatatgcggcggcagttacgctatcaaaaggaaaaatgtttgagtatggagttcctgaaggagaccatatagagcttcctgatgatctcgatttgcagatgcagtttccattagctgttggtactgtcggcgactttgcgtccgaagtggtggctaagaccatcggcaattcgattgaagcacaatcccaaaccccactggatgaggttattttttcagctcaagtccttcaagcttttgacgattccctgcttaacaaagaactctccttcaatcttcgcatacttgcagctgctggtttttatcttggcgatgtacccggaaatgcttcagtccaattatctaaactgagccaactagattttcctaagcacgatactttagctatagcagttaaaactgcgatggatcggccttgggagcataccaacgagacattagagtcttcacgtgcaaaagatattttggatgttttgtgccaacacttcaggaatggccggaatggccggcagaaagcctatgatgcaattaaatcattgcgcgaatgggcctatagccatgcgtctgcacatgacctacttatggccgatttgctcggagcgattagtgccactcgcatcgctaattctgcttggacattacttccacgctatagcaacctcccgcaagaaaagtgggagacatatttatcgcgttctatgtcaattaaggaaatgtggccatctcagcgcttgctaggagaggctggattgtatagagggatatcaggagtagttcagatgccgacgagcgccgggaaatctagagctaccgagcttattattaggtcggcatttctttctgctcgtacgaaattggccttagttatcgctcccttccgggcactatgccaggagatagcaaacgatcttgaaaaggcattcaaggatgatggctatgacgtcaatcaacccagtgacgcgttgcaaccagatgtcgagttcgatttttctaacttatcagattttctcgatttggaatctggaatatttgactcagaggtcgaatcgaagccacaggtcattattcttaccccggaaaagcttctttacatacttcgacaagagccagacattgttcagaaagctggactggtagtttatgacgaagggcatcagtttgacacaggcagccggggtgtaacttatgaactgctgttaacatccattaagcgaatgctacacgaaaatgcccagagcgtgttgatttcagcagtaattcagaatgctgcttctgttgctgcatggctattaaatgacggttcaaaggttgtctccagtagagccttacaggctagtagactcattgcctttgccagccttccgaaaggtaaagatggtcaacttcagttcaatgtggcctctgatagcgatcagaaattctttgtcccgcgagttattgtttcagaaaaaatgcctcgattacctaaggaaagaaaggatcgttttttccctactcaggagagtggctccatagcgttatatcttagtttacgcctgctgaaaaatggtggggttgctatttttacaggaagaaagtcttctgctgcaaaaattgttcgtgaggccgccgaagatatttttcgtcgtggaatttcacttgagccaccttctgcccatagtgaccctgatgagattcgtcgctttgtttatctcttcgaacgtaattttggtgctaatgcatatttgacacaagcagctgctttaggcatttttgctcatcacggcaacactccccaaggtgttcgtctggctattgagtatgctatgaggcaaagccttattcgattgatcatctgcacctcgacacttgcacagggtgttaaccttccgattcgatacctacttgtaacaagcgcaatgcaggggcgtgaatcgatcaaagtacgcgacttccataatctcatgggacgcgctggacgtgccggaatgtacggtgagggtactgttattttcactgacccccgtctctatgacgagcgtttcgcaaagacgtaccgttggcaagaaacgatcaatctaatcaatcctgatagtgctgagccaactggaagtacattgctttctcttttcgatcctctgcgaaatgacctcggaacagttactctaagctcttcaagctctgctgaagtagccacttacattgtcaatgactgggaaactcttttaaagtgggtagagagcgttcctatcaatattcctaaacagaacttttcggtcgcttcactaatcgaacaacttaaatccaagaaaaagataattgaagcaattgaaagcttcttaatgacatatcgtagtgatgttcagcccgaaacttttgtggacaactctcgagaattggttactgaaacacttgcctactcgcttgccactgaggagcaacaaatactcctgacagatatcttcgagtctgtggcgcgaaggatcgaactttttgttccagatacagcgatccagaagcgtttcgggcggactttgttaggtattgatcaagcattggcaatcgaatcatgggtcactacaaatgcaaacgcactcgagggagcaacctctgccgatcacctgtttgatgtgctatggccgcttttagtactcttatctaatgaaaaacggttgagtgacacagttcctaatggggcactaaagacattagcattggggtggctggctggagattcgtttgcagctctcgttcaacggcttgacaaattgggtgcatcctatccctatggtgcgaaccaaagaaaatttgatcttgatgtggttgtagacctgtgtgaacaaacatttggctttgagtttgcgctgttgctcgcagcggtaaaggaatcctttctcgcgttctcttcagaacaggcgggtgaggtttttagagaatatgttgatcttcttcagaagcgattgaaatatggacttccgaatcagagttgcattgccttttttgaagcgggatttgctgaacgcgtaattgcccagtgtcttgcagaaggaacgactcaaggtgctattcaagttagttttgacgcccgacacatgattcgacaaaacccagagagatttgaagtaatgctacaaggcttcccatcttatttttttgatgtatttaaaacaatcactgcaccttga

SEQ ID NO: 56592 - DNA, 780 bp, Klebsiella pneumoniae MGH 21; identical to SEQ ID NO: 56538

SEQ ID NO: 56593 - DNA, 3525 bp, Klebsiella pneumoniae MGH 21; identical to SEQ ID NO: 56553

SEQ ID NO: 56594 - DNA, 840 bp, Klebsiella pneumoniae UCI 18; identical to SEQ ID NO: 56590

SEQ ID NO: 56595 - DNA, 3186 bp, Klebsiella pneumoniae UCI 18
atgaagcctaaaaaacgtgctcgatatgcggcggcagttacgctatcaaaaggaaaaatgtttgagtatggagttcctgaaggagaccatatagagcttcctgatgatctcgatttgcagatgcagtttccattagctgttggtactgtcggcgactttgcgtccgaagtggtggctaagaccatcggcaattcgattgaagcacaatcccaaaccccactggatgaggttattttttcagctcaagtccttcaagcttttgacgattccctgcttaacaaagaactctccttcaatcttcgcatacttgcagctgctggtttttatcttggcgatgtacccggaaatgcttcagtccaattatctaaactgagccaactagattttcctaagcacgatactttagctatagcagttaaaactgcgatggatcggccttgggagcataccaacgagacattagagtcttcacgtgcaaaagatattttggatgttttgtgccaacacttcaggaatggccggaatggccggcagaaagcctatgatgcaattaaatcattgcgcgaatgggcctatagccatgcgtctgcacatgacctacttatggccgatttgctcggagcgattagtgccactcgcatcgctaattctgcttggacattacttccacgctatagcaacctcccgcaagaaaagtgggagacatatttatcgcgttctatgtcaattaaggaaatgtggccatctcagcgcttgctaggagaggctggattgtatagagggatatcaggagtagttcagatgccgacgagcgccgggaaatctagagctaccgagcttattattaggtcggcatttctttctgctcgtacgaaattggccttagttatcgctcccttccgggcactatgccaagagatagcaaacgatcttgaaaaggcattcaaggatgatggctatgacgtcaatcaacccagtgacgcgttgcaaccagatgtcgagttcgatttttctaacttatcagattttctcgatttggaatatggaatatttgactcagaggtcgaatcgaagccacaggtcattattcttaccccggaaaagcttctttacatacttcgacaagagccagacattgttcagaaagctggactggtagtttatgacgaagggcatcagtttgacacaggcagccggggtgtaacttatgaactgctgttaacatccattaagcgaatgctacacgaaaatgcccagagcgtgttgatttcagcagtaattcagaatgctgcttctgttgctgcatggctattaaatgacggttcaaaggttgtctccagtagagccttacaggctagtagactcattgcctttgccagccttccgaaaggtaaagatggtcaacttcagttcaatgtggcctctgatagcgatcagaaattctttgtcccgcgagttattgtttcagaaaaaatgcctcgattacctaaggaaagaaaggatcgttttttccctactcaggagagtggctccatagcgttatatcttagtttacgcctgctgaaaaatggtggggttgctatttttacaggaagaaagtcttctgctgcaaaaattgttcgtgaggccgccgaagatatttttcgtcgtggaatttcacttgagccaccttctgcccatagtgaccctgatgagattcgtcgctttgtttatctcttcgaacgtaattttggtgctaatgcatatttgacacaagcagctgctttaggcatttttgctcatcacggcaacactccccaaggtgttcgtctggctattgagtatgctatgaggcaaagccttattcgattgatcatctgcacctcgacacttgcacagggtgttaaccttccgattcgatacctacttgtaacaagcgcaatgcaggggcgtgaatcgatcaaagtacgcgacttccataatctcatgggacgcgctggacgtgccggaatgtacggtgagggtactgttattttcactgacccccgtctctatgacgagcgtttcgcaaagacgtaccgttggcaagaaacgatcaatctaatcaatcctgatagtgctgagccaactggaagtacattgctttctcttttcgatcctctgcgaaatgacctcggaacagttactctaagctcttcaagctctgctgaagtagccacttacattgtcaatgactgggaaactcttttaaagtgggtagagagcgttcctatcaatattcctaaacagaacttttcggtcgcttcactaatcgaacaacttaaatccaagaaaaagataattgaagcaattgaaagcttcttaatgacatatcgtagtgatgttcagcccgaaacttttgtggacaactctcgagaattggttactgaaacacttgcctactcgcttgccactgaggagcaacaaatactcctgacagatatcttcgagtctgtggcgcgaaggatcgaactttttgttccagatacagcgatccagaagcgtttcgggcggactttgttaggtattgatcaagcattggcaatcgaatcatgggtcactacaaatgcaaacgcactcgagggagcaacctctgccgatcacctgtttgatgtgctatggccgcttttagtactcttatctaatgaaaaacggttgagtgacacagttcctaatggggcactaaagacattagcattggggtggctggctggagattcgtttgcagctctcgttcaacggcttgacaaattgggtgcatcctatccctatggtgcgaaccaaagaaaatttgatcttgatgtggttgtagacctgtgtgaacaaacatttggctttgagtttgcgctgttgctcgcagcggtaaaggaatcctttctcgcgttctcttcagaacaggcgggtgaggtttttagagaatatgttgatcttcttcagaagcgattgaaatatggacttccgaatcagagttgcattgccttttttgaagcgggatttgctgaacgcgtaattgcccagtgtcttgcagaaggaacgactcaaggtgctattcaagttagttttgacgcccgacacatgattcgacaaaacccagagagatttgaagtaatgctacaaggcttcccatcttatttttttgatgtatttaaaacaatcactgcaccttga

SEQ ID NO: 56596 - DNA, 810 bp, Klebsiella pneumoniae BIDMC 51
atgctacccgaccatttaaaaggtttacatttaaggtcagcaggtttgataaccgttgaaggccggaccataaatgtttgggagttctcgcccccaactgatccggcgattcttgacagttgggcactgcattttcgtcggcaatactgtacagaccaggagcttcctgagctcttgtgcgggacaggaatgacgatagaacagtatctaaatgcacatattttccccgacaaagtcaaggctcccgggccatcaattcgttctggtgatttcgctgaatttctcatttccgactacttggagttcacgctcaatctgtgggtgccccgaggaaaatacgctgacaaagccagcaacaatgagtccgtcaaaggcgttgatatactaggcttccatcagttggatattgctactcccaatcgaggggatgccctttatgcctttgaagttaaagcgtctctttcaggtggtatatatggtggccagctccaaaatgctgttgacgatggttctaacgatcaacacataaggcaagctttcacgttaaacgccactaaacgtaggtaccttcgtgaaggaaagacactggaagtgagccgaattgcacggtttcagaatcctgcagataacccttatacatattactcaggtgcggttgctgttctttgcaacacagctttcaatgaagaagagcttgccaagacactggccaacacgcactcaaatgaggcagcactttatctgatggttgtgagatccgatcttcagatgaaactggttcatgaactttacgagagggcctgcaaatga

SEQ ID NO: 56597 - DNA, 3141 bp, Klebsiella pneumoniae BIDMC 51
atgaaggctggattcaatagcaaacgcctctttggcataacacgctcgaaaggtaagatgtacgagtttggtctggatgagtctctgcatctcagaatgcctgaaggttcagatcctctgcagctgtttattatgaccgtagcaaccttgggcgacgttaccggggtgctggctgagctgtcactgccattagtttctcttccccctgagccgcaagcggagctgaatttctgcgccagcttttttgacgcagttctggattcaggatttgcacaaggcctcgaaagcacaacattactattagcctatgccgcctattatgtggctcgacgcccgggaagtagcttagtccttgcccgtcgaattgaacctaaagaagaagacaacaatgttgagcatttgcttcaatggttgctcaaagcggactggaggacttactggcttttagacgacaaacgttatggaccgctgctaacatcgttttcgcgtgctgttgctaaccattttgccgaaggtacccagctacaagagattgatgtactgatgaaactcctcaggaatgaggcttataaaatgggcactcccgaggaagtgctttatgcagatgtcgccatatcgatttgtcgtatgaggcttgcagcatctgcttgggtaaccctctcccaatattcaggtttatcagtggatcattggcggccggtcattcagagggaacgctttcctaaagaactctggccttctcagattcttttaggggaaagagggatattcagaggtgactcgggcttgattcagatgcctacaagtgccgggaaaactaggtcgattgagttagttctgcgcagtgcattcatgtctgggcgcacgaagcttgcggttgtggttgcaccctttcgggcactctgccatgaaattgccttatcacttcggcaagatttggccggcgatgacattaaagtcaatgaactgacggatgccttgcagattgacttcgttgaacaaattgctgaccttctgggaagtgccccgccctcaacatcgaacgtattagtcctcacacccgaaaagtttctctatgtgctgcgtcagtcctctcaggctttgaaacacattggtcttgtcgtttacgacgaggggcaccagtttgatactggcgtgagaggtataacctatgaattgttgctcaccgaaatcaagggattgctgcctgatacagcgcagactctacttatttcagctgtgatgcaaaatccacaggccattgctagctggctgatgggtgaggataaggcacaggttattgacggcgcaacgctattacctacgagccggtctgttgcctttgcaagctggacagagtcgcttggacagttaatgtttcatgaaaatggatatgacaaagaggactactttgttccgagaataatcgaagcggcacagctatcgggaattaaagcagacagctcgatatttccgacccggacgaaatcgagcgacgtatcgctctatttgggtctacgcgttattagtaagggatccgtagctattttctgtgggacaaagttgattgcaaatggtatagcaaaaagggctgtccagattgcggatgcaggatataacacgttatggccttcaacctacgctaatcctgaagaagtcatggcactgaaaactattattgagggtaatttcggtagcaattcctttcttttaaaagctgcaaagctgggtatatacacgcatcacagtaatacacctcagggtatacgcttagcactagaacatggtatgcagaaaggactgattaactttattgcatgcacatctacgcttgctcaaggtgtaaacttgcctattcgctatcttatcgtgcagggagtatatcagggggtaggacgtgtcaaagttcgcgacttccagaatcttattgggcgtgccggtcgtgcagggatgcatactgagggggttgtaatcttcgctgattcaacagtttgggacagaaggaaaaattggcaggaaggatggaaatttcaaagcgctgtggagcttctctctcctgaccgcgctgaaggcgttaccagttcactccttttattgttaaaaccttttgcactcccccgtaaccaagaattgccctttgctgggggcgatttgctggattttatggataaggaggttgagtgggaaggctgggctaatctggtggcggattcagaccctcgcctcagtaagtcgcaaaaagatgctctagtaaaagcgctgttgagctccttggcagaacggaaaaagatgacgcatacacttgaaagctatctaatggcaaactgtgctgcgatggatgcaaccgcctttgaacagagggccggggaacttgcacgcgagacattggcgtactcgcttgcctctgccgaagaggctgagaaacttgaagaatacttcagattggttgccagacgtattgagtcggttgagagctcacccttaaagcaggcattcttcggcaagacattgctgggcgcaaagcagactaaatttattgaagtatggtcaggcgaacatagagcaatgctgctagcgctggattcctctaatggatggctcaatgccgtctggccactactgaccgagctctgcgacaatcgttttttccgtagcgtcgagcctgcaggtgcagggttcgagatcgcactttcgtggatgtgcggaatgagttacggagaaatcttcaagaaagcatctcagatgcaggttaaaaagaaagccggtaagcgtaaacaaaaagtgagtgacgacgatattcttaagttcttggagagcacactggcatttgattgttcgctcattctggcagctcttgcacaattcctttttagtccagaggaaataatcggagagcaaggggcatcgctcgctcattttcagaagagcctaaaaaatggcctccctgacgtgctatccatgagtatatttgaggcgggatttgctgaccgttttatttctcaagctattcgcgacgctctcctccaggatggatatggaggcagctcatttgatgaggctaggcaaaatcatttaagcgttattgagcaagttgtcaaaggaacccctgcttatttcaattacgttttaagctcatactga

SEQ ID NO: 56598 - DNA, 783 bp, Klebsiella pneumoniae MGH 63; identical to SEQ ID NO: 56580

SEQ ID NO: 56599 - DNA, 3507 bp, Klebsiella pneumoniae MGH 63; identical to SEQ ID NO: 56581

SEQ ID NO: 56600 - DNA, 783 bp, Klebsiella pneumoniae MGH 75; identical to SEQ ID NO: 56580

SEQ ID NO: 56601 - DNA, 3507 bp, Klebsiella pneumoniae MGH 75; identical to SEQ ID NO: 56581

SEQ ID NO: 56602 - DNA, 840 bp, Klebsiella pneumoniae MGH 64; identical to SEQ ID NO: 56590

SEQ ID NO: 56603 - DNA, 3186 bp, Klebsiella pneumoniae MGH 64; identical to SEQ ID NO: 56591

SEQ ID NO: 56604 - DNA, 783 bp, Klebsiella pneumoniae MGH 65; identical to SEQ ID NO: 56580

SEQ ID NO: 56605 - DNA, 3507 bp, Klebsiella pneumoniae MGH 65; identical to SEQ ID NO: 56581

SEQ ID NO: 56606 - DNA, 780 bp, Klebsiella pneumoniae MGH 70; identical to SEQ ID NO: 56538

SEQ ID NO: 56607 - DNA, 3525 bp, Klebsiella pneumoniae MGH 70; identical to SEQ ID NO: 56549

SEQ ID NO: 56608 - DNA, 783 bp, Klebsiella pneumoniae BIDMC 33B; identical to SEQ ID NO: 56580

SEQ ID NO: 56609 - DNA, 3507 bp, Klebsiella pneumoniae BIDMC 33B; identical to SEQ ID NO: 56581

SEQ ID NO: 56610 - DNA, 780 bp, Klebsiella pneumoniae subsp. pneumoniae PittNDM01; identical to SEQ ID NO: 56538

SEQ ID NO: 56611 - DNA, 3525 bp, Klebsiella pneumoniae subsp. pneumoniae PittNDM01; identical to SEQ ID NO: 56549

SEQ ID NO: 56612 - DNA, 783 bp, Klebsiella pneumoniae; identical to SEQ ID NO: 56580

SEQ ID NO: 56613 - DNA, 3507 bp, Klebsiella pneumoniae; identical to SEQ ID NO: 56581

SEQ ID NO: 56614 - DNA, 783 bp, Klebsiella pneumoniae; identical to SEQ ID NO: 56580

SEQ ID NO: 56615 - DNA, 3507 bp, Klebsiella pneumoniae; identical to SEQ ID NO: 56581

SEQ ID NO: 56616 - DNA, 783 bp, Klebsiella pneumoniae; identical to SEQ ID NO: 56580

SEQ ID NO: 56617 - DNA, 3507 bp, Klebsiella pneumoniae; identical to SEQ ID NO: 56581

SEQ ID NO: 56618 - DNA, 831 bp, Klebsiella pneumoniae
atgactgctggacaaccgtactcagcttggctcaaaaaagctgaacatagcataaccacttctgacggcaatgagataggggtatacgagctcgaaatcgatcttgaagcagggcttgtactatccgcatgggccaaacatttccgtgagcattactgtcttgatagccaaattgatcgcctgcgcagagggactaacaaatcgcgagccgagtatttgagagacttggtgtttcctgatgagtctgaagattttggcccagcaacgcgctccggtgattttgctgaaatccttatcgcggatctacttgaaagccattttggtttttgggttccacgtacccgatatgacaacaaaatggttcgcaacgagtccccaaagggaacagatgtcttagcgtttaagtttgatggcataggcccatcacggccatctacaaaagatatcttgatttcttttgagtcgaaagcacaactcagtggtaagaaagcaaagcctagattgcaagacgccgttatcgactcgataaaggatgtgtatcgaatttcagaatcccttaatgcgatgaagcgccgtttaattgatcgtcaagatgaagaaggtgcagatcgggtagaacgctttcaagaagggttggatgtcccttatgtacgaatgacaggggcggcggctgttttttgttcaagtctttatgattctgttcacatatctgaaactacagactgcacttcgcatgaaaatattaaaaaccttatgttggttgtgatacatgctaaatcgcttatgaaatttgttcacgctctctattggagggcagaaaatgaagcctaa

SEQ ID NO: 56619 - DNA, 3129 bp, Klebsiella pneumoniae
atgtttgagtatggagttcctgaaggagaccatatagagcttcctgatgatctcgatttgcagatgcagtttccattagctgttggtactgtcggcgactttgcgtccgaagtggtggctaagaccatcggcaattcgattgaagcacaatcccaaaccccactggatgaggttattttttcagctcaagtccttcaagcttttgacgattccctgcttaacaaagaactctccttcaatcttcgcatacttgcagctgctggtttttatcttggcgatgtacccggaaatgcttcagtccaattatctaaactgagccaactagattttcctaagcacgatactttagctatagcagttaaaactgcgatggatcggccttgggagcataccaacgagacattagagtcttcacgtgcaaaagatattttggatgttttgtgccaacacttcaggaatggccggaatggccggcagaaagcctatgatgcaattaaatcattgcgcgaatgggcctatagccatgcgtctgcacatgacctacttatggccgatttgctcggagcgattagtgccactcgcatcgctaattctgcttggacattacttccacgctatagcaacctcccgcaagaaaagtgggagacatatttatcgcgttctatgtcaattaaggaaatgtggccatctcagcgcttgctaggagaggctggattgtatagagggatatcaggagtagttcagatgccgacgagcgccgggaaatctagagctaccgagcttattattaggtcggcatttctttctgctcgtacgaaattggccttagttatcgctcccttccgggcactatgccaggagatagcaaacgatcttgaaaaggcattcaaggatgatggctatgacgtcaatcaacccagtgacgcgttgcaaccagatgtcgagttcgatttttctaacttatcagattttctcgatttggaatctggaatatttgactcagaggtcgaatcgaagccacaggtcattattcttaccccggaaaagcttctttacatacttcgacaagagccagacattgttcagaaagctggactggtagtttatgacgaagggcatcagtttgacacaggcagccggggtgtaacttatgaactgctgttaacatccattaagcgaatgctacacgaaaatgcccagagcgtgttgatttcagcagtaattcagaatgctgcttctgttgctgcatggctattaaatgacggttcaaaggttgtctccagtagagccttacaggctagtagactcattgcctttgccagccttccgaaaggtaaagatggtcaacttcagttcaatgtggcctctgatagcgatcagaaattctttgtcccgcgagttattgtttcagaaaaaatgcctcgattacctaaggaaagaaaggatcgttttttccctactcaggagagtggctccatagcgttatatcttagtttacgcctgctgaaaaatggtggggttgctatttttacaggaagaaagtcttctgctgcaaaaattgttcgtgaggccgccgaagatatttttcgtcgtggaatttcacttgagccaccttctgcccatagtgaccctgatgagattcgtcgctttgtttatctcttcgaacgtaattttggtgctaatgcatatttgacacaagcagctgctttaggcatttttgctcatcacggcaacactccccaaggtgttcgtctggctattgagtatgctatgaggcaaagccttattcgattgatcatctgcacctcgacacttgcacagggtgtaaaccttccgattcgatacctacttgtaacaagcgcaatgcaggggcgtgaatcgatcaaagtacgcgacttccataatctcatgggacgcgctggacgtgccggaatgtacggtgagggtactgttattttcactgacccccgtctctatgacgagcgtttcgcaaagacgtaccgttggcaagaaacgatcaatctaatcaatcctgatagtgctgagccaactggaagtacattgctttctcttttcgatcctctgcgaaatgatctcggaacagttactctaagctcttcaagctctgctgaagtagccacttacattgtcaatgactgggaaactcttttaaagtgggtagagagcgttcctatcaatattcctaaacagaacttttcggtcgcttcactaatcgaacaacttaaatccaagaaaaagataattgaagcaattgaaagcttcttaatgacatatcgtagtgatgttcagcccgaaacttttgtggacaactctcgagaattggttactgaaacacttgcctactcgcttgccactgaggagcaacaaatactcctgacagatatcttcgagtctgtggcgcgaaggatcgaactttttgttccagatacagcgatccagaagcgtttcgggcggactttgttaggtattgatcaagcattggcaatcgaatcatgggtcactacaaatgcaaacgcactcgagggagcaacctctgccgatcacctgtttgatgtgctatggccgcttttagtactcttatctaatgaaaaacggttgagtgacacagttcctaatggggcactaaagacattagcattggggtggctggctggagattcgtttgcagctctcgttcaacggcttgacaaattgggtgcatcctatccctatggtgcgaaccaaagaaaatttgatcttgatgtggttgtagacctgtgtgaacaaacatttggctttgagtttgcgctgttgctcgcagcggtaaaggaatcctttctcgcgttctcttcagaacaggcgggtgaggtttttagagaatatgttgatcttcttcagaagcgattgaaatatggacttccgaatcagagttgcattgccttttttgaagcgggatttgctgaacgcgtaattgcccagtgtcttgcagaaggaacgactcaaggtgctattcaagttagttttgacgcccgacacatgattcgacaaaacccagagagatttgaagtaatgctacaaggcttcccatcttatttttttgatgtatttaaaacaatcactgcaccttga

SEQ ID NO: 56620 - DNA, 783 bp, Klebsiella pneumoniae; identical to SEQ ID NO: 56580

SEQ ID NO: 56621 - DNA, 3507 bp, Klebsiella pneumoniae; identical to SEQ ID NO: 56581

SEQ ID NO: 56622 - DNA, 780 bp, Klebsiella pneumoniae MRSN 3562; identical to SEQ ID NO: 56538

SEQ ID NO: 56623 - DNA, 3525 bp, Klebsiella pneumoniae MRSN 3562; identical to SEQ ID NO: 56549

SEQ ID NO: 56624 - DNA, 780 bp, Klebsiella pneumoniae
atggcaaatttcgaggactggtgtgattcgacagagcgtaatatcagcgaccattatttgcagtcaataaaggccagggatgccgagtttatgttcggcgttcaggttatggccgcgctaatacctgaacactatgcgtcatcaagaaatatcgctaacgcatttgaagctctaggtaaaccggggctggcggcatacattgctggaaaattgcctgaaacgaaacagattcgttccggtgatttgggtgagatatttgcaactgaatggataaatgcacgtggcaatggctataaaacgcctataaaaagattgcgctggaaagatcatcgcaatatgtcgatgcgtggtgaggacgtcattggtatttacatagatcagtcttctcaacaactttttttccttaaaaccgaagcgaaaagtcgcgccaaaatgacgggagaggtggtttctgaagcccgcgataacttgaataaagagcaagggctgccatcttcacatgccctaatgttcatagcagatcgcctgaatgaacagggtgaggagcttttggctaaagcgatcttaaatgcaacgcttcggcaaggaattgttcctggatgcgtccggcatcttatctttctattatcaggcaactcttcagaaactatgctgaccacttcaattgaaaagtatacaggtcaaaataatcagtggggtgtttgtataagaattgctcgccatagtgagtttattgccgcaacttttgaaaaggtgattagcgatgccagcaacagctga

SEQ ID NO: 56625 - DNA, 3525 bp, Klebsiella pneumoniae
atgccagcaacagctgatgaaattatcgaagctattaaggaagcttcagctgtaggttttcgcgggcgcctgattgcacgcgggcaagcccggtcggtgatctggcgagacggtgacttgccgccggatgcaccggagtttagcgcactgctcagtcaggaccttcaaggctatgcttatgccctaatcgacctcggccttcgtcttcgagaacttaatggagacgacgcctatgtgcgaattgcttttgaacaggccggaaccgcactcgagtcggctattgctaaaggaaaacgcgacagccgggatacggattttcacttcgtaatggctgctgcaagctatcaccttgcgcatctttcagcacgagcctattcgttactcgcaatggttggtcaggatgataatttttcaccaatagaaagggctcttacacaactgatccggcgtgatttgcgtactctgcgcgataatgcgttgggctttcggctcagaggtgatggcagtgatgtgaaaattactgaaatcctccaggctcgcctaaacttgccgcaagacgaaaaaggtgagagtgagtcagaggaggacatcctttttgatgggcttgatttggcactgactgacgcctatatgtcggccatttctctctaccttctcgctgtagaaaggggagaatcacgtttgctctccaaggctattgaaaaattaagaatcagtctaagtatatgtgctcagtttaatatgctaccccagtggtggctaaactttattaccattcatctgttatctgacctttggtcagatacattccatgaaagattgccactggttccagttggtggtgacgctgctgaatggcccgcgcttcgggaactgtttattgcactgcttcaaagacgacctcgagccgaaattgatctctggccatcgcagagagaggccgctggacgctctgttaatgacaatgacgatttggttgtttcgttgccaaccagcgctggaaaaactcgtattgctgaattgtgtattcttcgctgtctggcgggtggcaagcgtgttgttttcatcaccccgcttcgtgcgctttctgcacaaacagaagccactctctccagaacatttgggcctcttgggaaaacaatatcaatgctgtatggcagcattggcgtaagtggtatggatgaggatgcaattcgccagcgtgacatcgtcgtcgccacgcctgaaaaacttgactttgctctccggaatgacccgtcaattattaatgatgtaggactttttatttttgatgaggggcacatgattggggccgatgaaagagaagttcggtatgaagttcaaattcaacggctgttgcgcagacaggatgccgatacgcgcagaattgtctgcctctcggcaattctacctgatggtgagcaactcgatgattttgccggttggctccgtcgtgacaagcctggaggaccaatcaaaaataattggcgaccgacccgcttgcagtttggcgaggtcatatggtccgctccagcaggtcggcttaatctcagtgtcgggtatgaggcggcttgggtatcgcgttttatcgtcagcagacaaccgccaaaggttaaattacctaataaaaagcagcgaacaaaaatgtttccctctgataataaggagctctgcttagcgacagcctggcgtctaattgaagatggacagaccgtacttatttactgcccacttcgccggagcgtcgaaccgtttgccgagacaattgtcgatttgcatcagcgcggactactgccatctttatttgatgctgccccggacattctggatacggctatctcgctgggagaagaatggttgggggcacacagctcgatacttgcctgcctacggttgggcgtggctcttcatcatggcgcattgcctacggcttaccgcaaagaaatcgaacgtttgctgcgagatggggtacttaaagtgacgatctcatcaccgacgctagcacaaggtcttaatctttcggcaacggctatcgtcatgcattctcttcatcggaatcgcgagcttatcaaagtgtccgagttcagaaacgtcataggcagagcagggcgcgcatatgtagatgttgaagggctggtgatttatccaatattcgataaagtaaataaacgccagactaactggcataccctcacatctgacatgggggcccgtgagatggagagcggactaatacagcttgtctgtgtgttattgattcgcatgcatacacggcttggtggggatttaaaagcactcactgaatatgtgaccaacaacgccgtagcgtgggaatttccagaaattatgaccgaatctccgcaagaaagagatattgcgcaggccatctgggaaaaacaactttcaacgcttgatactgctattctgagccttcttggtgagaatgatatcccggatgaccagattgaaactgctcttgatgacattcttcagtcttcactttggcaacgcagtttgcagcgttatagggatgagaatgaaaggattttgctgaaatcgggactcttgtcccgcagccgctacatctggcagcgctcaacggcagcagggcgccgggggtacttcctgtcgggggtaggacttacaaccgggctacgacttgatgctattgccgctaaggccaaccaactattgattgatgcgaatgcggctataatgggcggtgatgccgaagaggcaattgctgctatcactgcgctcgctgaagaggtctttaccttctatccgtttatacccgatccattgcctggcgactggagaggtattttacgttcctggctattgggtgaacccatgactaacgtcgcgaatacgcaggcgtctgaaacgcttcaattcgtcgagaatgggctggtgtatcgacttccgtgggcaatggaggctattagggtacgtgcaacagctaatggagacctcataggcgatacagataccacgctagacgattatgagttaggttttgcggttgctgccgttgaaacaggtaccttgagccgttcgtcttcactgcttattcaggcgggttttagctccaggcttgcagccataaaagtggttgcagacactactgccgattttcaatccggccaggagcttagaaggtggctgaactctgaagaagtgataagccacacggataatcatgactggcctacacctgaaaccagagtgatgtggctggaattcttgggtagtctcagccccaaaggcagccaggtttggagtcgtcatcgttataacggaatggtggactggagagatactccggcagtgatcggcacaccattgcagctttacactgttgatggtattcatcatgtattggctgatgatggcactcctctgggaagtataaatggcagaattaacacaaacagaagaggtcttcttagagttgaggtggatgatgagaatggtcgtgccatgttcgactatttaggaccggacgactttatttctacctga

SEQ ID NO: 56626 - DNA, 783 bp, Klebsiella pneumoniae; identical to SEQ ID NO: 56580

SEQ ID NO: 56627 - DNA, 3507 bp, Klebsiella pneumoniae; identical to SEQ ID NO: 56581

SEQ ID NO: 56628 - DNA, 780 bp, Klebsiella pneumoniae; identical to SEQ ID NO: 56538

SEQ ID NO: 56629 - DNA, 2175 bp, Klebsiella pneumoniae
atgccagcaacagctgatgaaattatcgaagctattaaggaagcttcagctgtaggttttcgcgggcgcctgattgcacgcgggcaagcccggtcggtgatctggcgagacggtgacttgccgccggatgcaccggagtttagcgcactgctcagtcaggaccttcaaggctatgcttatgccctaatcgatctcggccttcgtcttcgagaacttaatggagacgacgcctatgcgcgaattgcttttgaacaggccggaaccgcactcgagtcggctattgctaaaggaaaacgcgacagccgggatacagattttcacttcgtaatggctgctgcaagctatcaccttgcgcatctttcagcacgagcctattcgttactcgcaatggttggtcaggatgataatttttcaccaatagagagggctcttacacaactgatccggcgtgatttgcgtactctgcgcgataatgcgttgggctttcggctcagaggtgatggcagtgacgtgaaaattactgaaatcctccaggctcgcctaaacttgccgcaagacgagaacggtgacagtgagtcagaggaggacatcctttttgatgggcttgatttggcactgactgacgcctatatgtcggccatttctctctaccttctcgctgtagaaaggggagaatcacgtttgctttccagggctattgaaaaattaagaattagtctaagtatatgtgctcagtttaatatgctaccccagtggtggctaaactttattaccattcatctgttatctgacctttggtcagatacattccatgaaagattgccactggttccagttggtggtgacgctgctgaatggcccgcgcttcgggaactgtttattgcactgcttcaaagacgacctcgagccgaaattgatctctggccatcgcagagagaggccgccggacgctctgttaatgacaatgacgatttggttgtttcgttgccaaccagcgctggaaaaactcgtattgctgaattgtgtattcttcgctgtctggcgggtggcaagcgtgttgttttcatcaccccgcttcgtgcgctttctgcacaaacagaagccactctctccagaacatttgggccgcttgggaaaacaatatcaatgctgtatggcagcattggcgtaagtggtatggatgaggatgcaattcgccagcgtgacatcgtcgtcgccacgcctgaaaaacttgactttgctctccggaatgacccgtcaattattaatgatgtaggactttttatttttgatgaggggcacatgattggggccgatgaacgagaggttcggtatgaagttcaaattcaacggctgttgcgcagacaggatgccgatacgcgcagaattgtctgcctctcggcaattctacctgatggtgagcaactcgatgattttgccggttggctccgtcgtgacaagcccggaggaccaatcaaaaataattggcgaccgacccgcttgcagtttggcgaggtcatatggtccgctccagcaggtcggcttaatctcagcgttggttatgaggcggcttgggtatcgcgttttatcgtcagcagacaaccgccaaaggttaaattacctaataaaaagcagcgaacaaaaatgtttccctctgataacaaggagctctgcttagcgacagcctggcgtctaattgaagatggacagaccgtacttatctactgcccacttcgccggagcgtcgaaccgtttgccgagacaattgtcgatctgcatcagcgcggactactgccatctttatttgatgctgccccggacattctggatacggctatctcgctgggagaagaatggttgggggcacacagcccgatacttgcctgcctacggttgggcgtggctcttcatcatggcgcattgcctacggcttaccgcaaagaaatcgaacgtttgctgcgagatggggtacttaaagtgacgatctcatcaccgacgctagcacaaggtcttaatctttcggcaacagctatcgtcatgcattctcttcatcggaatcgcgagcttatcaaagtgtccgagttcagaaacgtcataggcagagcagggcgcgcatatgtagatgttgaagggctggtgatttatccaatattcgataaagtaaataaacgctag

SEQ ID NO: 56630 - DNA, 840 bp, Klebsiella pneumoniae; identical to SEQ ID NO: 56590

SEQ ID NO: 56631 - DNA, 3186 bp, Klebsiella pneumoniae; identical to SEQ ID NO: 56591

SEQ ID NO: 56632 - DNA, 783 bp, Klebsiella pneumoniae; identical to SEQ ID NO: 56580

SEQ ID NO: 56633 - DNA, 3507 bp, Klebsiella pneumoniae; identical to SEQ ID NO: 56581

SEQ ID NO: 56634 - DNA, 783 bp, Klebsiella pneumoniae; identical to SEQ ID NO: 56580

SEQ ID NO: 56635 - DNA, 3507 bp, Klebsiella pneumoniae; identical to SEQ ID NO: 56581

SEQ ID NO: 56636 - DNA, 783 bp, Klebsiella pneumoniae; identical to SEQ ID NO: 56580

SEQ ID NO: 56637 - DNA, 3507 bp, Klebsiella pneumoniae; identical to SEQ ID NO: 56581

SEQ ID NO: 56638 - DNA, 840 bp, Klebsiella pneumoniae; identical to SEQ ID NO: 56590

SEQ ID NO: 56639 - DNA, 3186 bp, Klebsiella pneumoniae; identical to SEQ ID NO: 56595

SEQ ID NO: 56640 - DNA, 783 bp, Klebsiella pneumoniae; identical to SEQ ID NO: 56580

SEQ ID NO: 56641 - DNA, 3507 bp, Klebsiella pneumoniae; identical to SEQ ID NO: 56581

SEQ ID NO: 56642 - DNA, 783 bp, Klebsiella pneumoniae; identical to SEQ ID NO: 56580

SEQ ID NO: 56643 - DNA, 3507 bp, Klebsiella pneumoniae; identical to SEQ ID NO: 56581

SEQ ID NO: 56644 - DNA, 780 bp, Klebsiella pneumoniae; identical to SEQ ID NO: 56538

SEQ ID NO: 56645 - DNA, 3525 bp, Klebsiella pneumoniae; identical to SEQ ID NO: 56549

SEQ ID NO: 56646 - DNA, 780 bp, Klebsiella pneumoniae subsp. pneumoniae; identical to SEQ ID NO: 56538

SEQ ID NO: 56647 - DNA, 3525 bp, Klebsiella pneumoniae subsp. pneumoniae; identical to SEQ ID NO: 56549

SEQ ID NO: 56648 - DNA, 780 bp, Klebsiella pneumoniae
atggcaaatttcgaggactggtgtgattcgacagagcgtaatatcagcgaccattatttgcagtcaataacggccagggatgccgagtgtatgttcggcgttcaggttatggccgcgctaatacctgaacactatgcgtcaccaagaaatatcgctaacgcatttgaagctctaggtaaactggggctggcggcatacattgctggaaaattgcctgaaacgaaacagattcgttccggtgatttgggtgagatatttgcaactgaatggataaatgcacgtagcaatggctataaaacgcctataaaaagattgcgctggaaagatcatcgcaatatgtcgatgcgtggtgaggacgtcattggtatttacatagatcagtcttctcaacaactttttttccttaaaaccgaagcgaaaagtcgcgccaaaatgacgggagaggtggtttctgaagcccgcgataacttgaataaagagcaagggctgccatcttcacatgccctaatgttcatagcagatcgcctgaatgaacagggtgaggagcttttggctaaagcgatcttaaatgcaacgcttcggcaaggaattgttccaggatgcgtccggcatcttatctttctattatcgggcaactcttcagaaactatgctgaccacttcaattgaaaagtatacaggtcaaaataatcagtggggtgtttgtctaagaattgctcgccatggtgagtttattgccgcaacttttgaaaaggtgattagcgatgccagcaacagctga

SEQ ID NO: 56649 - DNA, 3525 bp, Klebsiella pneumoniae; identical to SEQ ID NO: 56549

SEQ ID NO: 56650 - DNA, 780 bp, Klebsiella pneumoniae
atggtcccgttctatgattggtgtgactcggctgacatgccattaggtaatcaccatgttcgagtcatgacgggccggccaggagatattgcgactggcattcagatgacagctagggctatccccgcccactacactacagaggagcggattgccgccgcgcttgcgaagttaggtaagacagcagctgctcaaatgctcaacgatctccttccgcaaactgcgcatattaggtcgggtgaccttggcgagatctatgcaacagaatggattgatgcgtacagcggttatcgagcgcctatcaaaagactgcgctggaaggatcatcgaaatatggcaatgcgcggcgatgatgtcatcggtatgcttctcgacgctgaaacacagcgactcagcttcctgaaaacagaagctaaaagccgtattaacctgcgcgctcaaacgcttgaggaggctcggagcggcttagataaggatagcggccttccctcgtcgcatgcgttatcttttatctcggccagacttatggagataggcaccgatgcaccgctcgtagacgcaatcgacgaggcactctaccggcacggtatcccgcccgagagcgttaaacatctactcttcacgttttcaggtaacccaccacagacgctcctaacacaggcgctacaggcctatcctggcccgattggacaatggggtgtcggtttgcatatcgacaaccatgctgcttttgtcggagccgtctacgatcgagtaattgccgatgccaacaacccctga

SEQ ID NO: 56651 - DNA, 3534 bp, Klebsiella pneumoniae; identical to SEQ ID NO: 56509

SEQ ID NO: 56652 - DNA, 780 bp, Klebsiella pneumoniae; identical to SEQ ID NO: 56650

SEQ ID NO: 56653 - DNA, 3534 bp, Klebsiella pneumoniae; identical to SEQ ID NO: 56509

SEQ ID NO: 56654 - DNA, 774 bp, Klebsiella pneumoniae; identical to SEQ ID NO: 56586

SEQ ID NO: 56655 - DNA, 3402 bp, Klebsiella pneumoniae; identical to SEQ ID NO: 56587

SEQ ID NO: 56656 - DNA, 780 bp, Klebsiella pneumoniae; identical to SEQ ID NO: 56538

SEQ ID NO: 56657 - DNA, 3525 bp, Klebsiella pneumoniae; identical to SEQ ID NO: 56549

SEQ ID NO: 56658 - DNA, 780 bp, Klebsiella pneumoniae; identical to SEQ ID NO: 56538

SEQ ID NO: 56659 - DNA, 3525 bp, Klebsiella pneumoniae; identical to SEQ ID NO: 56549

SEQ ID NO: 56660 - DNA, 831 bp, Klebsiella pneumoniae
atgactgctggacaaccgtactcagcttggctcaaaaaagctgaacatagcataaccacttctgacggcaatgagatagaggtatacgagctcgaaatcgatcttgaagcagggcttgtactatccgcatgggccaaacatttccgtgagcattactgtcttgatagccaaattgatcgcctgcgcagagggactaacaaatcgcgagccgagtatttgagagacttggtgtttcctgatgagtctgaagattttggcccagcaacgcgctccggtgattttgctgaaatccttatcgcggatctacttgaaagccattttggtttttgggttccacgtacccgatatgacaacaaaatggttcgcaacgagtccccaaagggaacagatgtcttagcgtttaagtttgatggcataggcccatcacggccatctacaaaagatatcttgatttcttttgagtcgaaagcacaactcagtggtaagaaagcaaagcctagattgcaagacgccgttatcgactcgataaaggatgtgtatcgaatttcagaatcccttaatgcgatgaagcgccgtttaattgatcgtcaagatgaagaaggtgcagatcgggtagaacgctttcaagaagggttggatgtcccttatgtacgaatgacaggggcggcggctgttttttgttcaagtctttatgattctgttcacatatctgaaactacagactgcacttcgcatgaaaatattaaaaaccttatgttggttgtgatacatgctaaatcgcttatgaaatttgttcacgctctctattggagggcagaaaatgaagcctaa
